United States Patent Application Publication US 2018/0126003 A1 - sequence listing, part 89

SEQ ID NO: 161297 - protein, 456 aa, Artificial Sequence
  derived and/or modified sequence
MARWPAPPPPPPPPPPLAAPPPPGASAKGPPARKLLFMCTLSLSVTYLCYSLLGGSGSLQFPLALQESPGAAAEPPPSPPPPSLLPTPVRLGAPSQPPAPPPLDNASHGEPPEPPEQPAAPGTDGWGLPSGGGGAQDAWLRTPLAPSEMITAQSALPEREAQESSTTDEDLAGRRAANGSSERGGAVSTPDYGEKKLPQALIIGVKKGGTRALLEAIRVHPDVRAVGVEPHFFDRNYEKGLEWYRNVMPKTLDGQITMEKTPSYFVTNEAPKRIHSMAKDIKLIVVVRNPVTRAISDYTQTLSKKPEIPTFEVLAFKNRTLGLIDASWSAIRIGIYALHLENWLQYFPLSQILFVSGERLIVDPAGEMAKVQDFLGLKRVVTEKHFYFNKTKGFPCLKKPEDSSAPRCLGKSKGRTHPRIDPDVIHRLRKFYKPFNLMFYQMTGQDFQWEQEEGDK

SEQ ID NO: 161298 - DNA, 1371 bp, Artificial Sequence
  derived and/or modified sequence
atggccagatggccagcgccgcctccccccccacctccaccccctccccttgccgctcctcctccacccggagcctccgcaaaaggcccacctgcccgaaaactgctcttcatgtgtacactgagtctgtccgtaacatatctgtgctattccctcctgggtgggagtggttccctccagttccccctagcccttcaggagagccccggggctgctgccgaacctcccccctctccgccgcccccatcacttttgcctaccccagtgaggctgggggccccaagtcagccacccgcgccgccccccctcgataatgccagtcacggggaacccccagaacccccagagcagcctgctgctccagggacagacggatggggtttaccttcagggggggggggagctcaggacgcttggctgcggaccccactcgctcctagcgagatgatcactgcccagagtgccctgccggaacgtgaagcccaggaatccagtactaccgacgaggatcttgccgggaggcgggcggcgaacggatcaagtgaacgcggaggtgccgtgtccacacctgactacggggagaagaaacttccccaggcacttattattggagtgaagaagggaggaacgagagcattgctcgaagcaattcgggtacaccccgacgtcagagccgtcggcgtggagcctcactttttcgaccgcaactacgaaaaagggttggagtggtaccgcaatgtgatgcccaagaccctagacgggcagattacgatggaaaaaaccccatcttactttgtcaccaatgaagcgcccaaacggatccactccatggcaaaagatattaaacttattgtcgtcgtgcgtaatcctgtgacacgggctataagcgactacactcaaacgttaagtaagaagcccgagatacccacgttcgaagtgctggcgttcaaaaaccgaaccctgggtctgatcgatgctagctggtccgcaatacgaattgggatttacgcactgcacctagaaaattggctccagtacttccccctgagtcagattctttttgtctctggagaacgtcttatagtcgatcccgccggcgagatggccaaggtacaggatttcctcgggctaaagcgcgtagtaaccgaaaagcatttctactttaataaaaccaaagggttcccctgtctgaagaaacccgaggacagtagtgctccaagatgtctcgggaagtctaagggccgcacacatccacggatcgaccccgatgtgatccatcgacttcggaagttttacaagccctttaaccttatgttttaccagatgacaggccaggatttccagtgggagcaggaggagggcgacaagtag

SEQ ID NO: 161299 - DNA, 3203 bp, Artificial Sequence
  derived and/or modified sequence
cagcgcgcggcggcggcggcagaggctgaagcagaagccgcggcggagccggggaagcgggggcgctgcagacggagcaggtgccgccggcgggtccgcgcgcccccctcggtccccttgcctgaggctgaggggggggcggtggtgggggggccacccggactcggcgggcagcgtggggcggggggccatgcggccgggctcccccctggcgcagcgggacagcggccagggccgggggcgcagcggcgtcgcttcatgcagccggggcggctgggcagcggcggcggcggcggcggcggcggcggcggcgggggcggcggctgaaaccatgtccgggcagcgccgggggctgccgccgccgccgccgccgccgcgagccgggagccgcgatggcccggtggcccgcacctcctccgcctccgcctccgcctccacctctggccgcgccgccgccgcccggcgcctctgctaaggggccgccggcgcgcaagctgctttttatgtgcaccttgtccctgtctgtcacctacctgtgctacagcctcctgggcggctcgggctccctgcaattccctctggcgctgcaggagtcgccgggcgccgccgccgagcccccgccgagcccgccgccaccctctctgctgcctacccccgtgcgcctcggcgccccctcgcagccgcccgcgccgccgccgctggacaacgcgagccacggggagccgcccgagcccccagagcagccagccgcccccgggaccgacggctgggggctgccgagcggcggcggaggcgcccaggacgcctggctccggaccccgctggcccccagcgagatgatcacggctcagagcgcgctgccggagagggaagcgcaggagtccagcaccaccgacgaggatctcgcaggccggagagcggccaacgggagcagcgagaggggcggcgccgtcagcacccccgactatggggagaagaagctgccacaggcgctcatcatcggggtcaagaaaggagggacccgcgcgctgctggaggcgatccgcgtgcacccggacgtgcgggcggtgggcgtagagccgcacttcttcgacaggaactacgaaaaggggttggagtggtacagaaatgtgatgcccaagactttggatgggcaaataaccatggagaagactccaagttactttgtgacaaatgaggctcccaagcgcattcactccatggccaaggacatcaaactgattgtggtggtgagaaaccccgtgaccagggccatctctgactacacgcagacactgtcaaagaaacccgagatccccacctttgaggtgctggccttcaaaaaccggaccctcgggctgatcgatgcttcctggagtgccattcgaatagggatctatgcgctgcatctggaaaactggctccagtatttccccctctcccagatcctctttgtcagtggtgagcgactcattgtggaccccgccggggaaatggccaaagtacaggattttctaggcctcaaacgtgttgtgactgagaagcatttctatttcaacaaaaccaaggggttcccttgcctaaagaagccagaagacagcagtgccccgaggtgcttaggcaagagcaaaggtcggactcatcctcgcattgacccagatgtcatccacagactgaggaaattctacaaacccttcaacttgatgttttaccaaatgactggtcaagattttcagtgggaacaggaagagggtgataaatgaggctagagaggcagaggaaggctagtcaataagctaaggaggctccttgcctgagtccttgaataccccagcttctgcagcttcacttgctggagtgccaagtagatctcctcctccttcatgcagccaggattgcctccagtgctgttagcttaggcaaacaggtggatcccatggcatccccatggaggaaccaggcccatctgggcagcagcatctggttgaccagatggccaccagaacccactgttcattcttatcttctgctagttaatatagcctgaagacagaggataaatagttgtcaatgtcagagacagtgctattaatgtatatgtgagcgacaaaaaaggtctgctttataggggttctcactctagcttggggagccagggttctagccctgtatctgtcatgggcacctgctgtctaaacctctgcttgggcttctccccagaatgcactttgtggctgagtgctccaggactcctagggagcaaggtcctccctctaaggtgtttctagtcttctctttaaaggtctcatcccacaacccctgacttcctccctccccacatcatgaaggcagaggcatgcacattcctcactgaaaaagaaaacacacacccacccacacacacacacacagaagaaaatgaaagctgacacacctcgaagccttctttccaagagccctctaaatggggttgggtctcactcttcatgagtatcctgggttgtgcagaagcttagcatatgcccttgtgttcggatcaggcccacagggctgctcaaagagtagagtaattgtaaccgaggtcagagctctggggttggcagagatgagtggccatatctgggggtaaaagaagaaatcctgtcctcttggtgggaggttaccttacctgaagaccatctctcccaagcactgtagttctgagcatgtttttggggtggactctgtcccctagggtccctagaagggcaaagaccagagagttgacaagtctgttattaggaataatccttagccatgtaatggagaaaggagcagtcagcattcttccaatttgccccaccaccacctcctcgggcttcattttctctatttagagatggcagagagtgaggtagtggcgagaaagctgactccattcatcagatccagtttatgagggttgggggtgagcaagggctgtctgcagaaacccccatcaagagctgctgaatgaagtgtcccttcccatcagtttgattcaattaaaatgcatcatttgacataaagcacttgttcacagatctccaaaaccaggaattgttctagtaaaactggaaatttgtatgagtggggggagttaaatctgttcagctgttattaaactgtcatttctcccgctaaatgaaaaccgtgttgttataaagcttaatgcaacctgatta

SEQ ID NO: 161300 - DNA, 1371 bp, Artificial Sequence
  derived and/or modified sequence
atggcccgctggccagcccctcctcctcctcctcctcctcctccacccctggccgcccctcctcctcctggggccagcgccaagggccccccagccaggaagctgctcttcatgtgcaccctgagcctgtctgtgacctacctgtgctacagcctgctgggcggcagcggcagcctgcagttccccctggccctgcaggagagccctggagctgctgctgagcccccacccagccccccaccacccagcctgctgcccacccctgtgcggctgggcgcccccagccagcccccagcccccccacccctggacaatgccagccacggggagcccccagagcccccagagcagcctgctgcccctggaacagatggctggggcctgcccagcggcggcggcggggcccaggatgcctggctgcggacccccctggcccccagcgagatgatcacagcccagagcgccctgcctgagcgggaggcccaggagagcagcaccacagatgaggacctggccggccggcgggccgccaacggcagcagcgagcggggcggcgctgtgtccaccccagactatggagagaagaagctgccccaggccctgatcattggagtgaagaagggcggcacccgggccctgctggaggccatccgggtgcacccagatgtgcgggctgtgggcgtggagccccacttctttgacagaaattatgagaagggcctggagtggtacagaaatgtgatgcccaagaccctggatggccagatcaccatggagaagacccccagctactttgtgaccaatgaggcccccaagaggatccacagcatggccaaggacatcaagctgattgtggtggtgaggaaccctgtgacccgggccatcagtgactacacccagaccctgagcaagaagccagagatccccacctttgaggtgctggccttcaagaacagaaccctgggcctgattgatgcctcctggagcgccatcagaattggcatctatgccctgcacctggagaactggctgcagtacttccccctgagccagatcctgtttgtgtctggagagcggctgattgtggaccctgctggggagatggccaaggtgcaggacttcctgggcctgaagagggtggtgacagagaagcacttctacttcaacaagaccaagggcttcccctgcctgaagaagccagaggacagcagcgccccccgctgcctgggcaagagcaaaggaagaacccaccccagaattgatcctgatgtgatccaccggctgaggaagttctacaagcccttcaacctgatgttctaccagatgacaggccaggacttccagtgggagcaggaggagggggacaagtag

SEQ ID NO: 161301 - DNA, 1371 bp, Artificial Sequence
  derived and/or modified sequence
atggcccggtggcccgcccccccccccccccccccccccccccccccattggctgctcctcccccaccaggggcaagcgctaaaggacctcccgcacgtaaactgctctttatgtgtaccctttcccttagcgtgacatacctttgctattcactgctgggaggcagcgggtctttgcagtttccactggcattgcaggagtccccaggcgcagcagccgagcctcctccgtccccaccacccccttcactgctgcccactccggtgagactgggagccccatcacaacctcccgcccctccaccccttgataacgcttcacacggtgagcccccagagccaccagaacagcctgcagctccgggcacagacggttggggtctaccatcagggggaggcggcgcgcaagatgcatggctcaggactccactcgctccgagcgaaatgatcaccgcgcagtccgccttgcccgagcgcgaagcacaggagtcctcaactaccgacgaagacctggctggcaggcgggccgcaaatggatcttccgaacggggaggagcggtgtccacacccgactacggggagaagaaactaccccaggccctgattattggggtgaagaaggggggcacccgtgcgcttttggaagctatccgggtgcacccagacgtgagagccgtcggggttgagccccacttttttgaccgaaattacgaaaaaggactggagtggtacagaaatgtcatgcccaagaccctggatggacagatcactatggagaagaccccatcgtacttcgtgaccaacgaggcgccaaaacgcatccactctatggcgaaagatatcaagctaattgtcgtggtcagaaatcccgtaaccagagccatttcagattatacacagacactgagcaagaagcccgagatacccaccttcgaggtcttggcatttaagaatcggaccctggggctaatagacgcaagttggagtgctattcgaatcggcatctacgctttacatttagaaaactggctacagtatttcccactttctcagatcctgttcgtgtccggagagagattgattgtagaccctgcgggagagatggccaaggtccaggactttcttggtctgaagagagtcgtgaccgagaagcatttttatttcaataagaccaaaggcttcccttgtttgaagaagcccgaagactcatccgctccgcgctgcttaggtaagtccaaaggacggacccaccccaggatcgatccagatgtgatccaccgactccgtaagttttacaagcccttcaatctgatgttttaccagatgaccggccaagacttccagtgggaacaggaggagggcgacaagtag

SEQ ID NO: 161302 - DNA, 1371 bp, Artificial Sequence
  derived and/or modified sequence
atggctcggtggcccgcacctccccctccgccacctccgcctcctccactggcggctccccctccacccggagcttctgccaagggccctcccgctcggaagctgctgttcatgtgcacgctcagtctgagcgtgacgtacctgtgctacagccttttggggggatccgggagtctccagttccccctggcattgcaggagtctcccggagcggcagcagagcctcctccttctccacccccaccctcactcctgcctaccccagtgaggctaggagccccttcccagcctcccgctcccccacctttggataacgcctctcacggcgagccaccagagccacctgaacagccggctgcaccgggaacagacggatggggccttccttcaggcggtggcggagcccaggacgcttggctcagaaccccactcgctccttcggaaatgatcaccgcacagagcgctctccctgagcgggaggcacaagagagtagcactaccgatgaggacctggcgggacgaagagcagccaatggatctagcgagcgcggaggcgctgttagcactcccgattacggggagaagaagttaccacaggctctgattatcggtgtcaagaaaggtggtacacgggctttactggaagctatccgggttcaccctgatgtacgcgctgtcggagttgagcctcacttctttgaccgaaactacgagaaggggttggaatggtaccgcaatgtgatgcctaagacgctggacggtcagattaccatggaaaagacgcctagctattttgtaacaaacgaggcccctaaaagaatccatagtatggctaaggacattaaactcatcgtcgttgtgagaaacccggtcaccagggccatcagcgactatacacagacactctccaagaagcccgagattccgaccttcgaggtgttggcttttaaaaaccggacattgggcctcattgatgcctcatggtccgcaatacgaatcgggatctacgcacttcatctcgagaactggctccaatactttcccctttcgcaaatattgtttgtgagcggggaaaggttaatcgttgatccagctggggaaatggctaaagtgcaggattttcttggactgaagcgggtggtaacggagaagcatttctattttaataagacaaagggatttccctgtctaaagaagcctgaagacagctccgcacctcggtgcctgggcaagtctaagggaagaactcacccacggatagatccagatgtgatccaccggctaaggaagttttacaaacctttcaatctgatgttttaccaaatgaccggccaggactttcagtgggagcaggaagagggagataaatag

SEQ ID NO: 161303 - DNA, 1371 bp, Artificial Sequence
  derived and/or modified sequence
atggccagatggcccgccccccccccccccccccccccccccccccccctggccgccccccccccccccggcgccagcgccaagggcccccccgccagaaagctgctgttcatgtgcaccctgagcctgagcgtgacctacctgtgctacagcctgctgggcggcagcggcagcctgcagttccccctggccctgcaggagagccccggcgccgccgccgagcccccccccagcccccccccccccagcctgctgcccacccccgtgagactgggcgcccccagccagccccccgcccccccccccctggacaacgccagccacggcgagccccccgagccccccgagcagcccgccgcccccggcaccgacggctggggcctgcccagcggcggcggcggcgcccaggacgcctggctgagaacccccctggcccccagcgagatgatcaccgcccagagcgccctgcccgagagagaggcccaggagagcagcaccaccgacgaggacctggccggcagaagagccgccaacggcagcagcgagagaggcggcgccgtgagcacccccgactacggcgagaagaagctgccccaggccctgatcatcggcgtgaagaagggcggcaccagagccctgctggaggccatcagagtgcaccccgacgtgagagccgtgggcgtggagccccacttcttcgacagaaactacgagaagggcctggagtggtacagaaacgtgatgcccaagaccctggacggccagatcaccatggagaagacccccagctacttcgtgaccaacgaggcccccaagagaatccacagcatggccaaggacatcaagctgatcgtggtggtgagaaaccccgtgaccagagccatcagcgactacacccagaccctgagcaagaagcccgagatccccaccttcgaggtgctggccttcaagaacagaaccctgggcctgatcgacgccagctggagcgccatcagaatcggcatctacgccctgcacctggagaactggctgcagtacttccccctgagccagatcctgttcgtgagcggcgagagactgatcgtggaccccgccggcgagatggccaaggtgcaggacttcctgggcctgaagagagtggtgaccgagaagcacttctacttcaacaagaccaagggcttcccctgcctgaagaagcccgaggacagcagcgcccccagatgcctgggcaagagcaagggcagaacccaccccagaatcgaccccgacgtgatccacagactgagaaagttctacaagcccttcaacctgatgttctaccagatgaccggccaggacttccagtgggagcaggaggagggcgacaagtag

SEQ ID NO: 161304 - protein, 390 aa, Artificial Sequence
  derived and/or modified sequence
MGQRLSGGRSCLDVPGRLLPQPPPPPPPVRRKLALLFAMLCVWLYMFLYSCAGSCAAAPGLLLLGSGSRAAHDPPALATAPDGTPPRLPFRAPPATPLASGKEMAEGAASPEEQSPEVPDSPSPISSFFSGSGSKQLPQAIIIGVKKGGTRALLEFLRVHPDVRAVGAEPHFFDRSYDKGLAWYRDLMPRTLDGQITMEKTPSYFVTREAPARISAMSKDTKLIVVVRDPVTRAISDYTQTLSKRPDIPTFESLTFKNRTAGLIDTSWSAIQIGIYAKHLEHWLRHFPIRQMLFVSGERLISDPAGELGRVQDFLGLKRIITDKHFYFNKTKGFPCLKKAEGSSRPHCLGKTKGRTHPEIDREVVRRLREFYRPFNLKFYQMTGHDFGWD

SEQ ID NO: 161305 - DNA, 1173 bp, Artificial Sequence
  derived and/or modified sequence
atgggacaaaggttatccggagggcggtcatgcctcgatgtccctggcagactgttgccccaaccccctccgccacctccacctgtgcggcgcaagctagccctgctttttgctatgctctgcgtgtggctctatatgtttctgtactcatgcgcgggctcctgcgccgccgcgcccggcctgctgcttctgggcagtgggagccgggctgcacacgatccacccgcactggccacagctccagacggcaccccaccgcggctgcctttccgagcacctccagctacccctctggcaagcggcaaggagatggccgagggggctgccagccccgaagagcaaagcccagaagtgccagattctccctctccaatctccagctttttctccggatccgggagtaaacaactccctcaggctattattatcggggtcaagaagggtgggaccagggcccttctcgagtttctgagggtgcatccggacgtgcgcgcagtcggggccgagccgcattttttcgatcgatcctatgacaagggcttagcttggtacagagatctcatgccacggaccctcgacggccagatcacaatggaaaagacaccgtcttactttgttaccagggaagctcccgcgaggatttcagctatgtctaaagatacaaaattgatagtggttgtgcgggatcccgtgacccgcgcaattagcgactatacgcaaactttgagtaagcgaccagatatccccacctttgaaagcttgacctttaaaaacagaaccgctgggctgatagatacatcctggtccgccatccagattgggatatatgcgaagcatttagagcattggctgcggcactttccaattcgacagatgctattcgttagcggcgaacgtctcatatcagatcctgcaggtgaattaggaagagtccaggactttcttggactaaagcggatcataaccgacaagcatttctattttaataagaccaagggcttcccgtgcctgaagaaagctgagggttctagtaggccccactgcctgggtaagacgaagggccgtacccaccccgaaattgatcgggaagttgtaagacgcttgcgcgaattctataggcccttcaacctcaagttctaccagatgaccggtcatgatttcggatgggattag

SEQ ID NO: 161306 - DNA, 1173 bp, Artificial Sequence
  derived and/or modified sequence
atgggccaaagactctccggtggaagatcttgcctggatgtaccagggcggctcttgccccagcctccgcctcctccaccccccgttcgcaggaagctggcactcctttttgccatgctgtgtgtctggctgtatatgttcctgtatagttgcgccggatcttgtgcggctgcccctggcctgctcctgctcggctctggatctagagccgctcatgacccacctgccctggccactgcccctgacggaactccccctcgcctgccatttagggctccaccagcgactccccttgcttctggtaaagagatggcggagggggctgctagcccagaggagcagagtcctgaggtcccggactcaccatcgcccatatccagctttttctccggcagcggatctaagcaactcccacaggccattattattggagttaagaagggcggcacaagggctctgttggagtttttaagggtgcatcccgacgtgagagctgttggcgctgagccgcacttctttgatcgctcttacgataaagggctcgcatggtatcgcgatctgatgccaagaacccttgacggtcaaattaccatggagaagacacccagctatttcgtgactcgggaggcacccgctcggatttcagccatgtccaaggataccaagttgattgtcgtggtccgggaccctgttactcgggcgatctctgattatacccaaaccctgtccaagcgacccgatattcctacttttgaaagcctgacttttaaaaataggacagccggtctaattgatacttcctggtccgctatccagatagggatatatgctaagcatctggagcactggttaagacacttccccatccgtcaaatgctcttcgtgtctggtgaaaggctcataagtgatcccgcgggggaattgggaagagtacaggactttctcggactgaagaggataatcactgataaacacttctacttcaacaaaacaaagggctttccctgcttgaagaaagccgaagggagcagccggccacactgcctcggaaaaacaaagggccgaacacacccagaaatagacagagaagtcgtacggcggcttagggagttctatcgcccgttcaacctcaagttttaccaaatgacgggacacgacttcgggtgggactag

SEQ ID NO: 161307 - DNA, 5367 bp, Artificial Sequence
  derived and/or modified sequence
agttcgcctctgcagcctctgcggggaagtgccggggctgctcgaggctcagttcttaggactgcaaggaggcagccccggcgtgcggcggtgcgcacagtctagagtggccagggcgcgagagtgcaacgtcctcctggccccgagcgcgtcgtcgcgccccgggagcagaccctcgcccagcagttaccgccgtcccgactttccgttccagttgcagctcctgccgggcaacatgtcaagagccgccgccgctacagctgccgccgccacctggggaagagcagcagcagcagcggcggccgcgggcacacgggggcaataaaccgagccacccgggcgtccagcgtgccggggaaccctctctgcgctcactgcccggcgggacccacgccatgtgctgagccatgtccctggccgcgcccgcgggcagcgcatggggcagcgcctgagtggcggcagatcttgcctcgatgtccccggccggctcctaccgcagccgccgccgcccccgccgccggtgaggaggaagctcgcgctgctcttcgccatgctctgcgtctggctctatatgttcctgtactcgtgcgccggctcctgcgccgccgcgccggggctgctgctcctgggctctgggtcccgcgccgcacacgacccgccagccctggccacagctccggacgggacgccccccaggctgccgttccgggcgccgccagccaccccactggcttcaggcaaggagatggccgagggcgctgcgagcccggaggagcagagtcccgaggtgccggactccccaagccccatctccagctttttcagtgggtctgggagcaagcagctgccgcaggccatcatcatcggcgtgaagaagggcggcacgcgggcgctgctggagtttctgcgcgtgcaccccgacgtgcgcgccgtgggcgccgagccccatttcttcgatcgcagctacgacaagggcctcgcttggtaccgggacctgatgcccagaaccctggacgggcagatcaccatggagaagacgcccagttacttcgtcacgcgggaggcccctgcgcgcatctcggccatgtccaaggacaccaagctcatcgtggtggtgcgggacccggtgaccagggccatctcggactacacgcagacgctgtccaagcggcccgacatccccaccttcgagagcttgacgttcaaaaacaggacagcgggcctcatcgacacgtcgtggagcgccatccagatcggcatctacgccaagcacctggagcactggctgcgccacttccccatccgccagatgctcttcgtgagcggcgagcggctcatcagcgacccggccggggagctgggccgcgtgcaagacttcctgggcctcaagaggatcatcacggacaagcacttctacttcaacaagaccaagggcttcccctgcctgaagaaggcggagggcagcagccggccccattgcctgggcaagaccaagggcaggacccatcctgagatcgaccgcgaggtggtgcgcaggctgcgcgagttctaccggcctttcaacctcaagttctaccagatgaccgggcacgactttggctgggattgagcagacccgggctatgtaccttacccacgtggcttatctattgacagagattatatgtatgtaaaatgtacagaaatctattttataataatttatttttaattcataagcaattaattcactaagctgcctagccacactctttagagagttagcttcataatctgttaacattccaaagtgtttaactctagtatttcgttctcttcttcacaattgatggtgcttctattttttcttctcccctacctgttatatttaaaacaaagaaaagcacaacttgagatttttgttgttacgggtattcagccttcagtcaccgtctgagttctccagttgctgcctccttgtcttgtcttgggtctcccattccagcttccctgtctcttcctgcctgtgtacctcgtaggaacgctgagctgcctcaacagggctgtattctgaagggcaggcctcatgcagcagcctccttgcagatgtggtgtcccgtccaatgatgtagcctgaaagccacagccctagggttctgtccctccctccattcagcacatggggaaatttctcactccctttacagggacatccacatcctttttttttcttttttttttttttttttttttgagatggagtcttgctcttgttgcccaggctggggcgtaatggtgtgatatatgcttaccacaacctctggctcccggttcaagcgattctcctgtctcagcctcccaagtatctgggattacaggcatgcaccaccatgcctggctaattttgtatttttagtagagacggggtttcttcatgttggtcaggctggtatcaaactcccgacctcaggtgatccgcctgccttggcctccaaagtgttgggattataggcgtgagccactgcgcccgctatccacatccttctagagtcagaatggtagggtctgttgacttcagcttttgattttgcaggatggccctgtgtcctcctctgccccattccctggttcattaaccagtttgaagtgtatgtagattgttgccccgtctttcccaggtcacatgtgtgagatgcctgggtgctgcttcagaaatcaagatgatctcctttaatttgcatgaaactacaccatgctgcgttccccaggcagacagttctgctttgacacaccaaagaatcccgtaggctagcagagccaccagcacaaaccaagggcgctgggtgtcgagactcagaggggtcagctgtgtccctcggcatcagcgtctaccaaggtgctgctaggtacagagccagccagtgttgggcagcaggctcacagcctcaatagggagaaaagacaaaggcctcaaaatgacaggcagcctgacagaggaaggagtctgacacctcagcttgatgcgtctttggaattcctagctcatctcagaattatatcttagagtgataatatgggtggtagccagtggccaaacagcaagaactaagagtggcccttgcaaaaaaaggttgggaaagctgggcccatattgcctgtaaacccttgagcctgatgctcatacagctgtcccttgttttagccaggtcttgacagaagggttaccagcactgtcactgctctacagaatgctctccccgtgcctctctgttgatttataacagttgggtaaccagatagcaatatagtggcaattgagtagccatatagtaatacaggggcagttggttaaacatatagcaatatcacataatgatatgtttaatttaacctcagttttttaaaccagaatgcttctaccataaaagaattgtgatttcagttatacttccatcaaggaatatgtgggaagatatacatattgtcaaaatggttgggatgggatagttacaaaggacacttttgtatgttgtatgggatcacttgcctgatagtataaggaacattgtatgaaaagatgaaaagatacttcatttttagaaactgatcagagatgtcactggtctttaagtgatgtcttgaaaatccagtatgtatttgcccaaaagttttagcctacatctagctagcttacacttagcagccaaaccatcattgtgtaggttctgttttggaggaagctcatgggggatctgtgtatttcttaggtttctccctgttctccaatgttttatccatttcgtagcttttttactgtctccagaaagtagtgtgggacctgcacttaggggaataccagaatcatagcgtggttctgccttcttgatgagtgattgtgaaaaacacctgcataagggtgctaattggttgtgtattttttcatttatttgaaatcaaactgagaacacctcttttcggtttacagcataacatggcttgaagtaaaaggcagtatccaagtccttcacctggtcttgccctgtctactttctgatcattctgatggtctgatgtggctgttgatgtggaactgcagaagagttcagagaagagtatgcaacaaagccataggaaaacacacaggagcttttccctccccttcaggtccccgccctctttccaagctggacaattttttattaagttgtttattccctgccttaaaactgaaacaggaaattttctggtagaaggagggtcatttagtcacgaacactgaagtgggtcaaaattctattctgggtcaaatccttgaattcaaacagatgtccataatcagtactgatggaatagagcaagtttttctatgtaagacaaataaatcaaacatcatgtgcatctcctcataagggtctgcaagggtctgatggtttaaagttcctaacagatctggttgcagcatctgccggagcttgcaccccatcatcggacggtcatcttcctgctgcagaagttaggtaacataagacttagatttcttcctgttctagcaatctgcaagaccaccaggcttaactttttagctgccagaagacaaacccccttttctgtttcggcaatttgtcctggcacgtgttttggacttcctccgatttacacgaaaagctctgatattcattggagtactttattttttttcctcagttttgtttcttttctcatgtaaaaacaaacaaaaaggtcaacaaaaaaaaattgaggtttttcttgtttctatctagttcatgctttctttgcggtgtttgaacagtagtctgttaacttagtaggtggtacctggaaaggtattttaagtatagtgactgtttaataaatacttaattggatgatggaggaggagaaattgttttcttcccaggattctctttgggggtcattttgtgtgacagatatattttagacatttggagaaacagtttcagatcctgccaggatatttttgtaaaaaaggaaaatggaagattccaataaactagaaacagtacgtatctaagatgctgacacagaagctaatgtgacttttcagcttatcaagaggatggccaataaaacttaaaggtgtggttagatgttttctcacttttgtgacattaatttatcactgagtctcattcaaccaagtaatctaaaatactgtgcaaattctagcagtatgtcttcgataacttggatgttaggatagccaatatgtacaaaaaattaaatcaagtattttgtcctatgtataacacaaattaattttacacagagaaagatgtttctaggcaagtgaaattctggtaattcatactatttctttgtatgaacaaataaaatatattttgccaa

SEQ ID NO: 161308 - DNA, 2808 bp, Artificial Sequence
  derived and/or modified sequence
agttcgcctctgcagcctctgcggggaagtgccggggctgctcgaggctcagttcttaggactgcaaggaggcagccccggcgtgcggcggtgcgcacagtctagagtggccagggcgcgagagtgcaacgtcctcctggccccgagcgcgtcgtcgcgccccgggagcagaccctcgcccagcagttaccgccgtcccgactttccgttccagttgcagctcctgccgggcaacatgtcaagagccgccgccgctacagctgccgccgccacctggggaagagcagcagcagcagcggcggccgcgggcacacgggggcaataaaccgagccacccgggcgtccagcgtgccggggaaccctctctgcgctcactgcccggcgggacccacgccatgtgctgagccatgtccctggccgcgcccgcgggcagcgcatggggcagcgcctgagtggcggcagatcttgcctcgatgtccccggccggctcctaccgcagccgccgccgcccccgccgccggtgaggaggaagctcgcgctgctcttcgccatgctctgcgtctggctctatatgttcctgtactcgtgcgccggctcctgcgccgccgcgccggggctgctgctcctgggctctgggtcccgcgccgcacacgacccgccagccctggccacagctccggacgggacgccccccaggctgccgttccgggcgccgccagccaccccactggcttcaggcaaggagatggccgagggcgctgcgagcccggaggagcagagtcccgaggtgccggactccccaagccccatctccagctttttcagtgggtctgggagcaagcagctgccgcaggccatcatcatcggcgtgaagaagggcggcacgcgggcgctgctggagtttctgcgcgtgcaccccgacgtgcgcgccgtgggcgccgagccccatttcttcgatcgcagctacgacaagggcctcgcttggtaccgggacctgatgcccagaaccctggacgggcagatcaccatggagaagacgcccagttacttcgtcacgcgggaggcccctgcgcgcatctcggccatgtccaaggacaccaagctcatcgtggtggtgcgggacccggtgaccagggccatctcggactacacgcagacgctgtccaagcggcccgacatccccaccttcgagagcttgacgttcaaaaacaggacagcgggcctcatcgacacgtcgtggagcgccatccagatcggcatctacgccaagcacctggagcactggctgcgccacttccccatccgccagatgctcttcgtgagcggcgagcggctcatcagcgacccggccggggagctgggccgcgtgcaagacttcctgggcctcaagaggatcatcacggacaagcacttctacttcaacaagaccaagggcttcccctgcctgaagaaggcggagggcagcagccggccccattgcctgggcaagaccaagggcaggacccatcctgagatcgaccgcgaggtggtgcgcaggctgcgcgagttctaccggcctttcaacctcaagttctaccagatgaccgggcacgactttggctgggattgagcagacccgggctatgtaccttacccacgtggcttatctattgacagagattatatcataacatggcttgaagtaaaaggcagtatccaagtccttcacctggtcttgccctgtctactttctgatcattctgatggtctgatgtggctgttgatgtggaactgcagaagagttcagagaagagtatgcaacaaagccataggaaaacacacaggagcttttccctccccttcaggtccccgccctctttccaagctggacaattttttattaagttgtttattccctgccttaaaactgaaacaggaaattttctggtagaaggagggtcatttagtcacgaacactgaagtgggtcaaaattctattctgggtcaaatccttgaattcaaacagatgtccataatcagtactgatggaatagagcaagtttttctatgtaagacaaataaatcaaacatcatgtgcatctcctcataagggtctgcaagggtctgatggtttaaagttcctaacagatctggttgcagcatctgccggagcttgcaccccatcatcggacggtcatcttcctgctgcagaagttaggtaacataagacttagatttcttcctgttctagcaatctgcaagaccaccaggcttaactttttagctgccagaagacaaacccccttttctgtttcggcaatttgtcctggcacgtgttttggacttcctccgatttacacgaaaagctctgatattcattggagtactttattttttttcctcagttttgtttcttttctcatgtaaaaacaaacaaaaaggtcaacaaaaaaaaattgaggtttttcttgtttctatctagttcatgctttctttgcggtgtttgaacagtagtctgttaacttagtaggtggtacctggaaaggtattttaagtatagtgactgtttaataaatacttaattggatgatggaggaggagaaattgttttcttcccaggattctctttgggggtcattttgtgtgacagatatattttagacatttggagaaacagtttcagatcctgccaggatatttttgtaaaaaaggaaaatggaagattccaataaactagaaacagtacgtatctaagatgctgacacagaagctaatgtgacttttcagcttatcaagaggatggccaataaaacttaaaggtgtggttag

SEQ ID NO: 161309 - DNA, 1173 bp, Artificial Sequence
  derived and/or modified sequence
atgggccagaggctgagcggcggccgcagctgcctggatgtgcccggccgcctgctgccccagcccccacctcctcctcctcctgtgcggaggaagctggccctgctgtttgccatgctgtgtgtgtggctgtacatgttcctgtacagctgtgccggcagctgtgccgccgcccctggcctgctgctgctgggcagcggcagccgggccgcccatgaccccccagccctggccacagccccagatggcaccccaccccggctgcccttccgggcccccccagccacccccctggccagcggcaaggagatggccgagggcgccgccagccctgaggagcagagccctgaggtgcctgacagccccagccccatcagcagcttcttcagcggcagcggcagcaagcagctgccccaggccatcatcattggagtgaagaagggcggcacccgggccctgctggagttcctgcgggtgcacccagatgtgcgggctgtgggcgctgagccccacttctttgacaggagctatgacaagggcctggcctggtacagagacctgatgcccaggaccctggatggccagatcaccatggagaagacccccagctactttgtgacccgggaggccccagcccgcatcagcgccatgagcaaggacaccaagctgattgtggtggtgcgggaccctgtgacccgggccatcagtgactacacccagaccctgagcaagaggccagacatccccacctttgagagcctgaccttcaagaacagaacagctggcctgattgacacctcctggagcgccatccagatcggcatctatgccaagcacctggagcactggctgcggcacttccccatccggcagatgctgtttgtgtctggagagcggctcatcagtgaccctgctggggagctgggccgggtgcaggacttcctgggcctgaagaggatcatcacagacaagcacttctacttcaacaagaccaagggcttcccctgcctgaagaaggccgagggcagcagccggccccactgcctgggcaagaccaagggccgcacccaccctgagattgaccgggaggtggtgcggcggctgcgggagttctaccggcccttcaacctgaagttctaccagatgactggacatgactttggctgggactag

SEQ ID NO: 161310 - DNA, 1173 bp, Artificial Sequence
  derived and/or modified sequence
atgggccagcggctgagcggcggccggagctgcctggacgtgcccggccggctcctgcctcaaccccccccgccccctccccctgtgaggagaaagctcgctcttttattcgcaatgctgtgcgtttggctttatatgttcctgtacagctgcgctggctcttgcgccgcggctccaggtctcctgctgctggggtcaggctcccgcgcggcccacgatccacccgcgctcgccacagctcctgatggaactcccccacgcctgccatttcgggctccacccgctacccccttggcctccggcaaagaaatggcggagggagccgcgagcccagaggaacagtccccagaggtcccggattcgccctcaccaatttcttccttcttctccggctcggggagcaaacagctcccccaggccatcatcattggggttaagaaaggtggcacccgcgcgttgctggaattccttcgagttcatccggacgtccgcgcagtgggggctgaaccacacttcttcgaccgctcttatgataaaggtcttgcatggtacagagatctcatgccacggacgcttgatggacaaattacaatggagaagaccccttcatattttgtaaccagggaagcccccgctaggattagtgccatgtctaaagacaccaagctcatcgttgtggtgagggatccggttacaagggctatatctgattacacacaaacactttctaagcggccagacatcccaactttcgaatctcttacattcaaaaaccgaactgcaggtctgattgatacatcctggtcagccattcagatcggcatctacgccaagcatctggagcattggcttagacatttccccatacgccagatgctctttgtgagcggggagcgcctgatcagcgacccagctggagagctcggacgagtccaagacttcttaggcttaaaaaggatcatcactgataagcacttctatttcaataagactaagggatttccgtgtttaaagaaagcagaaggaagcagtcgacctcattgtctagggaaaaccaaaggccgtactcacccggagatcgatagggaagtcgtgcgaaggctccgagagttctataggcccttcaatttaaagttctaccaaatgaccgggcacgacttcgggtgggactag

SEQ ID NO: 161311 - DNA, 1173 bp, Artificial Sequence
  derived and/or modified sequence
atgggccagcggctgagcggcggccggagctgcctggacgtgcccggtcgccttctcccacagcctcctccccctccccctcccgtgcgtaggaagcttgccctcctgtttgcaatgctttgcgtctggctctacatgtttctgtactcttgcgccgggagttgcgcagccgcgcccggacttctgctcctcgggtctgggagccgcgcagcacatgatcctccagcccttgccaccgcccctgacggcacaccccccaggctgccgttcagggcccctcccgctacgcctctcgctagcgggaaagagatggctgaaggggccgcctccccagaagaacagtctccagaggttcccgactctccttcaccgatctcctcattttttagtggttcgggctcaaaacaacttccacaggccattataattggcgtgaagaagggcggcactagggctcttttggagttcctcagagtccaccctgacgtgcgggctgtcggcgctgagccccatttcttcgacagatcctacgacaaggggctcgcctggtatcgggatttgatgccacggacacttgacggacagatcacaatggagaaaacacctagctacttcgtaaccagagaggctcctgcccgtatatctgctatgtcaaaggatacaaagctcatagtggtggtccgtgaccccgtgactagggcaatctctgattacacacagaccctctctaagcggcccgacatcccaacctttgagtcactgactttcaaaaatcgaaccgccgggcttattgacacctcctggtcggcgatccaaatagggatttacgctaaacatcttgagcactggctgcgacactttcccatcagacagatgctgttcgtttctggggaacgactgatctcagaccccgctggtgaattagggagagtgcaggattttctgggtctgaaacgaattatcactgacaaacatttctacttcaacaaaaccaaggggttcccctgtctcaagaaggctgaggggtcctcaagacctcattgccttggaaagacgaagggacgcacccatccagaaatcgaccgggaggtagtgcggaggctccgcgagttctataggcccttcaacctcaagttctaccagatgacaggccacgacttcgggtgggactag

SEQ ID NO: 161312 - DNA, 1173 bp, Artificial Sequence
  derived and/or modified sequence
atgggacagagactgtcaggcggaaggtcttgtctggatgtccctggacggcttttgccccagccccctcctccgcctcctcccgtgagacgaaagctcgctctgcttttcgctatgctatgtgtgtggctttacatgtttctatacagctgtgctggctcctgcgctgctgccccaggactactgctgttggggtcaggaagtcgagcggcacacgacccccctgcactcgccactgcccctgatggaactcccccacgactcccatttcgtgcaccacctgcgacccccttagcctccggaaaagagatggccgagggcgctgcttcccccgaggagcagagtccagaggtgcctgacagcccctcgcctatttctagctttttttctgggtccggttccaagcaattgcctcaggctattatcatcggcgttaagaaggggggaacccgggctctcctggagttcttgcgtgtccacccggacgttagggcggtcggcgctgaacctcacttttttgaccgctcttacgataagggccttgcgtggtaccgagacctgatgcctaggaccctcgacggacagataacaatggaaaagacaccgtcttatttcgtgactagggaggccccagcacggatctctgcaatgtctaaagataccaaacttatagtagtggtcagggatcccgtcacaagggccatcagtgactacactcagacattgagtaagcgtcccgatattccaaccttcgagagccttacgttcaagaaccgcactgcaggactcatcgatacctcatggtccgctattcaaattggcatttacgcaaagcacctggaacattggctccgtcattttccaatccgccagatgctcttcgtctctggagagcgcttgatctcggatccggcaggagaactcggcagagtgcaagacttcctaggcctgaagagaattataaccgacaagcacttttatttcaataagacaaaaggttttccatgtctgaaaaaagccgaaggatcaagcagacctcattgtcttgggaaaaccaaggggagaacgcaccctgaaatcgaccgagaggtggtgcgcaggctgcgcgagttttatcgaccattcaacctgaagttttatcagatgacagggcacgattttgggtgggactag

SEQ ID NO: 161313 - DNA, 1173 bp, Artificial Sequence
  derived and/or modified sequence
atgggccaacggctcagcgggggtaggtcatgtctggacgttcccggtaggctccttcctcagcccccaccacctcctccgccagtgaggcgcaaattggcacttctgttcgccatgctgtgcgtgtggttgtatatgtttctctactcttgtgccggttcctgtgctgccgctcctgggcttctactactgggttccggtagccgcgctgcacatgacccacccgctctggcaaccgccccagacggcactcctccaaggctcccgtttagagctccccctgccacccctctagccagcgggaaggagatggccgagggcgctgcatccccagaagagcaaagccctgaggttcccgattcccccagccctatttcttcattcttttccggaagtgggtccaagcaacttccccaggccatcattatcggagtaaagaagggcggtacccgcgcacttcttgaatttttaagggtgcatcctgacgtacgggctgttggagccgaaccacattttttcgaccgatcctatgacaaaggactcgcatggtaccgggatctaatgcccaggactttggatggccaaatcacaatggagaagacgcctagttactttgtcacccgtgaggcccctgcaagaatctccgctatgtctaaagatacaaagctgatcgtggtcgtgagggatcccgttactcgggctataagtgactacactcagaccctgtcaaaacggccagatatccccacattcgagtccctcaccttcaagaatcggacagcgggactgattgacacatcctggtctgctattcaaatcgggatctacgcgaaacaccttgagcactggctgagacatttccccattaggcagatgctattcgtctcgggggagagactcatttccgatcccgcaggggagctggggcgtgtccaagattttcttgggttgaaaagaatcattacagacaagcatttctacttcaacaagacaaaagggttcccttgccttaagaaagccgagggcagtagcaggccacattgcctcggcaaaacaaagggacgaacacatcctgaaatagatagagaagtcgtcagaaggcttcgggagttctatcggccattcaacctgaaattttaccagatgaccgggcatgatttcggttgggattag

SEQ ID NO: 161314 - DNA, 1173 bp, Artificial Sequence
  derived and/or modified sequence
atgggccagagactgagcggcggcagaagctgcctggacgtgcccggcagactgctgccccagcccccccccccccccccccccgtgagaagaaagctggccctgctgttcgccatgctgtgcgtgtggctgtacatgttcctgtacagctgcgccggcagctgcgccgccgcccccggcctgctgctgctgggcagcggcagcagagccgcccacgacccccccgccctggccaccgcccccgacggcaccccccccagactgcccttcagagccccccccgccacccccctggccagcggcaaggagatggccgagggcgccgccagccccgaggagcagagccccgaggtgcccgacagccccagccccatcagcagcttcttcagcggcagcggcagcaagcagctgccccaggccatcatcatcggcgtgaagaagggcggcaccagagccctgctggagttcctgagagtgcaccccgacgtgagagccgtgggcgccgagccccacttcttcgacagaagctacgacaagggcctggcctggtacagagacctgatgcccagaaccctggacggccagatcaccatggagaagacccccagctacttcgtgaccagagaggcccccgccagaatcagcgccatgagcaaggacaccaagctgatcgtggtggtgagagaccccgtgaccagagccatcagcgactacacccagaccctgagcaagagacccgacatccccaccttcgagagcctgaccttcaagaacagaaccgccggcctgatcgacaccagctggagcgccatccagatcggcatctacgccaagcacctggagcactggctgagacacttccccatcagacagatgctgttcgtgagcggcgagagactgatcagcgaccccgccggcgagctgggcagagtgcaggacttcctgggcctgaagagaatcatcaccgacaagcacttctacttcaacaagaccaagggcttcccctgcctgaagaaggccgagggcagcagcagaccccactgcctgggcaagaccaagggcagaacccaccccgagatcgacagagaggtggtgagaagactgagagagttctacagacccttcaacctgaagttctaccagatgaccggccacgacttcggctgggactag

SEQ ID NO: 161315 - protein, 406 aa, Artificial Sequence
  derived and/or modified sequence
MAPPGPASALSTSAEPLSRSIFRKFLLMLCSLLTSLYVFYCLAERCQTLSGPVVGLSGGGEEAGAPGGGVLAGGPRELAVWPAAAQRKRLLQLPQWRRRRPPAPRDDGEEAAWEEESPGLSGGPGGSGAGSTVAEAPPGTLALLLDEGSKQLPQAIIIGVKKGGTRALLEFLRVHPDVRAVGAEPHFFDRSYDKGLAWYRDLMPRTLDGQITMEKTPSYFVTREAPARISAMSKDTKLIVVVRDPVTRAISDYTQTLSKRPDIPTFESLTFKNRTAGLIDTSWSAIQIGIYAKHLEHWLRHFPIRQMLFVSGERLISDPAGELGRVQDFLGLKRIITDKHFYFNKTKGFPCLKKAEGSSRPHCLGKTKGRTHPEIDREVVRRLREFYRPFNLKFYQMTGHDFGWDG

SEQ ID NO: 161316 - DNA, 1221 bp, Artificial Sequence
  derived and/or modified sequence
atggcgcctcccggaccagcatccgccctgtccaccagcgcggagcccctctcgcgaagcatctttaggaaatttttgctcatgctgtgctctttgcttacgagtctatacgtattttactgtctggccgagcgatgtcagaccttgagcgggcccgtggtcgggttgtccgggggcggcgaggaagcgggtgcccctggtggcggggtcctcgctggggggccgcgggagttagcagtgtggccagctgctgcccagcgaaagaggttgttgcagcttccgcagtggcgaagaagaagaccgcctgcccccagagacgatggggaggaggccgcatgggaagaggaatccccaggactaagtggtggcccaggcggcagcggagccggcagcaccgtggctgaggcaccccctgggaccttggcactgctactcgatgaaggctcaaagcaactaccgcaggctatcattataggcgtcaagaaaggcgggaccagggcactgctggaatttctgcgggtccatccagatgtacgagctgttggtgcagagccacacttttttgatcgctcctacgataagggactcgcatggtatcgcgacttgatgccacgcactctggatggacagattacaatggagaagacccccagctactttgtgacccgtgaagctcctgcaaggatctcagcaatgtccaaggacacgaaactaatcgtggtcgttagagaccccgtgaccagggccatctccgattatacacagacactgtcaaagagaccagacattccaactttcgaaagcttgacctttaagaatagaacggctggactcatcgacacatcttggagcgccatccagatcggcatctacgcgaaacatctggaacactggctcaggcactttcccatacgccaaatgctctttgtatcaggagagagactgatctcagatcccgctggggaactggggagggtgcaagactttctgggtctgaagcgcatcattacagacaagcatttttacttcaacaagaccaaaggctttccctgtctgaaaaaagccgaagggagtagccgcccgcattgcctgggtaagacaaaaggccggacgcaccctgagatcgaccgcgaagtggtccgcaggcttcgagagttctatagaccattcaatcttaagttctaccagatgactggccatgactttggatgggacgggtag

SEQ ID NO: 161317 - DNA, 2527 bp, Artificial Sequence
  derived and/or modified sequence
cagcggcggcccaggaggcagccggtgagcgcctgcgagcagagtggcgggggccgctgacaggtcccgcgcagcccagcccagcccagccacgcggctcacaggtggggtccaagagcagtttggagcaacccggcgctacggagaggggtggacggctctgcacgggcctcctgtctcccgctcgggcagagggactcggggggacctcgctccttggctgagagaacctgaactcgggcggagagaacgcgcccaggcgggcaaggggaccagagaaagccggggctggaagtcactgtcgctcgccactgtctggagcgcacggagcgcagaggcccggcagccgcgcgtgccctcacggggaccgagccagtgatgcaggatcgctgagcggagatccgcgccgagaagtctctcggggccggggctgagacgcacgccttcgacaccgctgccaagaccccgattccggcgactcttgcggggaaccgaggggccaaggctgccccaagctcaggacttgggcgagtctaagacgatggtttcttaagcacggacccgcgttccccttcccgctccctcgactggaggcagggatcctgcgcggggcccccgggattccgtttccccgcggagccccggccgctgcctcccgggacagttcgcacggccacaggggcgcacggcgatgtggcctccgtccagcgcgctggcccgccggggggatgctctggcacctgtcggggtccaggcctagcatggccggcgcgttgcccgacgtcgcctccggctaggatggcccctccgggcccggccagtgccctctccacctcggccgagccgctgtcccgcagcatcttccggaagttcttgctgatgctctgctccctgctcacgtccctttacgtcttctactgcctggccgagcgctgccagaccctgtccggccccgtcgtggggctgtccggcggcggcgaggaggcgggggcccctggtggcggcgtcctggccggaggcccgagggagctggcggtgtggccggcggcggcacagagaaagcgcctcctgcaactgccgcagtggcggaggcgccggccgcccgcgccccgcgacgacggcgaggaggcggcctgggaagaagagtcccctggcctgtcagggggtccgggcggctccggggccggaagcaccgtggccgaggccccgccggggaccctggcgctgctcctggacgaaggcagcaagcagctgccgcaggccatcatcatcggagtgaagaagggcggcacgcgggcgctgctggagttcctgcgcgtgcaccccgacgtgcgcgccgtgggcgccgagccccacttcttcgaccgcagctacgacaagggcctcgcctggtaccgggacctgatgcccagaaccctggacgggcagatcaccatggagaagacgcccagttacttcgtcacgcgggaggcccccgcgcgcatctcggccatgtccaaggacaccaagctcatcgtggtggtgcgggacccggtgaccagggccatctcggactacacgcagacgctgtccaagcggcccgacatccccaccttcgagagcttgacgttcaaaaacaggacagcgggcctcatcgacacgtcgtggagcgccatccagatcggcatctacgccaagcacctggagcactggctgcgccacttccccatccgccagatgctcttcgtgagcggcgagcggctcatcagcgacccggccggggagctgggccgcgtgcaagacttcctgggcctcaagaggatcatcacggacaagcacttctacttcaacaagaccaagggcttcccctgcctgaagaaggcggagggcagcagccggccccattgcctgggcaagaccaagggcaggacccatcctgagatcgaccgcgaggtggtgcgcaggctgcgcgagttctaccggcctttcaacctcaagttctaccagatgaccgggcacgactttggctgggatggataaccatataatttaaaaagaaaaaaaaaatcaaaatataatatatttttttaccaatcggtagagaagagacagtttaatatttgtgctgaaaatatgtttcagtatttttttcaatgaatgttaagagattgttctcactcccgccccatcttaatgtataaccaacaccaaacacgtggatcaacagaaaaggaaaatttcactcgtctaaacactttcaattttcagtttttattttatgttctatatacccagtcataaagtataagcatcagttgtcattaaaagttttcagaaaatcttgaggttaaacatctctctctctttttttaaaatacaaggccctgataaaattgatatctatccttatatttttctccctttttcccgtgccactttttcttaaattatttcccagttagtattatcatatgtttgtacccgtcacagttttcatagtgctttcaaatacacctttttgatcattaaaataaaaaaataaatcttg

SEQ ID NO: 161318 - DNA, 1221 bp, Artificial Sequence
  derived and/or modified sequence
atggcccctcctggccctgccagcgccctgagcaccagcgctgagcccctgagccgcagcatcttcaggaagttcctgctgatgctgtgcagcctgctgaccagcctgtatgtgttctactgcctggccgagcgctgccagaccctgagcggccctgtggtgggcctgagcggcggcggggaggaggccggggcccctgggggcggcgtgctggccggcggcccccgggagctggccgtgtggccagctgctgcccagaggaagaggctgctgcagctgccccagtggaggagaagaagacctccagcccccagagatgatggagaggaggccgcctgggaggaggagagccctggcctgagcggcggccctgggggcagcggggccggcagcacagtggccgaggcccctcctggcaccctggccctgctgctggatgagggcagcaagcagctgccccaggccatcatcatcggcgtgaagaagggcggcacccgggccctgctggagttcctgcgggtgcacccagatgtgcgggctgtgggcgctgagccccacttctttgacaggagctatgacaagggcctggcctggtacagagacctgatgcccaggaccctggatggccagatcaccatggagaagacccccagctactttgtgacccgggaggccccagcccgcatcagcgccatgagcaaggacaccaagctgattgtggtggtgcgggaccctgtgacccgggccatcagtgactacacccagaccctgagcaagaggccagacatccccacctttgagagcctgaccttcaagaacagaacagctggcctgattgacacctcctggagcgccatccagatcggcatctatgccaagcacctggagcactggctgcggcacttccccatccggcagatgctgtttgtgtctggagagcggctcatcagtgaccctgctggggagctgggccgggtgcaggacttcctgggcctgaagaggatcatcacagacaagcacttctacttcaacaagaccaagggcttcccctgcctgaagaaggccgagggcagcagccggccccactgcctgggcaagaccaagggccgcacccaccctgagattgaccgggaggtggtgcggcggctgcgggagttctaccggcccttcaacctgaagttctaccagatgacaggccatgactttggctgggatggatag

SEQ ID NO: 161319 - DNA, 1221 bp, Artificial Sequence
  derived and/or modified sequence
atggccccccccggccccgccagcgccctgagcaccagcgccgagcccctttccaggtctatcttccgaaagttcctgctgatgctgtgcagccttctcacatcactgtacgtcttctattgtctcgccgagaggtgccagacgctgtcaggacccgtggtgggattgtccggcggcggagaggaagccggggcgcctggagggggggtcctggcaggtggcccccgagagttggcagtatggcctgctgctgctcagcgcaagcgcctcttacaactccctcaatggaggcgtcggaggcctccggcacctagggatgacggcgaagaagcagcctgggaggaagagagcccaggtctctcaggcgggcctgggggcagcggtgcgggtagcacagtggcagaagctccgccaggcacactcgccctgctgttggatgaaggcagcaaacaactcccccaggccatcatcatcggcgtgaagaagggggggacccgagcactgttagaatttctgagagtacacccggacgtccgagcagtcggcgctgagccccatttcttcgaccgcagctatgataaaggacttgcctggtacagagacctcatgccaagaactcttgatggtcagattactatggaaaagactccatcctactttgtgaccagagaagcccctgcccgcatttctgccatgtcaaaggatacgaagctcatcgtggtcgtccgagaccccgtcactcgggctatttccgattacacccagacactcagcaaaaggcccgatataccgaccttcgagagcctcaccttcaaaaatcgaacagcgggattgattgacacgtcttggtcagcgattcaaattggcatctacgccaaacacctggagcactggttgaggcactttcctatcaggcaaatgctcttcgtgagcggggagaggctcatcagtgatcccgcaggcgaattgggcagggtccaggattttctaggcctgaagcgcataattacggataagcacttttattttaataagacaaaggggtttccatgtctgaaaaaggccgagggcagttcaaggccacactgtctggggaagactaaggggaggactcacccagagattgaccgggaggttgtgagacgcctccgtgaattctacaggccttttaatctgaagttttatcagatgaccggacatgatttcggctgggatggctag

SEQ ID NO: 161320 - DNA, 1221 bp, Artificial Sequence
  derived and/or modified sequence
atggcacctcctggcccagcctcagctttaagtacttcagcggagcccctgagccggagtatttttcggaaattcctgctgatgctctgctccctcttgacctctctttatgtcttttactgtcttgcagagcgatgtcagacactctcaggacctgtggtggggctctctggtgggggtgaggaggccggagcccctgggggaggagtcctcgccggaggcccacgggaactggcggtatggcctgctgcggcacagcggaaacgattgttgcagcttccgcagtggcgcagaagacggcctcccgcaccgagagatgacggggaggaggccgcatgggaggaagagtctcccggtctcagcgggggacctggcggaagcggcgctgggagtacagtcgccgaagctcctccaggcacccttgcgctcctgttagacgagggatccaaacagctcccacaggccattataataggggtgaaaaagggcggaacacgcgctctattggagtttctcagggtgcaccctgacgtacgcgctgtaggggctgaaccacacttcttcgatagatcttatgataagggcttagcatggtaccgggatctgatgccaaggacattagacgggcagattactatggaaaaaactccttcttactttgttaccagagaggcaccggctagaatctcagccatgagcaaggacacaaaacttatcgtggttgttcgtgatccagtaactagggcgatctccgactacacgcagaccctgagcaagcggcctgacattcctaccttcgagagcttgacattcaagaataggactgctggccttatcgacacctcttggtccgctattcagatcggcatttatgccaaacacctcgagcactggcttaggcatttccccattaggcaaatgctcttcgtgtcgggggaacgacttatatccgatcccgctggcgagcttggaagggtgcaggatttcctcggactgaaaagaatcatcactgataagcatttttatttcaacaaaaccaaaggcttcccctgtttgaagaaagccgaaggctctagtaggccacactgtttggggaagaccaaggggcgaacccaccccgagatcgatcgggaggtggtgcggagactgcgagagttctatagaccattcaacctgaaattctatcagatgacaggccatgatttcgggtgggacgggtag

SEQ ID NO: 161321 - DNA, 1221 bp, Artificial Sequence
  derived and/or modified sequence
atggccccccccggccccgccagcgccctgagcaccagcgccgagcccctgagcagaagcatcttcagaaagttcctgctgatgctgtgcagcctgctgaccagcctgtacgtgttctactgcctggccgagagatgccagaccctgagcggccccgtggtgggcctgagcggcggcggcgaggaggccggcgcccccggcggcggcgtgctggccggcggccccagagagctggccgtgtggcccgccgccgcccagagaaagagactgctgcagctgccccagtggagaagaagaagaccccccgcccccagagacgacggcgaggaggccgcctgggaggaggagagccccggcctgagcggcggccccggcggcagcggcgccggcagcaccgtggccgaggccccccccggcaccctggccctgctgctggacgagggcagcaagcagctgccccaggccatcatcatcggcgtgaagaagggcggcaccagagccctgctggagttcctgagagtgcaccccgacgtgagagccgtgggcgccgagccccacttcttcgacagaagctacgacaagggcctggcctggtacagagacctgatgcccagaaccctggacggccagatcaccatggagaagacccccagctacttcgtgaccagagaggcccccgccagaatcagcgccatgagcaaggacaccaagctgatcgtggtggtgagagaccccgtgaccagagccatcagcgactacacccagaccctgagcaagagacccgacatccccaccttcgagagcctgaccttcaagaacagaaccgccggcctgatcgacaccagctggagcgccatccagatcggcatctacgccaagcacctggagcactggctgagacacttccccatcagacagatgctgttcgtgagcggcgagagactgatcagcgaccccgccggcgagctgggcagagtgcaggacttcctgggcctgaagagaatcatcaccgacaagcacttctacttcaacaagaccaagggcttcccctgcctgaagaaggccgagggcagcagcagaccccactgcctgggcaagaccaagggcagaacccaccccgagatcgacagagaggtggtgagaagactgagagagttctacagacccttcaacctgaagttctaccagatgaccggccacgacttcggctgggacggctag

SEQ ID NO: 161322 - protein, 367 aa, Artificial Sequence
  derived and/or modified sequence
MAYRVLGRAGPPQPRRARRLLFAFTLSLSCTYLCYSFLCCCDDLGRSRLLGAPRCLRGPSAGGQKLLQKSRPCDPSGPTPSEPSAPSAPAAAVPAPRLSGSNHSGSPKLGTKRLPQALIVGVKKGGTRAVLEFIRVHPDVRALGTEPHFFDRNYGRGLDWYRSLMPRTLESQITLEKTPSYFVTQEAPRRIFNMSRDTKLIVVVRNPVTRAISDYTQTLSKKPDIPTFEGLSFRNRTLGLVDVSWNAIRIGMYVLHLESWLQYFPLAQIHFVSGERLITDPAGEMGRVQDFLGIKRFITDKHFYFNKTKGFPCLKKTESSLLPRCLGKSKGRTHVQIDPEVIDQLREFYRPYNIKFYETVGQDFRWE

SEQ ID NO: 161323 - protein, 344 aa, Artificial Sequence
  derived and/or modified sequence
PPARAHGAMAYRVLGRAGPPQPRRARRLLFAFTLSLSCTYLCYSFLCCCDDLGRSRLLGAPRCLRGPSAGGQKLLQKSRPCDPSGPTPSEPSAPSAPAAAVPAPRLSGSNHSGSPKLGTKRLPQALIVGVKKGGTRAVLEFIRVHPDVRALGTEPHFFDRNYGRGLDWYRSLMPRTLESQITLEKTPSYFVTQEAPRRIFNMSRDTKLIVVVRNPVTRAISDYTQTLSKKPDIPTFEGLSFRNRTLGLVDVSWNAIRIGMYVLHLESWLQYFPLAQIHFVSGERLITDPAGEMGRVQDFLGIKRFITDKHFYFNKTKGFPCLKNRIEPPASMLGQIKRENSCTD

SEQ ID NO: 161324 - DNA, 1104 bp, Artificial Sequence
  derived and/or modified sequence
atggcatatagagttttaggtcgggccgggccgccacagccacgccgcgcaagaaggctgctcttcgccttcaccctgtctttgagctgtacctacctatgctattcttttctgtgctgttgcgatgacctcggccgaagtcggctgcttggggccccccggtgccttaggggacccagcgccgggggacagaagcttttgcagaagagccggccctgtgacccttcaggcccgactcccagcgagcccagtgcgccaagcgcacctgctgctgccgttccagctccccggctgagcggctctaaccacagcgggagcccaaagctgggcacaaaacgtctgccccaggctttgatcgtcggcgtcaaaaaagggggaactcgcgctgtgctggagtttattagggtgcaccctgacgttagagcgcttggaaccgaaccccatttttttgaccggaattacggccgagggctagactggtaccgaagtctcatgcctaggactctggaaagccagattacccttgaaaaaacaccaagctactttgtgacgcaggaggcacccagacgcatctttaacatgtctagagataccaaattgatcgtcgtggtgaggaaccctgttaccagagctatatccgactacactcaaaccctgagcaaaaaacccgatatcccaaccttcgaaggactgtcattccggaaccgcactctcggacttgtagatgtgagctggaacgccatccggatcgggatgtacgtcttacacctcgaatcgtggctacagtactttccacttgcccaaatacatttcgtgagcggagagaggctgattactgaccctgccggtgaaatggggcgcgtgcaggatttcttagggatcaagagatttatcaccgacaaacacttttattttaataagaccaaggggttcccctgtttgaagaagacagagtcctcactgctacccaggtgtttgggaaagagtaaaggcagaactcacgtgcaaattgatcctgaggtgatagaccagttaagggaattttatcgcccctacaatataaagttttacgaaactgtcgggcaagatttccgttgggagtag

SEQ ID NO: 161325 - DNA, 1035 bp, Artificial Sequence
  derived and/or modified sequence
cctccggccagagcccacggcgctatggcctatcgcgtcctcggacgggcaggtcctccgcagcctcggagggcccgccgcctgctctttgccttcactttgagtctgagctgcacttacttgtgctattctttcctctgctgctgtgacgatctcggaagaagcagactgttgggagccccacggtgcttgcggggcccttccgctggaggccaaaaactacttcagaaatcccgtccctgcgatccctctggtccaaccccgagtgagcccagtgcgccctcagctcccgccgccgctgtgccagcaccacggttgagtggctctaaccactctgggtccccaaagctcggtaccaagcgactgccccaggcgctgattgttggagtaaagaaaggaggaactagggccgtcctagaattcattagggtgcaccctgatgtcagagcactgggcacggaaccccacttcttcgaccgcaattacggacggggactggattggtatcggtctctgatgccgcggaccctcgagtcccagatcaccttagagaagaccccaagttactttgtgacccaggaagcccctaggcgaatttttaatatgagcagggatacaaaactgatcgttgtggtccggaaccctgtgacccgtgcgatctcagactacacccagaccttgtctaagaagcccgatatcccaacgttcgaagggctgtctttccgcaatcgtacactcggtctggtcgatgtgtcatggaatgccatcaggatcggtatgtacgtgctgcatcttgaaagctggctgcagtattttcctctcgcccagatccatttcgtgtccggtgagcgcctcattaccgaccctgccggcgagatgggtcgagtgcaagacttcctgggcataaaaagattcatcacggacaagcacttctactttaacaaaacaaaaggcttcccttgtttaaaaaaccggatcgagcctcctgcctccatgctggggcagatcaagcgggaaaatagctgcacagattag

SEQ ID NO: 161326 - DNA, 2314 bp, Artificial Sequence
  derived and/or modified sequence
gccagatcgcggccggcgccagcgccaccgtccggtccacccgccagcccgcacagccgcgccgccgccgagcgtttcgtgagcggcgctccgaggatcaggaatggggcttcgggcgctgggcgcgctccgaacccggcgcacgtaagagcctgggagcgcccgagccgcccggctgcccggagccccatcgcctaggaccgggagatgctggaaatgcaaccgcctgttccccgaggagccgctgcccccgggaccccctggcactgtgcgcaccctggtcagcagcccccggagaagacggcgcccccaacgcccgacccgcgtggccgtggcagcgccacgcgagccctctaggcgaccgcagggccacagcagctcagccgccggtgccccctcggaaaccatgacccccggcgcgggcccatggagccatggcctatagggtcctgggccgcgcggggccacctcagccgcggagggcgcgcaggctgctcttcgccttcacgctctcgctctcctgcacttacctgtgttacagcttcctgtgctgctgcgacgacctgggtcggagccgcctcctcggcgcgcctcgctgcctccgcggccccagcgcgggcggccagaaacttctccagaagtcccgcccctgtgatccctccgggccgacgcccagcgagcccagcgctcccagcgcgcccgccgccgccgtgcccgcccctcgcctctccggttccaaccactccggctcacccaagctgggtaccaagcggttgccccaagccctcattgtgggcgtgaagaaggggggcacccgggccgtgctggagtttatccgagtacacccggacgtgcgggccttgggcacggaaccccacttctttgacaggaactacggccgcgggctggattggtacaggagcctgatgcccaggaccctcgagagccagatcacgctggagaagacgcccagctactttgtcactcaagaggctcctcgacgcatcttcaacatgtcccgagacaccaagctgatcgtggttgtgcggaaccctgtgacccgtgccatctctgattacacgcagacactctccaagaagcccgacatcccgacctttgagggcctctccttccgcaaccgcaccctgggcctggtggacgtgtcatggaacgccatccgcatcggcatgtacgtgctgcacctggagagctggctgcagtacttcccgctagctcagattcacttcgtcagtggcgagcgactcatcactgacccggccggcgagatggggcgagtccaggacttcctgggcattaagagattcatcacggacaagcacttctatttcaacaagaccaaaggattcccttgcttgaaaaaaacagaatcgagcctcctgcctcgatgcttgggcaaatcaaaagggagaactcatgtacagattgatcctgaagtgatagaccagctccgagaattttatagaccgtataatatcaaattttatgaaaccgttgggcaggacttcaggtgggaataagcccacgaaaggaaagggctctcaagggctcttctgctcatctcttccgtgagatttgctcccagaccctctgatctccctccaacaaaccctggctccagccccctttcccaacttgagttgcatcatcttggaaccaggaagcccagctaaagccaagagaccagagagtccctgccactagttttcatcagtctgttcaagcaaagttgatctgctcctggcacgtccagtaaattccagaatcattctcctttctgcccataaagggccttggagaattgctttaagaagagtgaatgttccaatgatgatagatattataagcgatgatggttctgttgctatgaacacagcagtcggtccctgtcattgtccacccaggagtggccttgttaattccaagtggcatgtatcttccctctgagcttcatttcttcaagatgctctgggtggtgggatgggagaccatcctcagccctcctcagaccttatcaattcattgagagattgcaaagctgaaagcacctccggccactcctgggagacagaccctttggtgatgaaataaaccagtgacttcagagcctatggtctcaactgtgcttgaaaaacactgtctctgaaaacaactttgtgattctccctgctccctgtggacaaaagcacataattctgctgttacgggtactttgctcatacgagctttcatgttcagcatgcaatggaatcatgcttgtccatgtgaaataaatatggctctctcgtgtccttaa

SEQ ID NO: 161327 - DNA, 2724 bp, Artificial Sequence
  derived and/or modified sequence
gccagatcgcggccggcgccagcgccaccgtccggtccacccgccagcccgcacagccgcgccgccgccgagcgtttcgtgagcggcgctccgaggatcaggaatggggcttcgggcgctgggcgcgctccgaacccggcgcacgtaagagcctgggagcgcccgagccgcccggctgcccggagccccatcgcctaggaccgggagatgctggaaatgcaaccgcctgttccccgaggagccgctgcccccgggaccccctggcactgtgcgcaccctggtcagcagcccccggagaagacggcgcccccaacgcccgacccgcgtggccgtggcagcgccacgcgagccctctaggcgaccgcagggccacagcagctcagccgccggtgccccctcggaaaccatgacccccggcgcgggcccatggagccatggcctatagggtcctgggccgcgcggggccacctcagccgcggagggcgcgcaggctgctcttcgccttcacgctctcgctctcctgcacttacctgtgttacagcttcctgtgctgctgcgacgacctgggtcggagccgcctcctcggcgcgcctcgctgcctccgcggccccagcgcgggcggccagaaacttctccagaagtcccgcccctgtgatccctccgggccgacgcccagcgagcccagcgctcccagcgcgcccgccgccgccgtgcccgcccctcgcctctccggttccaaccactccggctcacccaagctgggtaccaagcggttgccccaagccctcattgtgggcgtgaagaaggggggcacccgggccgtgctggagtttatccgagtacacccggacgtgcgggccttgggcacggaaccccacttctttgacaggaactacggccgcgggctggattggtacaggagcctgatgcccaggaccctcgagagccagatcacgctggagaagacgcccagctactttgtcactcaagaggctcctcgacgcatcttcaacatgtcccgagacaccaagctgatcgtggttgtgcggaaccctgtgacccgtgccatctctgattacacgcagacactctccaagaagcccgacatcccgacctttgagggcctctccttccgcaaccgcaccctgggcctggtggacgtgtcatggaacgccatccgcatcggcatgtacgtgctgcacctggagagctggctgcagtacttcccgctagctcagattcacttcgtcagtggcgagcgactcatcactgacccggccggcgagatggggcgagtccaggacttcctgggcattaagagattcatcacggacaagcacttctatttcaacaagaccaaaggattcccttgcttgaaaaacagaatcgagcctcctgcctcgatgcttgggcaaatcaaaagggagaactcatgtacagattgatcctgaagtgatagaccagctccgagaattttatagaccgtataatatcaaattttatgaaaccgttgggcaggacttcaggtgggaataagcccacgaaaggaaagggctctcaagggctcttctgctcatctcttccgtgagatttgctcccagaccctctgatctccctccaacaaaccctggctccagccccctttcccaacttgagttgcatcatcttggaaccaggaagcccagctaaagccaagagaccagagagtccctgccactagttttcatcagtctgttcaagcaaagttgatctgctcctggcacgtccagtaaattccagaatcattctcctttctgcccataaagggccttggagaattgctttaagaagagtgaatgttccaatgatgatagatattataagcgatgatggttctgttgctatgaacacagcagtcggtccctgtcattgtccacccaggagtggccttgttaattccaagtggcatgtatcttccctctgagcttcatttcttcaagatgctctgggtggtgggatgggagaccatcctcagccctcctcagaccttatcaattcattgagagattgcaaagctgaaagcacctccggccactcctgggagacagaccctttggtgatgaaataaaccagtgacttcagagcctatggtctcaactgtgcttgaaaaacactgtctctgaaaacaactttgtgattctccctgctccctgtggacaaaagcacataattctgctgttacgggtactttgctcatacgagctttcatgttcagcatgcaatggaatcatgcttgtccatgtgaaataaatatggctctctcgtgtccttaatgctgggcttttctctgtaagctggttctgcagcacaattcattaattaaacttctcccagtgcaagaaggcagctggtgctgggggtggtctggggggtcagggaggagggcaaggactacatggggcagaggcaaggcggtggtggagatgaggaaagaagttcttcttggcagaagctggggcagaaagatcacatgagatctgtggggacaccctctatctgaaacataagtctgtgttcattctctgcttagaaattttagatctgaagtgctacactgaaggtccgaaggttgatggggcatcagatatctttttggttggccagcatgatattttgaaataactgtcaacagttagaaactgggagcattcatatgtaaaaaatatggattttcagcttcttctt

SEQ ID NO: 161328 - DNA, 1104 bp, Artificial Sequence
  derived and/or modified sequence
atggcctacagagtgctgggccgggccggccccccccagccccggcgggcccggcggctgctgtttgccttcaccctgagcctgagctgcacctacctgtgctacagcttcctgtgctgctgtgatgacctgggccgcagccggctgctgggcgccccccgctgcctgcggggccccagcgctgggggccagaagctgctgcagaagagccggccctgtgaccccagcggccccaccccatctgagcccagcgcccccagcgccccagctgctgctgtgcctgccccccggctgagcggcagcaaccacagcggcagccccaagctgggcaccaagaggctgccccaggccctgattgtgggcgtgaagaagggcggcaccagggctgtgctggagttcatccgggtgcacccagatgtgcgggccctgggcacagagccccacttctttgacaggaactacggccggggcctggactggtaccgcagcctgatgcccaggaccctggagagccagatcaccctggagaagacccccagctactttgtgacccaggaggccccccggcgcatcttcaacatgagccgggacaccaagctgattgtggtggtgagaaatcctgtgacccgggccatcagtgactacacccagaccctgagcaagaagccagacatccccacctttgagggcctgtccttcaggaacagaaccctgggcctggtggatgtgtcctggaatgccatccgcatcggcatgtatgtgctgcacctggagagctggctgcagtacttccccctggcccagatccactttgtgtctggagagcggctcatcacagatcctgctggggagatgggccgggtgcaggacttcctgggcatcaagcgcttcatcacagacaagcacttctacttcaacaagaccaagggcttcccctgcctgaagaagacagagagcagcctgctgccccgctgcctgggcaagagcaagggccgcacccacgtgcagattgatcctgaggtgattgaccagctgcgggagttctaccggccctacaacatcaagttctatgaaacagtgggccaggacttccgctgggagtag

SEQ ID NO: 161329 - DNA, 1035 bp, Artificial Sequence
  derived and/or modified sequence
cctccagcccgggcccacggggccatggcctacagagtgctgggccgggccggccccccccagccccggcgggcccggcggctgctgtttgccttcaccctgagcctgagctgcacctacctgtgctacagcttcctgtgctgctgtgatgacctgggccgcagccggctgctgggcgccccccgctgcctgcggggccccagcgctgggggccagaagctgctgcagaagagccggccctgtgaccccagcggccccaccccatctgagcccagcgcccccagcgccccagctgctgctgtgcctgccccccggctgagcggcagcaaccacagcggcagccccaagctgggcaccaagaggctgccccaggccctgattgtgggcgtgaagaagggcggcaccagggctgtgctggagttcatccgggtgcacccagatgtgcgggccctgggcacagagccccacttctttgacaggaactacggccggggcctggactggtaccgcagcctgatgcccaggaccctggagagccagatcaccctggagaagacccccagctactttgtgacccaggaggccccccggcgcatcttcaacatgagccgggacaccaagctgattgtggtggtgagaaatcctgtgacccgggccatcagtgactacacccagaccctgagcaagaagccagacatccccacctttgagggcctgtccttcaggaacagaaccctgggcctggtggatgtgtcctggaatgccatccgcatcggcatgtatgtgctgcacctggagagctggctgcagtacttccccctggcccagatccactttgtgtctggagagcggctcatcacagatcctgctggggagatgggccgggtgcaggacttcctgggcatcaagcgcttcatcacagacaagcacttctacttcaacaagaccaagggcttcccctgcctgaagaaccgcatcgagcccccagcctccatgctgggccagatcaagcgggagaacagctgcacagactag

SEQ ID NO: 161330 - DNA, 1104 bp, Artificial Sequence
  derived and/or modified sequence
atggcctaccgggtgctgggccgggccggccccccccagccccggcgtgctaggcgcttgcttttcgccttcacgctctctttaagttgcacatacctctgctatagctttctatgctgctgcgacgatctgggccgcagcaggctgctaggggcaccccgctgtcttaggggcccctctgcggggggacagaagctgttgcagaagtccagaccctgcgacccatccggacctactccatctgagcctagcgcccccagtgcacccgccgccgctgtgcctgctccccggttatcagggtccaatcactccggatctcctaagctggggactaagcggcttccacaggcactgattgttggggtaaaaaaaggtggcacacgagcagtgctggaatttataagggtacaccccgatgttcgagccttgggaacggagccccatttctttgacagaaactatggccgcggcctcgattggtatcgcagccttatgccacgaacgctcgaaagccagatcacactggaaaaaacccctagctattttgtcactcaagaggctcctagaagaatatttaatatgagcagagacaccaagctgattgtggtggttaggaatccggtaactcgggctataagtgattatactcagacattgtctaaaaagccagatatccctacctttgaggggctttcttttagaaatcgaaccctcgggttggtggacgtatcttggaatgctattcggatcggcatgtacgtcttacatctggaaagctggttacagtacttccctctggcccagattcacttcgtgtcaggggaaaggctgattacagaccccgcaggcgagatgggaagagtgcaggattttttgggcatcaaacgctttataacagacaagcacttttacttcaataagacaaaaggctttccctgcctgaaaaagaccgaatccagtttgcttcctcgctgtctgggcaaatccaaggggaggactcatgtgcagatagatcctgaagttatagatcagctgagggagttttacagaccttacaatatcaaattctatgagacggtgggtcaagatttcaggtgggaatag

SEQ ID NO: 161331 - DNA, 1035 bp, Artificial Sequence
  derived and/or modified sequence
ccccccgcccgggcccacggcgccatggcctaccgggtgctgggcagagccggcccccctcagcctcgtcgggctcggcgcttactgttcgcattcacactgagcctgtcctgtacatatctttgctattcatttctgtgttgctgtgacgatttgggcagatccagacttcttggggcacctagatgtctgaggggcccaagtgccggcggtcaaaagctacttcagaaaagtcgcccctgcgaccccagcgggccaactccttcggagccatcggccccgagcgcccccgcagccgctgttcccgccccccgcctcagcgggtcaaatcactcgggcagtccaaagttgggaaccaaacgcctcccccaggccctgatcgtcggagttaaaaaggggggtacccgggccgtcctagagtttatacgagtgcatcctgatgtgagagcattggggacagaacctcattttttcgaccggaactacggtagagggctggattggtacaggagcctgatgccccgcacactcgaatcccagatcacactggagaagactccttcctacttcgtgacgcaggaggcgcctaggagaatcttcaatatgtcaagagacacgaagctgatcgtcgttgtccggaacccggtcacccgggccatttctgattatacacagactctcagcaaaaaacccgatatcccaactttcgagggcttaagctttcggaacagaaccttaggactggtcgacgtgtcttggaacgccataaggattggaatgtatgttttacatctggaaagctggcttcagtatttccctctggcgcaaattcattttgtgtcaggggaaagactgattactgacccagctggcgagatgggaagagtccaagactttcttggtattaaaagattcatcaccgacaaacatttttactttaacaagaccaaaggtttcccctgcttaaaaaacagaatcgaaccacccgcctccatgctcgggcagattaaacgagagaactcttgcactgactag

SEQ ID NO: 161332 - DNA, 1104 bp, Artificial Sequence
  derived and/or modified sequence
atggcctatagggtgctgggcagagccggtcctcctcagcctaggagggcacgacgtctgctttttgcgttcaccctttctctgagttgcacctatttgtgttactcattcctctgctgttgtgacgatctgggacgaagtcgcttgttaggcgcacccagatgtctgcggggtccaagcgcgggaggacagaagctcctacagaagtcccgaccgtgcgacccatccggcccaacaccctctgagccatccgccccaagtgcgcctgccgcagctgtgcccgcacccagattgagcggctccaaccattctggcagccccaaactgggaactaaacggctgccacaggccctgatcgtgggcgtgaagaagggcggaactagggccgtccttgagttcatcagagtgcaccccgatgttcgggcactggggactgagcctcacttttttgatagaaattatggtcgcggattagactggtacagatcactaatgcctaggaccctggagtcccagataactttggaaaaaacgccaagttacttcgtgactcaggaagcgcctcgaagaatcttcaatatgagccgagatacgaagttgatcgtagtcgtgagaaatcctgtgacacgggctattagtgattatacccagaccttatccaagaagcccgatatacccacgttcgagggtcttagttttcggaataggaccctgggcctggtggacgtaagttggaatgcaatacgcatcggaatgtacgtgttacatctagagagctggttgcaatactttcccctggcacagattcacttcgtttcgggcgagagactgattacggaccctgcgggagaaatgggaagagttcaggactttctgggaattaaacggttcattacggataagcatttctattttaacaaaactaaggggtttccttgcctgaaaaaaactgagagctccttgctgccccgttgcctgggtaagagcaaggggagaacacatgtgcagattgaccctgaagtgatcgatcagctaagggaattttaccggccttataacattaagttctacgagactgtggggcaggatttccggtgggaatag

SEQ ID NO: 161333 - DNA, 1035 bp, Artificial Sequence
  derived and/or modified sequence
ccaccggctcgcgcacacggggcaatggcatacagagtgctgggtagggccggtcctcctcagcccagaagagccaggcggctgctttttgcctttacactatcattgtcttgcacctacctctgttactcttttctgtgttgctgtgatgatctggggagatcgagactacttggcgctcctagatgcctgaggggcccatctgcagggggtcagaaactcttacagaaatcccgcccttgtgatccctccggcccaaccccgtcggagccttctgcaccatcagcccctgctgccgcagtgcccgctccacggttgtccggctccaaccattcaggatcgcccaagctgggaaccaagagactacctcaagccctgattgtcggagtgaaaaaggggggaacccgggcagtgctggaattcatccgggtacacccagatgtacgggcactaggcactgagccacatttcttcgacagaaattatggtcggggtctggattggtaccgttcattgatgccacggacactggagagtcagatcaccctcgagaaaacacccagttacttcgtgacgcaggaagcccctcgacggatcttcaacatgagccgcgatacaaaattaatcgttgtcgttaggaaccctgtgaccagggccatatccgactatacacaaacgctgtctaaaaagccagacattcctacattcgaggggttatcgtttagaaatagaacactgggcctggtcgacgtgtcgtggaacgctatacgcattggcatgtacgtactacatcttgaatcttggttgcagtacttccccctcgcgcagatccacttcgtgagtggcgagcgactgataaccgacccagcaggagagatgggcagagtccaggattttcttgggataaagcggtttatcaccgacaagcatttctactttaacaagactaaaggattcccatgcctaaagaaccgcatagaaccccctgccagcatgctgggccagatcaaaagggaaaattcctgcaccgattag

SEQ ID NO: 161334 - DNA, 1104 bp, Artificial Sequence
  derived and/or modified sequence
atggcctacagagtgctgggcagagccggccccccccagcccagaagagccagaagactgctgttcgccttcaccctgagcctgagctgcacctacctgtgctacagcttcctgtgctgctgcgacgacctgggcagaagcagactgctgggcgcccccagatgcctgagaggccccagcgccggcggccagaagctgctgcagaagagcagaccctgcgaccccagcggccccacccccagcgagcccagcgcccccagcgcccccgccgccgccgtgcccgcccccagactgagcggcagcaaccacagcggcagccccaagctgggcaccaagagactgccccaggccctgatcgtgggcgtgaagaagggcggcaccagagccgtgctggagttcatcagagtgcaccccgacgtgagagccctgggcaccgagccccacttcttcgacagaaactacggcagaggcctggactggtacagaagcctgatgcccagaaccctggagagccagatcaccctggagaagacccccagctacttcgtgacccaggaggcccccagaagaatcttcaacatgagcagagacaccaagctgatcgtggtggtgagaaaccccgtgaccagagccatcagcgactacacccagaccctgagcaagaagcccgacatccccaccttcgagggcctgagcttcagaaacagaaccctgggcctggtggacgtgagctggaacgccatcagaatcggcatgtacgtgctgcacctggagagctggctgcagtacttccccctggcccagatccacttcgtgagcggcgagagactgatcaccgaccccgccggcgagatgggcagagtgcaggacttcctgggcatcaagagattcatcaccgacaagcacttctacttcaacaagaccaagggcttcccctgcctgaagaagaccgagagcagcctgctgcccagatgcctgggcaagagcaagggcagaacccacgtgcagatcgaccccgaggtgatcgaccagctgagagagttctacagaccctacaacatcaagttctacgagaccgtgggccaggacttcagatgggagtag

SEQ ID NO: 161335 - DNA, 1035 bp, Artificial Sequence
  derived and/or modified sequence
ccccccgccagagcccacggcgccatggcctacagagtgctgggcagagccggccccccccagcccagaagagccagaagactgctgttcgccttcaccctgagcctgagctgcacctacctgtgctacagcttcctgtgctgctgcgacgacctgggcagaagcagactgctgggcgcccccagatgcctgagaggccccagcgccggcggccagaagctgctgcagaagagcagaccctgcgaccccagcggccccacccccagcgagcccagcgcccccagcgcccccgccgccgccgtgcccgcccccagactgagcggcagcaaccacagcggcagccccaagctgggcaccaagagactgccccaggccctgatcgtgggcgtgaagaagggcggcaccagagccgtgctggagttcatcagagtgcaccccgacgtgagagccctgggcaccgagccccacttcttcgacagaaactacggcagaggcctggactggtacagaagcctgatgcccagaaccctggagagccagatcaccctggagaagacccccagctacttcgtgacccaggaggcccccagaagaatcttcaacatgagcagagacaccaagctgatcgtggtggtgagaaaccccgtgaccagagccatcagcgactacacccagaccctgagcaagaagcccgacatccccaccttcgagggcctgagcttcagaaacagaaccctgggcctggtggacgtgagctggaacgccatcagaatcggcatgtacgtgctgcacctggagagctggctgcagtacttccccctggcccagatccacttcgtgagcggcgagagactgatcaccgaccccgccggcgagatgggcagagtgcaggacttcctgggcatcaagagattcatcaccgacaagcacttctacttcaacaagaccaagggcttcccctgcctgaagaacagaatcgagccccccgccagcatgctgggccagatcaagagagagaacagctgcaccgactag

SEQ ID NO: 161336 - protein, 142 aa, Artificial Sequence
  derived and/or modified sequence
MTSTGQDSTTTRQRRSRQNPQSPPQDSSVTSKRNIKKGAVPRSIPNLAEVKKKGKMKKLGQAMEEDLIVGLQGMDLNLEAEALAGTGLVLDEQLNEFHCLWDDSFPEGPERLHAIKEQLIQEGLLDRCVSFQARFAEKEELM

SEQ ID NO: 161337 - protein, 51 aa, Artificial Sequence
  derived and/or modified sequence
MTSTGQDSTTTRQRRSRQNPQSPPQDSSVTSKRNIKKGAVPRSIPNLAEVK

SEQ ID NO: 161338 - protein, 167 aa, Artificial Sequence
  derived and/or modified sequence
MTSTGQDSTTTRQRRSRQNPQSPPQDSSVTSKRNIKKGAVPRSIPNLAEVKKKGKMKKLGQAMEEDLIVGLQGMDLNLEAEALAGTGLVLDEQLNEFHCLWDDSFPEGPERLHAIKEQLIQEGLLDRCVSFQARFAEKEELMLVHSLEYIDLMETTQYMNEGELRVL

SEQ ID NO: 161339 - DNA, 3648 bp, Artificial Sequence
  derived and/or modified sequence
atgaccagcaccggccaggacagcaccaccaccagacagagaagaagcagacagaacccccagagccccccccaggacagcagcgtgaccagcaagagaaacatcaagaagggcgccgtgcccagaagcatccccaacctggccgaggtgaagaagaagggcaagatgaagaagctgggccaggccatggaggaggacctgatcgtgggcctgcagggcatggacctgaacctggaggccgaggccctggccggcaccggcctggtgctggacgagcagctgaacgagttccactgcctgtgggacgacagcttccccgagggccccgagagactgcacgccatcaaggagcagctgatccaggagggcctgctggacagatgcgtgagcttccaggccagattcgccgagaaggaggagctgatgctggtgcacagcctggagtacatcgacctgatggagaccacccagtacatgaacgagggcgagctgagagtgctggccgacacctacgacagcgtgtacctgcaccccaacagctacagctgcgcctgcctggccagcggcagcgtgctgagactggtggacgccgtgctgggcgccgagatcagaaacggcatggccatcatcagaccccccggccaccacgcccagcacagcctgatggacggctactgcatgttcaaccacgtggccgtggccgccagatacgcccagcagaagcacagaatcagaagagtgctgatcgtggactgggacgtgcaccacggccagggcacccagttcaccttcgaccaggaccccagcgtgctgtacttcagcatccacagatacgagcagggcagattctggccccacctgaaggccagcaactggagcaccaccggcttcggccagggccagggctacaccatcaacgtgccctggaaccaggtgggcatgagagacgccgactacatcgccgccttcctgcacgtgctgctgcccgtggccctggagttccagccccagctggtgctggtggccgccggcttcgacgccctgcagggcgaccccaagggcgagatggccgccacccccgccggcttcgcccagctgacccacctgctgatgggcctggccggcggcaagctgatcctgagcctggagggcggctacaacctgagagccctggccgagggcgtgagcgccagcctgcacaccctgctgggcgacccctgccccatgctggagagccccggcgccccctgcagaagcgcccaggccagcgtgagctgcgccctggaggccctggagcccttctgggaggtgctggtgagaagcaccgagaccgtggagagagacaacatggaggaggacaacgtggaggagagcgaggaggagggcccctgggagccccccgtgctgcccatcctgacctggcccgtgctgcagagcagaaccggcctggtgtacgaccagaacatgatgaaccactgcaacctgtgggacagccaccaccccgaggtgccccagagaatcctgagaatcatgtgcagactggaggagctgggcctggccggcagatgcctgaccctgacccccagacccgccaccgaggccgagctgctgacctgccacagcgccgagtacgtgggccacctgagagccaccgagaagatgaagaccagagagctgcacagagagagcagcaacttcgacagcatctacatctgccccagcaccttcgcctgcgcccagctggccaccggcgccgcctgcagactggtggaggccgtgctgagcggcgaggtgctgaacggcgccgccgtggtgagaccccccggccaccacgccgagcaggacgccgcctgcggcttctgcttcttcaacagcgtggccgtggccgccagacacgcccagaccatcagcggccacgccctgagaatcctgatcgtggactgggacgtgcaccacggcaacggcacccagcacatgttcgaggacgaccccagcgtgctgtacgtgagcctgcacagatacgaccacggcaccttcttccccatgggcgacgagggcgccagcagccagatcggcagagccgccggcaccggcttcaccgtgaacgtggcctggaacggccccagaatgggcgacgccgactacctggccgcctggcacagactggtgctgcccatcgcctacgagttcaaccccgagctggtgctggtgagcgccggcttcgacgccgccagaggcgaccccctgggcggctgccaggtgagccccgagggctacgcccacctgacccacctgctgatgggcctggccagcggcagaatcatcctgatcctggagggcggctacaacctgaccagcatcagcgagagcatggccgcctgcaccagaagcctgctgggcgaccccccccccctgctgaccctgcccagaccccccctgagcggcgccctggccagcatcaccgagaccatccaggtgcacagaagatactggagaagcctgagagtgatgaaggtggaggacagagagggccccagcagcagcaagctggtgaccaagaaggccccccagcccgccaagcccagactggccgagagaatgaccaccagagagaagaaggtgctggaggccggcatgggcaaggtgaccagcgccagcttcggcgaggagagcacccccggccagaccaacagcgagaccgccgtggtggccctgacccaggaccagcccagcgaggccgccaccggcggcgccaccctggcccagaccatcagcgaggccgccatcggcggcgccatgctgggccagaccaccagcgaggaggccgtgggcggcgccacccccgaccagaccaccagcgaggagaccgtgggcggcgccatcctggaccagaccaccagcgaggacgccgtgggcggcgccaccctgggccagaccaccagcgaggaggccgtgggcggcgccaccctggcccagaccaccagcgaggccgccatggagggcgccaccctggaccagaccaccagcgaggaggcccccggcggcaccgagctgatccagacccccctggccagcagcaccgaccaccagaccccccccaccagccccgtgcagggcaccaccccccagatcagccccagcaccctgatcggcagcctgagaaccctggagctgggcagcgagagccagggcgccagcgagagccaggcccccggcgaggagaacctgctgggcgaggccgccggcggccaggacatggccgacagcatgctgatgcagggcagcagaggcctgaccgaccaggccatcttctacgccgtgacccccctgccctggtgcccccacctggtggccgtgtgccccatccccgccgccggcctggacgtgacccagccctgcggcgactgcggcaccatccaggagaactgggtgtgcctgagctgctaccaggtgtactgcggcagatacatcaacggccacatgctgcagcaccacggcaacagcggccaccccctggtgctgagctacatcgacctgagcgcctggtgctactactgccaggcctacgtgcaccaccaggccctgctggacgtgaagaacatcgcccaccagaacaagttcggcgaggacatgccccacccccactag

SEQ ID NO: 161340 - DNA, 633 bp, Artificial Sequence
  derived and/or modified sequence
atgaccagcaccggccaggacagcaccaccaccagacagagaagaagcagacagaacccccagagccccccccaggacagcagcgtgaccagcaagagaaacatcaagaagggcgccgtgcccagaagcatccccaacctggccgaggtgaagaagaagggcaagatgaagaagctgggccaggccatggaggaggacctgatcgtgggcctgcagggcatggacctgaacctggaggccgaggccctggccggcaccggcctggtgctggacgagcagctgaacgagttccactgcctgtgggacgacagcttccccgagggccccgagagactgcacgccatcaaggagcagctgatccaggagggcctgctggacagatgcgtgagcttccaggccagattcgccgagaaggaggagctgatgctggtgcacagcctggagtacatcgacctgatggagaccacccagtacatgaacgagggcgagctgagagtgctggccgacacctacgacagcgtgtacctgcaccccaacagctacagctgcgcctgcctggccagcggcagcgtgctgagactggtggacgccgtgctgggcgccgagatcagaaacggcatggccatcatctag

SEQ ID NO: 161341 - DNA, 891 bp, Artificial Sequence
  derived and/or modified sequence
atgaagaagctgggccaggccatggaggaggacctgatcgtgggcctgcagggcatggacctgaacctggaggccgaggccctggccggcaccggcctggtgctggacgagcagctgaacgagttccactgcctgtgggacgacagcttccccgagggccccgagagactgcacgccatcaaggagcagctgatccaggagggcctgctggacagatgcgtgagcttccaggccagattcgccgagaaggaggagctgatgctggtgcacagcctggagtacatcgacctgatggagaccacccagtacatgaacgagggcgagctgagagtgctggccgacacctacgacagcgtgtacctgcaccccaacagctacagctgcgcctgcctggccagcggcagcgtgctgagactggtggacgccgtgctgggcgccgagatcagaaacggcatggccatcatcagaccccccggccaccacgcccagcacagcctgatggacggctactgcatgttcaaccacgtggccgtggccgccagatacgcccagcagaagcacagaatcagaagagtgctgatcgtggactgggacgtgcaccacggccagggcacccagttcaccttcgaccaggaccccagcgtgctgtacttcagcatccacagatacgagcagggcagattctggccccacctgaaggccagcaactggagcaccaccggcttcggccagggccagggctacaccatcaacgtgccctggaaccaggtgggcatgagagacgccgactacatcgccgccttcctgcacgtgctgctgcccgtggccctggaggtgctgggcatctggggcgtgctgggcggcggcgtggccctgaaggtgagactgtag

SEQ ID NO: 161342 - DNA, 429 bp, Artificial Sequence
  derived and/or modified sequence
atgaccagcaccggccaggacagcaccaccaccagacagagaagaagcagacagaacccccagagccccccccaggacagcagcgtgaccagcaagagaaacatcaagaagggcgccgtgcccagaagcatccccaacctggccgaggtgaagaagaagggcaagatgaagaagctgggccaggccatggaggaggacctgatcgtgggcctgcagggcatggacctgaacctggaggccgaggccctggccggcaccggcctggtgctggacgagcagctgaacgagttccactgcctgtgggacgacagcttccccgagggccccgagagactgcacgccatcaaggagcagctgatccaggagggcctgctggacagatgcgtgagcttccaggccagattcgccgagaaggaggagctgatgtag

SEQ ID NO: 161343 - DNA, 810 bp, Artificial Sequence
  derived and/or modified sequence
atgaccagcaccggccaggacagcaccaccaccagacagagaagaagcagacagaacccccagagccccccccaggacagcagcgtgaccagcaagagaaacatcaagaagggcgccgtgcccagaagcatccccaacctggccgaggtgaagaagaagggcaagatgaagaagctgggccaggccatggaggaggacctgatcgtgggcctgcagggcatggacctgaacctggaggccgaggccctggccggcaccggcctggtgctggacgagcagctgaacgagttccactgcctgtgggacgacagcttccccgagggccccgagagactgcacgccatcaaggagcagctgatccaggagggcctgctggacagatgcgtgagcttccaggccagattcgccgagaaggaggagctgatgctggtgcacagcctggagtacatcgacctgatggagaccacccagtacatgaacgagggcgagctgagagtgctggccgacacctacgacagcgtgtacctgcaccccaacagctacagctgcgcctgcctggccagcggcagcgtgctgagactggtggacgccgtgctgggcgccgagatcagaaacggcatggccatcatcagaccccccggccaccacgcccagcacagcctgatggacggctactgcatgttcaaccacgtggccgtggccgccagatacgcccagcagaagcacagaatcagaagagtgctgatcgtggactgggacgtgcaccacggccagggcacccagttcaccttcgaccaggaccccagatag

SEQ ID NO: 161344 - DNA, 2454 bp, Artificial Sequence
  derived and/or modified sequence
atgaccagcaccggccaggacagcaccaccaccagacagagaagaagcagacagaacccccagagccccccccaggacagcagcgtgaccagcaagagaaacatcaagaagggcgccgtgcccagaagcatccccaacctggccgaggtgaagaagaagggcaagatgaagaagctgggccaggccatggaggaggacctgatcgtgggcctgcagggcatggacctgaacctggaggccgaggccctggccggcaccggcctggtgctggacgagcagctgaacgagttccactgcctgtgggacgacagcttccccgagggccccgagagactgcacgccatcaaggagcagctgatccaggagggcctgctggacagatgcgtgagcttccaggccagattcgccgagaaggaggagctgatgctggtgcacagcctggagtacatcgacctgatggagaccacccagtacatgaacgagggcgagctgagagtgctggccgacacctacgacagcgtgtacctgcaccccaacagctacagctgcgcctgcctggccagcggcagcgtgctgagactggtggacgccgtgctgggcgccgagatcagaaacggcatggccatcatcagaccccccggccaccacgcccagcacagcctgatggacggctactgcatgttcaaccacgtggccgtggccgccagatacgcccagcagaagcacagaatcagaagagtgctgatcgtggactgggacgtgcaccacggccagggcacccagttcaccttcgaccaggaccccagcgtgctgtacttcagcatccacagatacgagcagggcagattctggccccacctgaaggccagcaactggagcaccaccggcttcggccagggccagggctacaccatcaacgtgccctggaaccaggtgggcatgagagacgccgactacatcgccgccttcctgcacgtgctgctgcccgtggccctggagttccagccccagctggtgctggtggccgccggcttcgacgccctgcagggcgaccccaagggcgagatggccgccacccccgccggcttcgcccagctgacccacctgctgatgggcctggccggcggcaagctgatcctgagcctggagggcggctacaacctgagagccctggccgagggcgtgagcgccagcctgcacaccctgctgggcgacccctgccccatgctggagagccccggcgccccctgcagaagcgcccaggccagcgtgagctgcgccctggaggccctggagcccttctgggaggtgctggtgagaagcaccgagaccgtggagagagacaacatggaggaggacaacgtggaggagagcgaggaggagggcccctgggagccccccgtgctgcccatcctgacctggcccgtgctgcagagcagaaccggcctggtgtacgaccagaacatgatgaaccactgcaacctgtgggacagccaccaccccgaggtgccccagagaatcctgagaatcatgtgcagactggaggagctgggcctggccggcagatgcctgaccctgacccccagacccgccaccgaggccgagctgctgacctgccacagcgccgagtacgtgggccacctgagagccaccgagaagatgaagaccagagagctgcacagagagagcagcaacttcgacagcatctacatctgccccagcaccttcgcctgcgcccagctggccaccggcgccgcctgcagactggtggaggccgtgctgagcggcgaggtgctgaacggcgccgccgtggtgagaccccccggccaccacgccgagcaggacgccgcctgcggcttctgcttcttcaacagcgtggccgtggccgccagacacgcccagaccatcagcggccacgccctgagaatcctgatcgtggactgggacgtgcaccacggcaacggcacccagcacatgttcgaggacgaccccagcgtgctgtacgtgagcctgcacagatacgaccacggcaccttcttccccatgggcgacgagggcgccagcagccagatcggcagagccgccggcaccggcttcaccgtgaacgtggcctggaacggccccagaatgggcgacgccgactacctggccgcctggcacagactggtgctgcccatcgcctacgagttcaaccccgagctggtgctggtgagcgccggcttcgacgccgccagaggcgaccccctgggcggctgccaggtgagccccgagggctacgcccacctgaccctgcccatcgcctgcctgagaggcaccaccacccccgcccagaaggagagaggcgccgcccagtggccccaggagggcgccgacatcatgagaatcaccctggccggcggcgagctgaccggcagacacggcaaggtggcctacgtgatcaagtacaagctgtag

SEQ ID NO: 161345 - DNA, 156 bp, Artificial Sequence
  derived and/or modified sequence
atgaccagcaccggccaggacagcaccaccaccagacagagaagaagcagacagaacccccagagccccccccaggacagcagcgtgaccagcaagagaaacatcaagaagggcgccgtgcccagaagcatccccaacctggccgaggtgaagtag

SEQ ID NO: 161346 - DNA, 516 bp, Artificial Sequence
  derived and/or modified sequence
atgaccagcaccggccaggacagcaccaccaccagacagagaagaagcagacagaacccccagagccccccccaggacagcagcgtgaccagcaagagaaacatcaagaagggcgccgtgcccagaagcatccccaacctggccgaggtgaagaagaagggcaagatgaagaagctgggccaggccatggaggaggacctgatcgtgggcctgcagggcatggacctgaacctggaggccgaggccctggccggcaccggcctggtgctggacgagcagctgaacgagttccactgcctgtgggacgacagcttccccgagggccccgagagactgcacgccatcaaggagcagctgatccaggagggcctgctggacagatgcgtgagcttccaggccagattcgccgagaaggaggagctgatgctggtgcacagcctggagtacatcgacctgatggagaccacccagtacatgaacgagggcgagctgagagtgctggccgacacctactag

SEQ ID NO: 161347 - DNA, 486 bp, Artificial Sequence
  derived and/or modified sequence
atgaccagcaccggccaggacagcaccaccaccagacagagaagaagcagacagaacccccagagccccccccaggacagcagcgtgaccagcaagagaaacatcaagaagggcgccgtgcccagaagcatccccaacctggccgaggtgaagaagaagggcaagatgaagaagctgggccaggccatggaggaggacctgatcgtgggcctgcagggcatggacctgaacctggaggccgaggccctggccggcaccggcctggtgctggacgagcagctgaacgagttccactgcctgtgggacgacagcttccccgagggccccgagagactgcacgccatcaaggagcagctgatccaggagggcctgctggacagatgcgtgagcttccaggccagattcgccgagaaggaggagctgatgctggtgcacagcctggagtacatcgacctgatggagaccacccagtacatgaacgagtag

SEQ ID NO: 161348 - DNA, 504 bp, Artificial Sequence
  derived and/or modified sequence
atgaccagcaccggccaggacagcaccaccaccagacagagaagaagcagacagaacccccagagccccccccaggacagcagcgtgaccagcaagagaaacatcaagaagggcgccgtgcccagaagcatccccaacctggccgaggtgaagaagaagggcaagatgaagaagctgggccaggccatggaggaggacctgatcgtgggcctgcagggcatggacctgaacctggaggccgaggccctggccggcaccggcctggtgctggacgagcagctgaacgagttccactgcctgtgggacgacagcttccccgagggccccgagagactgcacgccatcaaggagcagctgatccaggagggcctgctggacagatgcgtgagcttccaggccagattcgccgagaaggaggagctgatgctggtgcacagcctggagtacatcgacctgatggagaccacccagtacatgaacgagggcgagctgagagtgctgtag

SEQ ID NO: 161349 - DNA, 3648 bp, Artificial Sequence
  derived and/or modified sequence
atgacatccacagggcaagactccaccacaacccgccagcgccgcagtcggcagaacccccagtcaccgcctcaagattcatccgtgacatccaaacgcaatattaaaaagggagcggtgccaaggtcaatcccaaatctggctgaagttaaaaagaagggtaagatgaagaaacttggccaggctatggaggaggacctcatcgtaggtctgcagggcatggatctgaatctggaagcggaagctctcgccgggacaggactcgtacttgacgagcaactgaatgagtttcactgcctgtgggatgattcctttccagaaggcccagaacggctgcacgccatcaaggagcagctcatccaggaaggtctgcttgatcggtgcgtgagtttccaagctaggtttgccgagaaggaggagttgatgctggtgcactctctggaatatatcgatttgatggaaacaacccagtacatgaacgaaggcgaactgagagtactcgccgatacctacgacagtgtgtacttacatcctaatagctactcgtgtgcctgtctggcctcagggtctgtgctgagactcgtggatgccgtactgggagccgagatccgcaatggaatggctattattcgccccccaggacaccatgctcagcactcgttaatggacggctattgtatgttcaatcacgtagcagtcgctgcacgctatgcccagcagaaacaccgtatcagacgtgtgttaattgtggactgggatgttcatcatggccaaggaacacagtttacattcgatcaggatccgtctgtgctgtatttctcaatccatcgctacgaacagggaaggttctggcctcacttgaaagcatctaattggagcactaccgggttcgggcaaggtcaaggatatacgattaacgtgccctggaatcaggtgggtatgcgggatgccgattacatcgctgcttttctgcatgttctgttaccggtggctctggagttccagccgcagctggtgttagtagccgccggttttgatgccctgcaaggagatccaaagggggagatggctgccactccggctggttttgcgcaactgacccacctcctgatgggattggccggcgggaaattgatactctcactggagggagggtacaacctgagggcccttgcagagggcgttagtgcttctctacacacgctcctcggcgatccatgtcccatgttggagtcaccaggcgccccctgcagatccgctcaagccagtgtgtcatgtgcgctcgaagcattagagcctttttgggaggtgcttgtgaggtcaaccgagactgtggaacgggacaacatggaggaggacaacgttgaggaaagtgaggaggagggaccctgggagcctccagtcctccctattcttacttggccagtgttgcaatcaagaacagggttggtgtatgatcagaacatgatgaatcactgcaacctgtgggacagccatcacccggaggtaccccagcgtattttgcgcatcatgtgccggctggaagagctgggcctggcaggtcggtgcttgacactgacaccccggcccgcgacagaagctgagctgctcacctgtcactctgctgagtatgtaggacaccttcgagccacggaaaaaatgaagactcgcgaattgcacagagagtcctctaacttcgatagcatctatatctgccctagtacgttcgcgtgtgcccagctcgcgaccggagcagcctgtcggctcgtggaggcggtcctaagcggtgaggtgttaaacggagccgctgtcgttcgcccccctggtcaccatgctgagcaggacgcagcctgtggcttttgcttttttaactccgtggccgtagcagcacgccacgcccaaacaatatcagggcacgctctgagaattctcattgtagattgggatgtccatcatggcaatgggacccagcatatgtttgaagacgacccatccgtcctttacgtctcactgcaccggtacgaccacggtaccttcttccccatgggtgacgaaggggcttcgagtcagatagggagggcggccggcactggcttcaccgtgaacgtcgcctggaatggtccgcggatgggagacgccgattatctagcagcctggcaccgcctcgtactgccgattgcctacgaatttaatcctgagttggtcctggttagcgccggcttcgatgctgccaggggcgacccattaggcggctgtcaggtgtcccccgaggggtacgcccacctgacacacctccttatgggactggcctccggacggatcatccttatcctcgagggcggttataacctcacaagtatctccgagtctatggcggcctgcacccgtagtctgctgggagacccaccgccattgctcacactgcctaggcctcccctaagcggggcactggcctctattacggagacgattcaggtccaccggcgatattggagaagtcttagggtgatgaaggtagaggaccgggagggcccctctagcagcaagcttgttacaaagaaggcaccccagccagccaagcctcgcctggcggaacgcatgaccactcgagagaagaaggttttagaggccggtatgggcaaggtcacttccgcaagctttggggaggagtcaacccctgggcagactaattctgaaaccgccgtcgtggctctcacacaagatcaaccttccgaggccgctactggcggcgcgactttggcccagacgatcagcgaagctgccattggtggcgcgatgctggggcagaccacaagtgaagaggccgttggaggcgccacgccagatcagacgacctctgaggaaaccgtgggcggagcgattctggaccagactacatcagaggatgctgtcgggggtgcgacacttggacagaccacttccgaagaggctgtaggtggagcaacattggcccaaactacttcggaggcggccatggagggtgcaactctggaccagacgacctcggaggaggccccaggaggcaccgagttgattcagacaccactggcctcttccactgaccaccagactccgccaacaagccccgtacaaggcaccacaccccagatctccccatcgacgctgattgggagcctgcggacgttagagctgggttcagaatcacaaggtgcctctgagagtcaggcacccggagaggagaacctcctcggggaggccgccggtggacaggatatggccgactcaatgctgatgcagggaagcagaggcctcacggaccaggccatcttctatgctgtaacccccctgccctggtgtccgcatttggtggccgtttgccccataccagccgctgggctggacgttacccagccatgtggagactgtggcaccatccaagaaaattgggtgtgtttgtcatgctaccaggtgtattgtggtagatacatcaacgggcatatgctccaacatcatggcaactcaggccatcccttagtcttgagctatattgacctgagtgcatggtgctactattgccaggcttatgtacaccatcaggccctgctcgacgtgaagaatatagcccaccaaaataaattcggcgaagacatgccgcacccacactag

SEQ ID NO: 161350 - DNA, 633 bp, Artificial Sequence
  derived and/or modified sequence
atgacatcgaccggccaggattcaacaaccacaaggcagcggcggtctaggcagaatccccaaagccccccccaggactcaagcgttacatccaagcgcaacattaagaagggagcggtgcccaggagcattcctaatctggctgaagtaaaaaaaaaggggaaaatgaagaagttaggccaggccatggaagaggatcttatcgtggggctgcagggaatggatctgaacctggaggccgaggcattggctggcactggattggttttagatgaacagctgaatgaatttcattgtctttgggacgattcctttccggagggccctgaacgcctgcacgcaattaaggagcagctgatccaagaggggttgctggaccggtgcgttagttttcaggcccgtttcgccgagaaagaggaattaatgttggtacactccttagagtatatcgatctgatggagaccacgcagtacatgaatgagggcgaactgcgagtgctggcagacacatatgattcagtctatctgcaccccaactcctatagctgtgcctgtctcgcatcaggaagtgtgttacggctggtggatgccgtcctgggcgctgagattaggaatggcatggcaataatctag

SEQ ID NO: 161351 - DNA, 3648 bp, Artificial Sequence
  derived and/or modified sequence
atgacctccactggacaggatagcacaaccactaggcagagacgctcacggcagaatcctcagagcccacctcaggactctagcgttacatccaaacgtaatatcaagaagggtgcagtgccgagaagcatccccaacctagctgaagtgaaaaaaaaggggaagatgaaaaagctgggccaagcaatggaagaagacttgattgtgggactccaggggatggatctgaaccttgaagctgaggcactggctgggaccggtctcgtactcgatgagcagctgaacgagttccactgcctctgggatgatagctttccggagggccccgagcgtcttcatgccattaaggaacagctgatccaggaaggtcttctggatagatgtgtgtcttttcaagctaggttcgcagagaaggaggagctcatgttggtacacagtttggaatacattgacctaatggaaactactcaatacatgaatgaaggtgaactacgggtcttggcagacacctacgactctgtgtaccttcatcctaactcttattcttgcgcttgcctagcttcgggcagtgtgctgcgactggtcgacgctgtgctaggagctgagatcaggaacggcatggccatcattcgtcccccaggacatcatgcacagcactccctgatggatggctactgcatgttcaaccacgtggctgtggctgcccgctacgcccagcagaagcaccgtatcagaagagtccttatcgtggactgggacgttcaccacggtcagggaactcaatttacgtttgaccaggacccgtccgtactgtatttctcaatacatcggtacgaacagggtcgcttttggccacatttgaaagcaagcaattggagcacaaccggatttgggcaaggccaagggtatacgattaatgtcccctggaaccaggttggcatgcgcgacgctgactatatcgcagcgttcttacatgtactgctgcctgtagctcttgagtttcagccgcagctggtgctagttgccgctggatttgacgcattacagggcgaccctaaaggcgaaatggccgcaacccctgccgggtttgcccaacttacacatctcctgatgggcttggcagggggaaagcttattctgagcttagagggaggctacaacctgcgcgccctggccgagggagtgagcgcaagtctccatacactgctcggggatccatgcccaatgctggagtcacctggagcaccctgcaggtccgcacaggcctctgtgtcttgcgcactggaggcactggagcccttctgggaggtactggtccggagcactgagactgtcgagcgcgacaatatggaagaagataacgtggaggagagcgaagaggaagggccatgggagccgcccgtgctacctatcctgacatggcctgtcttgcaaagccggacagggttggtttatgaccagaacatgatgaatcattgtaacctctgggactctcatcatcccgaagtgcctcaacggatacttagaattatgtgcaggcttgaggaactgggcctcgccgggcgttgtctgacactgactccccgtccagcgacagaggcagagcttttaacctgtcactccgccgaatatgtgggacacctgagggccaccgagaagatgaaaacaagagaattgcatcgtgaatcttccaacttcgacagtatctatatctgcccctccactttcgcctgcgcccagctggccacgggggccgcgtgccggctggtggaggcggtgctgagtggcgaggttctcaacggagcggctgtggtgcgtccacctggacatcacgccgagcaggatgccgcctgtggtttctgttttttcaattcagttgcagtggccgcccgtcatgcccagaccatctccggacacgctctgcgcatactgatcgtagattgggatgtacatcacgggaacggcacccagcatatgttcgaggatgaccccagcgttttgtacgtgagtctgcacaggtatgatcacggaacgttctttcccatgggagatgaaggagcaagtagtcaaattgggagggccgcaggcactggttttacggtcaacgtggcttggaatggcccacgcatgggagacgccgattacttggccgcttggcatcgcctcgtccttcctattgcctacgagtttaatccagagctcgtgctggtttctgctgggtttgacgcggcccggggggacccactgggcggctgccaggtctcaccagaaggatatgctcatctaacgcacttactgatggggctggcctcgggaagaattatcctaatcctagagggcggttataaccttacgagtataagtgagtccatggcagcatgcacgcggtccctattaggtgaccctccacctttattaacacttccccggcctcctttgtccggagcccttgcttctatcacagagactatccaagtgcacaggagatactggcgcagcctgagggtaatgaaggtcgaagatcgcgaaggcccctcaagctccaaacttgtgactaaaaaagctccccaacctgccaagcctaggttagcggagagaatgactactagagaaaaaaaagtcctcgaggcagggatgggaaaggtgacatctgccagctttggtgaagagtcgaccccggggcagaccaacagcgaaaccgcggtcgtcgctctgacccaggatcagcctagcgaagcagccacagggggcgccactttggcacaaaccattagcgaggcagccattgggggagctatgctcgggcagaccacctctgaagaggctgttggtggtgcaacacccgatcaaacaacctcagaggaaacagtggggggagccattctggatcaaaccacttccgaagatgctgtcggaggcgcaactctgggccagaccacatctgaagaagcggtggggggcgccaccctcgcccaaactacgagcgaggccgctatggaaggagcaaccctcgatcagactacgtccgaagaagcacccggcggcacagagttgatacagacccctttggcctctagcacagaccatcagacccccccgacatctccagtgcaagggacaactccccagatcagcccatctacacttataggtagtttgagaaccttagaactgggctccgaatctcagggcgccagtgaaagccaggcgcccggagaggagaatctgttgggtgaggctgctggtggtcaggacatggcggacagcatgcttatgcaagggtctcgtggcctgaccgaccaggccattttctatgcagtcacccctctgccttggtgcccccacctcgtcgcggtatgtccaatccccgcggccggcctcgatgtcactcagccctgcggagattgcgggactattcaagagaactgggtgtgcctcagctgctatcaggtatattgtgggcgctatatcaacgggcacatgttgcagcaccacgggaactctggccacccgctagttctgtcctacattgatctctctgcgtggtgttactattgccaggcctatgtgcatcaccaggcactcctcgatgtgaagaatattgcccatcagaataaattcggtgaggatatgccacatccacactag

SEQ ID NO: 161352 - DNA, 633 bp, Artificial Sequence
  derived and/or modified sequence
atgacttccactgggcaagacagcacaaccacaaggcaacggagatctaggcagaatccccagagccctccacaggatagctccgttacgagcaaaaggaatattaagaaaggtgctgtgcctcgatctatacccaatctggccgaggttaaaaagaagggcaaaatgaagaaactgggacaagccatggaagaggatctgatagtgggactgcaagggatggatctgaatctggaagccgaggcccttgctggcacaggacttgtcctagatgaacagctaaatgagttccactgcctctgggatgactcgttccctgagggccctgagaggctgcatgctataaaggagcagttgattcaagagggactcctcgataggtgtgtgtcttttcaggcccgcttcgccgagaaggaggaacttatgctggtccattccttggagtatattgatctaatggagaccactcaatacatgaacgaaggggaactgcgggtactcgccgacacctatgactcagtatatctgcatcctaacagttacagttgtgcctgcctagccagcggaagtgtactgcgcctcgtggatgcagtcctgggagctgaaatccgaaatgggatggcaattatatag

SEQ ID NO: 161353 - DNA, 891 bp, Artificial Sequence
  derived and/or modified sequence
atgaagaaactggggcaggccatggaagaggatttgattgtcggtctccagggcatggacctcaacctcgaggccgaagccttggccgggaccggtttggtgttggacgaacagttgaatgagtttcactgtttgtgggacgatagttttcccgagggcccggagcgcctgcacgccatcaaggaacagctcatccaagaaggcctgctcgatcggtgtgttagctttcaggccaggttcgcagagaaggaggagctgatgcttgtacatagcctcgagtatatcgacctcatggagacgactcagtacatgaatgaaggggagctcagggtgctggctgacacatacgacagcgtttatctgcaccccaattcatactcgtgcgcttgcctcgcaagtggctcggttctccgtctggttgatgctgtgttgggggctgagatacggaatggaatggctattattcgccctccgggacaccatgcccagcactcgctgatggatggctattgtatgttcaatcatgtcgccgttgccgccaggtacgcacagcagaagcatagaattcgccgcgtgttgatcgtggactgggacgttcaccatggccaggggactcagtttacgtttgaccaagacccttctgtgttgtacttcagtatacataggtacgagcaaggccggttctggcctcacctcaaggcctcaaattggtcaacaaccgggtttgggcagggacagggatacaccatcaacgttccctggaatcaagtggggatgcgagatgccgactacattgctgcctttctccacgtcctgttacccgtggcactggaggtgctgggaatctggggtgtgctgggtggcggcgtcgctctgaaagtgcgactgtag

SEQ ID NO: 161354 - DNA, 429 bp, Artificial Sequence
  derived and/or modified sequence
atgacaagcactggacaggactccaccactactcgtcagaggaggtcaagacaaaatccacaatcccctcctcaggactcatcagtgacttcaaagcggaacatcaagaagggtgccgttccacggtcaatccccaatcttgctgaagtgaagaagaagggcaaaatgaagaaattgggccaggctatggaagaggatctcatcgttgggttacaaggcatggacctgaacttagaggccgaggccctggcgggcactggactggtgctggacgagcagcttaacgagttccactgcttgtgggacgatagcttccctgaggggcccgagcgactgcacgcaattaaggagcaattaattcaagagggcctgctggatcgttgcgtgagcttccaggcacgcttcgcagagaaggaggagctcatgtag

SEQ ID NO: 161355 - DNA, 810 bp, Artificial Sequence
  derived and/or modified sequence
atgacatctactgggcaggacagcaccacaacccgacaacggcggagtaggcagaatcctcagagcccaccccaggacagctccgtaactagtaaacggaacataaaaaaaggggctgtaccacgctccatccccaaccttgctgaggtgaaaaaaaaaggcaagatgaagaagttgggtcaggcgatggaggaagacctcatcgttggccttcaaggaatggatctgaatctcgaagctgaagctttagccggtactgggcttgtactcgacgaacaactcaatgaatttcactgcctgtgggacgactcctttcctgaggggccagagcgattacatgcaattaaagaacagcttatacaggaaggccttctggaccgatgtgtcagctttcaggccagattcgctgaaaaagaggagctaatgcttgtgcattctttagagtatatagatctgatggaaacaacccaatacatgaacgaaggtgagctcagagtgctggctgatacatatgatagtgtgtacctccatccaaattcttattcctgtgcgtgtctggcctccggcagcgtgctccgactcgttgatgcagttttgggggccgagatcagaaatggcatggccattatcagacctcccggacatcatgctcaacacagcttgatggacggctattgtatgttcaatcatgtggccgtagccgctcgatacgcccagcaaaaacacagaattaggcgtgtgctcatcgtggattgggacgtgcatcacggccaaggaacccagtttacgtttgaccaggatcctcggtag

SEQ ID NO: 161356 - DNA, 2454 bp, Artificial Sequence
  derived and/or modified sequence
atgacgtctacaggacaggactccaccacgacacggcagcgccgatctcgccagaatccccagagccctccacaggatagctcagttacgtctaagcggaatattaaaaagggggccgtcccaaggagcatccccaatctggctgaggttaaaaagaaggggaagatgaagaagctcggccaggccatggaggaagacctgatcgtagggctgcaaggaatggatctgaacctcgaggcagaggcccttgccgggactggactcgtgctggatgagcagttgaacgaattccactgtctgtgggatgattcgttccctgaaggtcctgagcgcctgcacgctatcaaggagcaactgatccaagagggtctccttgaccgctgtgtcagcttccaggcacggttcgcagagaaggaagagttgatgctcgtgcactccttggagtatattgacctgatggaaacaacccaatacatgaatgagggtgaactaagggtcctagctgatacatatgattctgtttacctccaccccaattcctatagctgcgcctgcctggccagtggctctgtgctgcgcctggtcgatgccgtgctcggtgccgaaatccgaaatggcatggcaatcatccgacctcccgggcatcacgctcagcactcattaatggatggatattgcatgtttaaccatgttgcagtagccgctcgctatgcccagcagaagcatcgaatcagacgcgtgcttatagtggattgggatgtgcaccacgggcaggggacgcagttcaccttcgaccaggacccaagcgtgttgtacttcagtattcataggtacgagcaaggacgcttctggccccacctgaaggcatccaattggtccacaactggattcggccaagggcagggctacactatcaatgttccttggaaccaggtggggatgagagatgctgattacatcgccgcctttcttcacgtgttactccccgtcgcactagagtttcagcctcagttagtcttggtcgccgctggtttcgatgcccttcagggcgatccaaaaggggagatggctgccacccccgccggcttcgcccagctcacccacctgttaatgggtttggccggaggcaaactcatcctgagcctggaggggggatacaacttgagggctctcgctgaaggggtgtctgcttctctccatacccttttaggcgatccttgccccatgctggaatcccccggagccccatgtcggtccgcgcaagctagcgtaagttgcgcactcgaagcattggaacctttctgggaggtgcttgtgcgtagcactgagaccgtggaaagggacaatatggaagaggataacgtggaggaaagcgaggaggaagggccctgggaacccccggtgctacctatcctcacatggccagtcttgcagagtcgtacaggcctcgtatatgaccagaatatgatgaaccactgcaacctctgggacagtcaccatccggaggttccacaaaggatccttcggatcatgtgtaggctggaggagttgggtcttgctggcaggtgtctgacgctgacgcctcggccagctaccgaagccgaactacttacttgtcattccgctgaatacgtaggccacctccgggcaacggagaaaatgaaaacccgcgaactccaccgagagtccagtaatttcgatagtatttatatctgtcccagcaccttcgcctgcgcccagctcgctactggcgcagcctgtcgactcgttgaggcagtgctcagcggcgaggtgctcaacggtgccgccgtagtgagaccgccgggtcaccatgcagaacaggacgcagcctgtggtttctgctttttcaattccgttgctgtagccgccagacacgcccagaccattagtggtcacgcccttcgtatcctaatagttgactgggacgtgcatcacgggaatggaacacagcatatgtttgaggatgatcctagtgtcctgtacgtgagtttacatcgttacgaccacggcacattctttccgatgggagacgagggcgcatcctcgcagatcggtagggctgccggaaccggatttacagtgaacgttgcatggaatggtcctaggatgggggatgccgattacctggccgcctggcatcgcctggtgctgcctatagcgtatgaattcaacccagaattggtgctggtgtcagcaggtttcgacgccgcacgtggcgatccattagggggttgccaggtgagccccgagggttacgcacatctgactttgccaattgcctgtctgcgcgggaccactactcctgcccagaaagagaggggagccgcccagtggccacaggagggagccgatatcatgagaatcacccttgctggcggtgaacttacaggaagacacgggaaagtggcatatgtcatcaagtataagctctag

SEQ ID NO: 161357 - DNA, 156 bp, Artificial Sequence
  derived and/or modified sequence
atgaccagtacaggacaggactcaactaccacacggcaacgacgatcaaggcagaacccacaaagccctccccaggatagctctgtgacctccaagaggaacatcaaaaaaggagcagtcccaagaagtatacctaacctggctgaagtcaagtag

SEQ ID NO: 161358 - DNA, 516 bp, Artificial Sequence
  derived and/or modified sequence
atgacctctaccggacaggacagcacaacaacccgtcagcgtagatcgaggcaaaatccccagtccccacctcaggattcctccgtcacaagtaagagaaatatcaagaaaggcgcagtgcccaggagtatccctaatttggcggaggtgaaaaaaaagggtaagatgaaaaaattgggccaagccatggaggaggacctaatcgtagggctgcagggtatggacctgaacctcgaggccgaggcactggccggaactggcctggtgctggacgaacaactgaatgagtttcattgtctctgggatgattcctttccggaaggaccagagcggctacacgcaattaaagaacagctcattcaggaaggactgctagacaggtgcgtgtcttttcaggcccgttttgcggaaaaggaagaactcatgctggtgcacagcctggaatacatcgacctcatggagacaacgcagtacatgaatgagggagaactgagagtcttggccgacacttactag

SEQ ID NO: 161359 - DNA, 486 bp, Artificial Sequence
  derived and/or modified sequence
atgacgtcaaccggccaggactcaaccaccacacgccagaggcgctctaggcagaatccgcagtctccaccccaagatagctcagtgacatccaagagaaacatcaagaagggcgctgtcccacgtagtattcctaacctggccgaagtgaagaaaaaagggaaaatgaaaaagctgggacaggcaatggaggaggatctcatcgttggcctccaaggaatggacctaaatcttgaagctgaggcattagcaggtactggccttgtcctggatgagcagttaaacgaattccactgcctgtgggacgatagcttcccagaagggcctgagagactccatgcaatcaaagaacagcttatacaggagggactgctcgaccgctgtgtctctttccaagcacgtttcgctgaaaaagaggaacttatgctggtgcactccctcgagtacatagatttaatggaaacaacacaatatatgaatgaatag

SEQ ID NO: 161360 - DNA, 504 bp, Artificial Sequence
  derived and/or modified sequence
atgacctccactgggcaagactctacaacgacccgccagcggcgctctcgacagaatcctcagtcacccccacaggacagtagcgtgacaagtaaaaggaacattaaaaagggtgcagtgccacggtccattcccaatctggctgaagttaagaagaaaggcaaaatgaaaaagcttggtcaagctatggaagaagatcttatcgtgggcttgcagggaatggatctcaatttagaagctgaggccctggccggtaccgggcttgtcctcgacgagcagctcaacgaatttcactgcctttgggatgatagcttcccagaagggccagagcgcctgcacgccatcaaggagcaactcattcaggaaggcctgctggataggtgcgtgtcatttcaggcgcgctttgctgaaaaggaagaactgatgctcgtgcactcactggagtatatagacctaatggagaccacacaatatatgaatgagggagagctgagggtcttgtag

SEQ ID NO: 161361 - DNA, 1130 bp, Artificial Sequence
  derived and/or modified sequence
ggggtggagttaagtgaatcgttaagggtggagtcgaaaccggggtcggggccggggccggctgagtgaaagggtgggtgattatcccgggagataggccgaaagggcagaagcgaaatattaaaaagggagccgttccccgctctatccccaatctagcggaggtaaagaagaaaggcaaaatgaagaagctcggccaagcaatggaagaagacctaatcgtgggactgcaagggatggatctgaaccttgaggctgaagcactggctggcactggcttggtgttggatgagcagttaaatgaattccattgcctctgggatgacagcttcccggaaggccctgagcggctccatgccatcaaggagcaactgatccaggagggcctcctagatcgctgcgtgtcctttcaggcccggtttgctgaaaaggaagagctgatgttggttcacagcctagaatatattgatctgatggaaacaacccagtacatgaatgagggagaactccgtgtcctagcagacacctacgactcagtttatctgcatccgaactcatactcctgtgcctgcctggcctcaggctctgtcctcaggctggtggatgcggtcctgggggctgagatccggaatggcatggccatcattaggcctcctggacatcacgcccagcacagtcttatggatggctattgcatgttcaaccacgtggctgtggcagcccgctatgctcaacagaaacaccgcatccggagggtccttatcgtagattgggatgtgcaccacggtcaaggaacacagttcaccttcgaccaggaccccagtgtcctctatttctccatccaccgctacgagcagggtaggttctggccccacctgaaggcctctaactggtccaccacaggtttcggccaaggccaaggatataccatcaatgtgccttggaaccaggtggggatgcgggatgctgactacattgctgctttcctgcacgtcctgctgccagtcgccctcgaggtcctggggatctggggtgtgttgggaggaggagtggccttgaaggttaggctgtgagggtaggtagcctcatggagtctgttcccccttcagttccagcctcagctggtcctg

SEQ ID NO: 161362 - DNA, 882 bp, Artificial Sequence
  derived and/or modified sequence
ggagtcgaaaccggggtcggggccggggccggctgagtgaaaggaaccgcggcaggggccaagcctcctcaactatgacctcaaccggccaggattccaccacaaccaggcagcgaagaagtaggcagaacccccagtcgccccctcaggactccagtgtcacttcgaagcgaaatattaaaaagggagccgttccccgctctatccccaatctagcggaggtaaagaagaaaggcaaaatgaagaagctcggccaagcaatggaagaagacctaatcgtgggactgcaagggatggatctgaaccttgaggctgaagcactggctggcactggcttggtgttggatgagcagttaaatgaattccattgcctctgggatgacagcttcccggaaggccctgagcggctccatgccatcaaggagcaactgatccaggagggcctcctagatcgctgcgtgtcctttcaggcccggtttgctgaaaaggaagagctgatgttggttcacagcctagaatatattgatctgatggaaacaacccagtacatgaatgagggagaactccgtgtcctagcagacacctacgactcagtttatctgcatccgaactcatactcctgtgcctgcctggcctcaggctctgtcctcaggctggtggatgcggtcctgggggctgagatccggaatggcatggccatcattaggcctcctggacatcacgcccagcacagtcttatggatggctattgcatgttcaaccacgtggctgtggcagcccgctatgctcaacagaaacaccgcatccggagggtccttatcgtagattgggatgtgcaccacggtcaaggaacacagttcaccttcgaccaggaccccaggt

SEQ ID NO: 161363 - DNA, 3648 bp, Artificial Sequence
  derived and/or modified sequence
atgaccagcacaggccaggacagcaccaccacccggcagaggaggagccggcagaacccccagagccccccccaggacagctctgtgaccagcaagaggaacatcaagaagggagctgtgcccaggagcatccccaacctggccgaggtgaagaagaagggcaagatgaagaagctgggccaggccatggaggaggacctgattgtgggcctgcagggcatggacctgaacctggaggccgaggccctggccggcaccggcctggtgctggatgagcagctgaatgagttccactgcctgtgggatgacagcttccctgagggccctgagcggctgcacgccatcaaggagcagctgatccaggagggcctgctggacagatgtgtgtccttccaggccaggtttgctgagaaggaggagctgatgctggtgcacagcctggagtacatcgacctgatggagaccacccagtacatgaatgaaggagagctgcgggtgctggccgacacctatgattctgtgtacctgcaccccaacagctacagctgtgcctgcctggccagcggctctgtgctgcggctggtggatgctgtgctgggcgctgagatcagaaatggcatggccatcatccggcccccaggccaccacgcccagcacagcctgatggatggctactgcatgttcaaccacgtggccgtggccgcccgctatgcccagcagaagcaccgcatcagaagagtgctgattgtggactgggatgtgcaccacggccagggcacccagttcacctttgaccaggaccccagcgtgctgtacttcagcatccacagatatgagcagggccgcttctggccccacctgaaggccagcaactggagcaccactggatttggccagggccagggctacaccatcaacgtgccctggaaccaggtgggcatgagagatgctgactacatcgccgccttcctgcacgtgctgctgcctgtggccctggagttccagccccagctggtgctggtggccgccggctttgatgccctgcagggcgaccccaagggggagatggccgccaccccagctggctttgcccagctgacccacctgctgatgggcctggccggcggcaagctgatcctgagcctggagggcggctacaacctgcgggccctggccgagggcgtgtctgccagcctgcacaccctgctgggggacccctgccccatgctggagagccctggggccccctgccgcagcgcccaggcctctgtgtcctgtgccctggaggccctggagcccttctgggaggtgctggtgcgcagcacagagaccgtggagcgggacaacatggaggaggacaacgtggaggagagcgaggaggagggcccctgggagccccctgtgctgcccatcctgacctggcctgtgctgcagagcaggacaggcctggtgtatgaccagaacatgatgaaccactgcaacctgtgggacagccaccaccctgaggtgccccagaggatcctgcgcatcatgtgccgcctggaggagctgggcctggccggccgctgcctgaccctgacccccaggcctgccacagaggccgagctgctgacctgccacagcgcagaatatgtgggccacctgcgggccacagagaagatgaagacccgggagctgcaccgggagagcagcaactttgacagcatctacatctgccccagcacctttgcctgtgcccagctggccactggagctgcctgccgcctggtggaggccgtgctgtctggagaggtgctgaatggagctgctgtggtgcggcccccaggccaccacgccgagcaggatgctgcctgtggcttctgcttcttcaacagcgtggccgtggccgcccggcatgcccagaccatcagcggccacgccctgcgcatcctgattgtggactgggatgtgcaccacggcaatggcacccagcacatgtttgaagatgaccccagcgtgctgtatgtgtccctgcacagatatgaccacggcaccttcttccccatgggagatgagggcgccagcagccagatcggccgggctgctggcaccggcttcaccgtgaatgtggcctggaatggccccaggatgggagatgctgactacctggccgcctggcaccggctggtgctgcccatcgcctatgagttcaaccctgagctggtgctggtgtctgctggctttgatgctgcccggggggaccccctgggcggctgccaggtgtccccagagggctacgcccacctgacccacctgctgatgggcctggccagcggccgcatcatcctgatcctggagggcggctacaacctgaccagcatcagcgagagcatggccgcctgcaccaggagcctgctgggggaccccccacccctgctgaccctgcccaggcctcccctgagcggggccctggccagcatcacagagaccatccaggtgcaccggcgctactggaggagcctgcgggtgatgaaggtggaggaccgggagggccccagcagcagcaagctggtgaccaagaaggccccccagcctgccaagccccggctggccgagaggatgaccacccgggagaagaaggtgctggaggccggcatgggcaaggtgaccagcgccagctttggagaggagagcaccccaggccagaccaacagcgagacagctgtggtggccctgacccaggaccagcccagcgaggccgccactggaggagccaccctggcccagaccatcagcgaggccgccatcggcggggccatgctgggccagaccaccagcgaggaggccgtgggcggggccaccccagaccagaccaccagcgaggagaccgtgggcggggccatcctggaccagaccaccagtgaagatgctgtgggcggggccaccctgggccagaccaccagcgaggaggccgtgggcggggccaccctggcccagaccaccagcgaggccgccatggagggcgccaccctggaccagaccaccagcgaggaggcccctgggggcacagagctgatccagacccccctggccagcagcacagaccaccagaccccacccaccagccctgtgcagggcaccaccccccagatcagccccagcaccctcatcggcagcctgcggaccctggagctgggcagcgagagccagggcgccagcgagagccaggcccctggagaggagaacctgctgggggaggccgccggcggccaggacatggctgacagcatgctgatgcagggcagccggggcctgacagaccaggccatcttctatgctgtgacccccctgccctggtgcccccacctggtggccgtgtgccccatcccagctgctggcctggatgtgacccagccctgtggggactgtggcaccatccaggagaactgggtgtgcctgagctgctaccaggtgtactgcggccgctacatcaatggccacatgctgcagcaccacggcaacagcggccaccccctggtgctgagctacatcgacctgagcgcctggtgctactactgccaggcctacgtgcaccaccaggccctgctggatgtgaagaacatcgcccaccagaacaagtttggagaggacatgccccacccccactag

SEQ ID NO: 161364 - DNA, 633 bp, Artificial Sequence
  derived and/or modified sequence
atgaccagcacaggccaggacagcaccaccacccggcagaggaggagccggcagaacccccagagccccccccaggacagctctgtgaccagcaagaggaacatcaagaagggagctgtgcccaggagcatccccaacctggccgaggtgaagaagaagggcaagatgaagaagctgggccaggccatggaggaggacctgattgtgggcctgcagggcatggacctgaacctggaggccgaggccctggccggcaccggcctggtgctggatgagcagctgaatgagttccactgcctgtgggatgacagcttccctgagggccctgagcggctgcacgccatcaaggagcagctgatccaggagggcctgctggacagatgtgtgtccttccaggccaggtttgctgagaaggaggagctgatgctggtgcacagcctggagtacatcgacctgatggagaccacccagtacatgaatgaaggagagctgcgggtgctggccgacacctatgattctgtgtacctgcaccccaacagctacagctgtgcctgcctggccagcggctctgtgctgcggctggtggatgctgtgctgggcgctgagatcagaaatggcatggccatcatctag

SEQ ID NO: 161365 - DNA, 891 bp, Artificial Sequence
  derived and/or modified sequence
atgaagaagctgggccaggccatggaggaggacctgattgtgggcctgcagggcatggacctgaacctggaggccgaggccctggccggcaccggcctggtgctggatgagcagctgaatgagttccactgcctgtgggatgacagcttccctgagggccctgagcggctgcacgccatcaaggagcagctgatccaggagggcctgctggacagatgtgtgtccttccaggccaggtttgctgagaaggaggagctgatgctggtgcacagcctggagtacatcgacctgatggagaccacccagtacatgaatgaaggagagctgcgggtgctggccgacacctatgacagcgtgtacctgcaccccaacagctacagctgtgcctgcctggccagcggctctgtgctgcggctggtggatgctgtgctgggcgctgagatcagaaatggcatggccatcatccggcccccaggccaccacgcccagcacagcctgatggatggctactgcatgttcaaccacgtggccgtggccgcccgctatgcccagcagaagcaccgcatccggcgggtgctgattgtggactgggatgtgcaccacggccagggcacccagttcacctttgaccaggaccccagcgtgctgtacttcagcatccacagatatgagcagggccgcttctggccccacctgaaggccagcaactggagcaccaccggcttcggccagggccagggctacaccatcaacgtgccctggaaccaggtgggcatgagagatgctgactacatcgccgccttcctgcacgtgctgctgcctgtggccctggaggtgctgggcatctggggcgtgctgggcggcggcgtggccctgaaggtgcggctgtag

SEQ ID NO: 161366 - DNA, 429 bp, Artificial Sequence
  derived and/or modified sequence
atgaccagcacaggccaggacagcaccaccacccggcagaggaggagccggcagaacccccagagccccccccaggacagctctgtgaccagcaagaggaacatcaagaagggagctgtgcccaggagcatccccaacctggccgaggtgaagaagaagggcaagatgaagaagctgggccaggccatggaggaggacctgattgtgggcctgcagggcatggacctgaacctggaggccgaggccctggccggcaccggcctggtgctggatgagcagctgaatgagttccactgcctgtgggatgacagcttccctgagggccctgagcggctgcacgccatcaaggagcagctgatccaggagggcctgctggacagatgtgtgtccttccaggccaggtttgctgagaaggaggagctgatgtag

SEQ ID NO: 161367 - DNA, 810 bp, Artificial Sequence
  derived and/or modified sequence
atgaccagcacaggccaggacagcaccaccacccggcagaggaggagccggcagaacccccagagccccccccaggacagctctgtgaccagcaagaggaacatcaagaagggagctgtgcccaggagcatccccaacctggccgaggtgaagaagaagggcaagatgaagaagctgggccaggccatggaggaggacctgattgtgggcctgcagggcatggacctgaacctggaggccgaggccctggccggcaccggcctggtgctggatgagcagctgaatgagttccactgcctgtgggatgacagcttccctgagggccctgagcggctgcacgccatcaaggagcagctgatccaggagggcctgctggacagatgtgtgtccttccaggccaggtttgctgagaaggaggagctgatgctggtgcacagcctggagtacatcgacctgatggagaccacccagtacatgaatgaaggagagctgcgggtgctggccgacacctatgattctgtgtacctgcaccccaacagctacagctgtgcctgcctggccagcggctctgtgctgcggctggtggatgctgtgctgggcgctgagatcagaaatggcatggccatcatccggcccccaggccaccacgcccagcacagcctgatggatggctactgcatgttcaaccacgtggccgtggccgcccgctatgcccagcagaagcaccgcatcagaagagtgctgattgtggactgggatgtgcaccacggccagggcacccagttcacctttgaccaggaccccaggtag

SEQ ID NO: 161368 - DNA, 2454 bp, Artificial Sequence
  derived and/or modified sequence
atgaccagcacaggccaggacagcaccaccacccggcagaggaggagccggcagaacccccagagccccccccaggacagctctgtgaccagcaagaggaacatcaagaagggagctgtgcccaggagcatccccaacctggccgaggtgaagaagaagggcaagatgaagaagctgggccaggccatggaggaggacctgattgtgggcctgcagggcatggacctgaacctggaggccgaggccctggccggcaccggcctggtgctggatgagcagctgaatgagttccactgcctgtgggatgacagcttccctgagggccctgagcggctgcacgccatcaaggagcagctgatccaggagggcctgctggacagatgtgtgtccttccaggccaggtttgctgagaaggaggagctgatgctggtgcacagcctggagtacatcgacctgatggagaccacccagtacatgaatgaaggagagctgcgggtgctggccgacacctatgattctgtgtacctgcaccccaacagctacagctgtgcctgcctggccagcggctctgtgctgcggctggtggatgctgtgctgggcgctgagatcagaaatggcatggccatcatccggcccccaggccaccacgcccagcacagcctgatggatggctactgcatgttcaaccacgtggccgtggccgcccgctatgcccagcagaagcaccgcatcagaagagtgctgattgtggactgggatgtgcaccacggccagggcacccagttcacctttgaccaggaccccagcgtgctgtacttcagcatccacagatatgagcagggccgcttctggccccacctgaaggccagcaactggagcaccactggatttggccagggccagggctacaccatcaacgtgccctggaaccaggtgggcatgagagatgctgactacatcgccgccttcctgcacgtgctgctgcctgtggccctggagttccagccccagctggtgctggtggccgccggctttgatgccctgcagggcgaccccaagggggagatggccgccaccccagctggctttgcccagctgacccacctgctgatgggcctggccggcggcaagctgatcctgagcctggagggcggctacaacctgcgggccctggccgagggcgtgtctgccagcctgcacaccctgctgggggacccctgccccatgctggagagccctggggccccctgccgcagcgcccaggcctctgtgtcctgtgccctggaggccctggagcccttctgggaggtgctggtgcgcagcacagagaccgtggagcgggacaacatggaggaggacaacgtggaggagagcgaggaggagggcccctgggagccccctgtgctgcccatcctgacctggcctgtgctgcagagcaggacaggcctggtgtatgaccagaacatgatgaaccactgcaacctgtgggacagccaccaccctgaggtgccccagaggatcctgcgcatcatgtgccgcctggaggagctgggcctggccggccgctgcctgaccctgacccccaggcctgccacagaggccgagctgctgacctgccacagcgcagaatatgtgggccacctgcgggccacagagaagatgaagacccgggagctgcaccgggagagcagcaactttgacagcatctacatctgccccagcacctttgcctgtgcccagctggccactggagctgcctgccgcctggtggaggccgtgctgtctggagaggtgctgaatggagctgctgtggtgcggcccccaggccaccacgccgagcaggatgctgcctgtggcttctgcttcttcaacagcgtggccgtggccgcccggcatgcccagaccatcagcggccacgccctgcgcatcctgattgtggactgggatgtgcaccacggcaatggcacccagcacatgtttgaagatgaccccagcgtgctgtatgtgtccctgcacagatatgaccacggcaccttcttccccatgggagatgagggcgccagcagccagatcggccgggctgctggcaccggcttcaccgtgaatgtggcctggaatggccccaggatgggagatgctgactacctggccgcctggcaccggctggtgctgcccatcgcctatgagttcaaccctgagctggtgctggtgtctgctggctttgatgctgcccggggggaccccctgggcggctgccaggtgtccccagagggctacgcccacctgaccctgcccatcgcctgcctgcggggcaccaccaccccagcccagaaggagcggggggccgcccagtggccccaggagggcgctgacatcatgaggatcaccctggccggcggggagctgaccggccgccacggcaaggtggcctacgtgatcaagtacaagctgtag

SEQ ID NO: 161369 - DNA, 156 bp, Artificial Sequence
  derived and/or modified sequence
atgaccagcacaggccaggacagcaccaccacccggcagaggaggagccggcagaacccccagagccccccccaggacagctctgtgaccagcaagaggaacatcaagaagggagctgtgcccaggagcatccccaacctggccgaggtgaagtag

SEQ ID NO: 161370 - DNA, 516 bp, Artificial Sequence
  derived and/or modified sequence
atgaccagcacaggccaggacagcaccaccacccggcagaggaggagccggcagaacccccagagccccccccaggacagctctgtgaccagcaagaggaacatcaagaagggagctgtgcccaggagcatccccaacctggccgaggtgaagaagaagggcaagatgaagaagctgggccaggccatggaggaggacctgattgtgggcctgcagggcatggacctgaacctggaggccgaggccctggccggcaccggcctggtgctggatgagcagctgaatgagttccactgcctgtgggatgacagcttccctgagggccctgagcggctgcacgccatcaaggagcagctgatccaggagggcctgctggacagatgtgtgtccttccaggccaggtttgctgagaaggaggagctgatgctggtgcacagcctggagtacatcgacctgatggagaccacccagtacatgaatgaaggagagctgcgggtgctggccgacacctactag

SEQ ID NO: 161371 - DNA, 486 bp, Artificial Sequence
  derived and/or modified sequence
atgaccagcacaggccaggacagcaccaccacccggcagaggaggagccggcagaacccccagagccccccccaggacagctctgtgaccagcaagaggaacatcaagaagggagctgtgcccaggagcatccccaacctggccgaggtgaagaagaagggcaagatgaagaagctgggccaggccatggaggaggacctgattgtgggcctgcagggcatggacctgaacctggaggccgaggccctggccggcaccggcctggtgctggatgagcagctgaatgagttccactgcctgtgggatgacagcttccctgagggccctgagcggctgcacgccatcaaggagcagctgatccaggagggcctgctggacagatgtgtgtccttccaggccaggtttgctgagaaggaggagctgatgctggtgcacagcctggagtacatcgacctgatggagaccacccagtacatgaatgaatag

SEQ ID NO: 161372 - DNA, 504 bp, Artificial Sequence
  derived and/or modified sequence
atgaccagcacaggccaggacagcaccaccacccggcagaggaggagccggcagaacccccagagccccccccaggacagctctgtgaccagcaagaggaacatcaagaagggagctgtgcccaggagcatccccaacctggccgaggtgaagaagaagggcaagatgaagaagctgggccaggccatggaggaggacctgattgtgggcctgcagggcatggacctgaacctggaggccgaggccctggccggcaccggcctggtgctggatgagcagctgaatgagttccactgcctgtgggatgacagcttccctgagggccctgagcggctgcacgccatcaaggagcagctgatccaggagggcctgctggacagatgtgtgtccttccaggccaggtttgctgagaaggaggagctgatgctggtgcacagcctggagtacatcgacctgatggagaccacccagtacatgaatgaaggagagctgcgggtgctgtag

SEQ ID NO: 161373 - DNA, 3648 bp, Artificial Sequence
  derived and/or modified sequence
atgaccagcaccggccaggacagcaccaccacccggcagcggcggtcaaggcagaatcctcagtcccctccgcaggactcttcagtgaccagtaagaggaatattaagaaaggcgccgtgccccgcagtataccaaatctcgcagaagtaaaaaagaaaggtaaaatgaaaaagttgggtcaggcaatggaggaggacctgatcgtaggtttgcagggaatggatttgaacttagaggctgaggcgcttgctggaaccggtctcgtgttggacgagcagctcaacgaattccactgcctgtgggatgactccttccccgaaggacccgagagactccatgctataaaggaacagctgatccaagagggcttactggatcgctgcgttagcttccaggctcggtttgccgaaaaagaagaactgatgctggtccattcattggagtacattgatctgatggaaaccactcagtatatgaacgaaggggagctccgggtcctcgccgatacctatgattctgtgtatcttcaccccaactcctattcttgtgcttgcttggccagcggatccgtgctgagactggtggacgccgtactgggggctgaaatcagaaacggcatggccattattcgtccccctggccaccatgcccagcactccttaatggatggatattgcatgttcaatcacgtcgcagtcgcagccaggtatgcccagcagaagcatcggatccggcgcgttctaattgtggattgggacgtgcaccatggccaaggaacacagttcactttcgaccaggacccctccgtcctgtatttttccattcacaggtacgagcagggacggttctggccacatctgaaagccagcaattggtccactacagggttcggtcagggacagggctacaccattaatgtgccatggaaccaggtagggatgcgggatgcagattatattgctgcattcctccatgtgctgctgcccgtagccctcgaattccagcctcagttagtcctcgtggccgcgggcttcgacgcattgcagggtgaccccaaaggcgagatggcggctaccccggcaggctttgcacagcttacccatctgctgatgggcttagctggcggcaagcttatcctgtccctggaaggtggctacaaccttagggcgctcgctgagggagtttcagccagcttgcatactctgcttggtgacccgtgccctatgctggaaagcccaggggctccatgcagatctgcgcaggcctcagttagttgtgccctggaagctttggagcccttttgggaggtgttagtcaggagcactgaaacagtggagcgggacaatatggaagaagataatgtggaggagtccgaagaggagggaccatgggaacctccagtgctgccaatattgacctggccggtcctccagtcgagaacaggtttagtttacgaccagaacatgatgaatcactgcaatctgtgggattctcatcaccccgaggttccgcaaagaattctgaggatcatgtgccgcctcgaggagctggggctcgcggggaggtgcctaacgttaacaccccgtccagccacagaagcggagctcctgacctgtcacagcgcggaatatgtgggtcatctccgggccaccgaaaagatgaagactagagagcttcatcgtgaaagcagtaactttgattctatctacatttgtccttccacctttgcctgcgctcagcttgccacgggggccgcctgcagactggtggaagccgtgctgtctggtgaagtgctgaacggggctgcagtcgtgcggccacctggccaccacgcagagcaagatgcagcatgtggtttctgttttttcaacagcgttgcagttgctgccagacacgctcagactatcagtggtcacgcgcttcgtattctgatcgtggattgggacgtgcaccacggtaacggcacccagcatatgttcgaagacgatccctcggtgttgtacgtgtccctgcatcggtatgaccatggtactttttttccaatgggcgatgagggtgcttccagtcaaatcggaagagccgctgggactggctttacggttaatgtggcctggaacggccccaggatgggggacgcagattatctcgcggcatggcatcggctggtcctccccatagcatatgagtttaaccccgagcttgtcctggtgtcggccggttttgacgctgcaaggggtgaccctctcggggggtgccaggtctccccagaaggctacgcccacctgacccatctcctgatgggattagcgagtgggcggattatcttgatcttggagggaggttacaacctgacctcaatttcagaatccatggcagcctgcacacgatctctgctgggagatcctcccccgctgcttacactgccaagaccaccactttccggtgcattagctagcataacggaaacgatccaggtgcatcggaggtattggagaagcctccgagtcatgaaggttgaagaccgggaaggtcctagtagttccaagctggtgacaaagaaggcaccccagcctgccaagcctaggctggccgagcgcatgaccactcgggagaagaaggttctggaagctggtatgggaaaggtgacctcagcaagcttcggcgaagaatcaacccctgggcagacaaatagcgagacagctgtggtagcacttacccaagatcagccatcagaagctgctactggcggtgctacactggctcaaaccatcagcgaagccgccattggcggtgctatgctggggcagacaacaagtgaggaagccgtcggtggtgccacccctgatcagactacatccgaagaaactgtaggaggtgctattctggaccagaccacatcagaggacgcggtgggcggcgccactctcggtcagaccacatccgaagaggctgtgggaggagccaccttggctcaaaccacatcagaagcagctatggagggcgccacactggatcagactactagtgaagaagctccaggcggcaccgagctgatccaaactccactggcctcatccactgaccatcagacgcccccgactagcccagtacagggcaccaccccccagattagcccgtcaacactgatcggttcgctccggacattagagttggggtctgaaagtcagggagcatcggaatcacaggcccccggggaggaaaacctcctgggagaagccgcgggcgggcaggacatggcggactccatgttgatgcagggcagccgtggactgacagatcaggccatattctacgctgtgacccctctgccctggtgcccccacctggtggcagtgtgccctattcctgctgcaggtctcgacgtaacacagccgtgcggagactgtggcacgattcaagagaattgggtgtgcctgagctgttatcaggtctactgtgggcggtacattaatggtcatatgttgcaacatcatggcaacagcggtcacccccttgtgctcagttatatagacctgtctgcatggtgttactactgtcaagcttatgtccatcatcaagccctcttggatgtcaagaatattgcccaccagaataagtttggcgaggacatgccgcacccccattag

SEQ ID NO: 161374 - DNA, 633 bp, Artificial Sequence
  derived and/or modified sequence
atgaccagcaccggccaggacagcaccaccacccggcagcggcggtctaggcagaacccgcagagccccccacaggactcctccgtgacctctaagagaaatatcaagaagggtgcagtccccagatccatccctaacctagcagaggtcaagaaaaaaggtaagatgaaaaagctggggcaggctatggaagaggatttgatcgttggccttcaggggatggaccttaatttggaggccgaggctcttgctgggacaggtctggtcctcgatgaacagctgaatgagttccactgcctctgggatgactctttccctgagggacccgagcgactccacgccatcaaggaacagttaatccaggagggcctgctggatcgatgtgtttcattccaggcccgctttgctgagaaggaagagctaatgctggttcactctctggaatatatcgacctgatggaaaccacccagtacatgaacgaaggtgaactgcgggtgctcgctgacacatatgacagcgtatatctacacccaaactcttacagctgtgcctgtctggcgtcaggatccgtgctgcgtctggtagacgccgtgcttggggcagagatccgaaatggcatggccatcatatag

SEQ ID NO: 161375 - DNA, 3648 bp, Artificial Sequence
  derived and/or modified sequence
atgaccagcaccggccaggacagcaccaccacccggcagcggcggtctcgtcagaacccccagtctcccccacaggacagtagcgtcaccagtaaacgaaacattaagaaaggagccgtgcctcgctccattcctaacctcgctgaagtgaagaagaagggaaagatgaaaaagttggggcaggcaatggaggaggatctcattgtcggtctgcagggcatggacctgaacctcgaagccgaagccctcgccgggacggggctcgtgctggacgaacaacttaacgagttccactgtctgtgggacgactctttcccagagggaccggaaagactccacgccattaaggaacaactcatccaagaaggcctgttagaccgatgcgtgtcattccaggcccgttttgctgagaaggaggaattgatgctggtgcactcactggagtacattgatctcatggagacaacccagtatatgaatgaaggcgagctgcgggtgctggccgacacgtatgacagcgtctacttgcatccaaattcctactcgtgcgcctgcctggcgtcaggttcggtgctgaggctcgtagacgccgtgctgggcgccgaaatacggaacggaatggctatcataaggccacccggacaccacgcacagcacagcctgatggacggatactgtatgttcaatcatgtcgccgtcgccgctcgctacgctcagcaaaagcacaggatacggagggtcctgatcgtggattgggatgtgcaccacgggcaagggacacagttcacattcgatcaggacccctcagtgctctacttctctattcaccggtacgaacagggccggttttggccccacttaaaagcctccaattggagcacgacaggcttcggccagggtcaggggtacactatcaatgtgccctggaatcaggtaggaatgcgcgatgcagattatatagcagcatttttacatgttctcctacccgtcgccctggaatttcaaccacagctggttcttgtcgcggccgggtttgatgcccttcagggtgatcctaagggcgaaatggcggccaccccagccggctttgctcagttgacccatctattgatgggtcttgctggcggcaagctgattctaagtctcgagggaggttacaacctgcgggccctggccgagggtgtgtctgccagcctgcacacactgctcggcgacccatgccccatgctggaatcaccaggcgcaccctgcaggagcgctcaagcctcggtaagctgcgctctcgaggccttggaaccattttgggaggttctggtaagaagcaccgaaactgtggagcgcgacaacatggaggaagacaatgtggaagagagcgaagaagagggcccatgggaaccacctgtattgcctatcctgacttggcctgtgttacagtccagaactggcttagtgtacgatcagaacatgatgaaccactgtaatctttgggacagccaccaccctgaagtgcctcaaagaatactgcgcatcatgtgtagactggaggagctgggcctcgcagggcggtgcttgacgcttacccctcgacctgctaccgaagcagagctcttaacatgccacagcgctgaatatgttggccatttaagagcaacagaaaagatgaagacgagggagctgcaccgagaatcgtctaacttcgacagtatctacatctgtccatccacattcgcttgcgcccagctggctacaggagcggcctgcagacttgttgaggctgtgctgtctggagaggtgttaaatggtgctgccgtggttaggccaccaggccaccacgctgagcaggatgcagcctgcgggttttgtttcttcaacagcgtggccgttgccgctagacacgctcaaacaattagcggccacgcactgaggatcttaatcgtggactgggacgtacaccatggcaatggtacccaacacatgtttgaggacgacccatccgtgctctatgtctcccttcacagatatgatcatggcacgtttttccctatgggcgacgagggagccagcagccagattggcagggctgccggcactggcttcacagtcaatgtcgcatggaacggtcctcgtatgggcgatgccgattacctcgccgcatggcatcggctcgtgttacccatcgcttacgagtttaaccccgagttggtgctggtgtcagccggattcgatgctgccaggggggatccgctcggaggctgccaggtatctccggaaggttatgcccatctgactcacctgttgatgggactggcttctggtcgcataatactcatactggagggcggctacaatcttacatcaatttccgagagtatggctgcatgcacgaggtcactgttgggcgatcccccccccctgttgacattaccaaggccccccctgtctggggccctggccagcatcacagagacaattcaggtgcaccgacggtactggcgcagcctccgcgtgatgaaggtggaggacagagagggcccgagctcctcaaagttggtgaccaaaaaggctccccagccagccaaacccaggcttgcggaacggatgactacaagagagaaaaaggtgctagaagctggcatgggaaaggtcacgagtgctagtttcggtgaagaatccaccccaggccagactaacagcgagaccgctgtggtggccctcactcaggatcaaccatctgaggccgctacgggaggggccacactcgcccaaacaatctccgaagccgccatcggaggtgctatgcttggtcagaccacgagcgaggaggcagtcggtggggctactccagatcagaccaccagtgaggagacagtgggaggtgctatcctcgaccagacaacctcagaggacgctgttgggggggcgacactcgggcagaccacttccgaggaggcagtagggggcgcaaccctcgcacagaccaccagcgaggcggcaatggagggggctacactggaccagaccaccagcgaggaagcccccggtggcacagagctgattcagactccactggccagctcaaccgatcaccaaacaccgcctacttcaccagtgcaaggcactacccctcagatctccccgtcaacgctgattggctctctgcgcaccctcgaacttgggagcgaatctcaaggtgccagcgaatcccaggccccgggtgaagaaaatttgctgggcgaagccgccggggggcaggacatggccgacagcatgctcatgcaaggcagtaggggtctgacggaccaggctattttctatgccgttactccactgccctggtgccctcatctggtggcagtgtgtccaattccagcggccggtctcgacgttacccagccttgtggggactgtggaaccatccaagagaactgggtttgtctgtcttgctatcaggtgtattgtggaaggtacatcaatgggcatatgctacagcaccacggtaatagcgggcaccccctggtgctgagctatatcgacctgtccgcttggtgctactattgccaagcctacgtgcaccaccaggccctgctggacgtcaagaatattgcccaccaaaataagttcggagaagatatgcctcaccctcactag

SEQ ID NO: 161376 - DNA, 633 bp, Artificial Sequence
  derived and/or modified sequence
atgaccagcaccggccaggacagcaccaccacccggcagcggcggtccagacagaatccccagtctcccccccaggacagcagtgtgacttccaaacgcaatatcaaaaagggcgcagtgccacgatccatcccaaacctggccgaagtgaagaaaaaaggcaagatgaaaaagctcggccaagctatggaggaggacttgatcgtcggactgcaggggatggatctcaatctcgaagctgaggctttggctgggacaggactggtgctcgacgagcagctcaacgagtttcactgcctttgggacgattcatttcccgaaggccccgaacggctgcatgctataaaagaacagcttatccaggaaggattgctcgataggtgtgtgagcttccaggcacgctttgccgagaaagaagagctcatgcttgtccactccttagaatatatcgacctgatggagacaacacagtacatgaacgaaggcgagctccgtgtcctggccgacacctacgattcggtgtacttgcacccaaacagctatagctgtgcttgcttggcctccggatccgtgctccgcctggtcgacgcagtgctaggagcagaaatccggaatggaatggctatcatttag

SEQ ID NO: 161377 - DNA, 891 bp, Artificial Sequence
  derived and/or modified sequence
atgaagaagctgggccaggccatggaggaggacctgatcgtgggcttacaaggcatggacctcaacctggaagcagaggctctagcaggaacaggactagttctggacgaacagctcaacgaatttcactgtctgtgggatgattcttttcccgaaggtcccgagagactccacgcgatcaaggaacaactaattcaggaaggactcttggatcgctgtgtttccttccaggcacgcttcgcagagaaggaagagctgatgttagtccacagcctggagtacattgatttgatggagaccacacaatacatgaacgagggagaactgagggtgctggctgacacgtacgattccgtctacctgcacccgaatagctactcttgtgcctgtctggctagcggctctgtgctgcgactggtcgatgcagttctgggggcagaaataaggaacggcatggccatcatccggcctcctgggcaccacgcccaacattctctgatggatggctattgcatgttcaaccatgtggccgtagccgcccgctacgcccagcagaagcaccgaatccgacgcgtactgattgtagactgggacgtgcaccacggacagggcacccagtttaccttcgaccaggacccgtccgttctgtatttcagcattcacagatatgagcagggccggttctggccccaccttaaggccagcaattggtccaccactgggtttggtcagggccaaggatatacgatcaatgtcccttggaatcaggtggggatgcgtgacgcagattacatcgcggcctttttgcatgtcctgttgcccgtcgctctcgaagttctcggcatttggggagttctcggcggaggagtggcattaaaggtgcggctctag

SEQ ID NO: 161378 - DNA, 429 bp, Artificial Sequence
  derived and/or modified sequence
atgaccagcaccggccaggacagcaccaccacccggcagcggcggagtcggcagaaccctcagtcccccccccaagactcaagtgttacaagcaagcggaatatcaaaaagggcgctgtgcctcgctctattccgaacctggcagaagtgaaaaagaagggaaagatgaagaaactgggacaagcgatggaagaggacttgatcgtgggcttgcagggaatggacctaaatctcgaggccgaggccttagccggaaccgggttggtcttagatgagcagttgaacgagtttcactgcctgtgggacgactccttcccggagggccccgagcgactccacgcaataaaagagcagctgatacaggaaggcctgctcgatagatgcgtcagctttcaggcacgatttgccgaaaaggaggagctcatgtag

SEQ ID NO: 161379 - DNA, 810 bp, Artificial Sequence
  derived and/or modified sequence
atgaccagcaccggccaggacagcaccaccacccggcagcggcggtcacggcagaaccctcagtccccgccacaggacagctctgtgacaagcaagaggaatattaaaaagggcgccgttccccgatccatacctaatctcgccgaagtgaaaaaaaaaggcaagatgaaaaagctaggccaggcaatggaagaagatctaattgtggggctgcagggcatggatctcaacctcgaggccgaagccctggccggcacaggactggttctggatgagcagctgaacgagtttcactgcctctgggacgatagctttcccgagggccctgaaagactgcacgccataaaggagcagctcatccaggagggcctgcttgaccgctgcgttagcttccaggctaggtttgcggaaaaggaggagctgatgcttgtacactccttagagtatatcgacttgatggagactacacagtacatgaacgagggcgagttgcgggtgctggccgatacttatgacagtgtgtacctgcatccgaatagctactcttgtgcttgcttggcctctggtagtgtattacggttagtcgatgcagtgctgggcgccgaaatacggaatggtatggctatcataaggccaccaggccatcacgctcaacattctctcatggacggatactgtatgtttaaccacgtggccgttgccgcaaggtatgcgcagcagaagcatcgtatcaggagagtgctaatagtcgattgggacgtgcatcatggacagggtacacaattcacttttgaccaggatccaaggtag

SEQ ID NO: 161380 - DNA, 2454 bp, Artificial Sequence
  derived and/or modified sequence
atgaccagcaccggccaggacagcaccaccacccggcagcggcggagtcgtcaaaacccacagtcgcccccacaggactcaagcgttacaagtaagaggaatatcaaaaagggagcagtaccccgctccatccccaaccttgccgaggtcaagaagaaaggtaaaatgaaaaagctcggccaggccatggaggaggatctgatagtggggctccagggcatggacctgaatctggaggccgaagccctcgccggtacagggctggttctggacgagcaacttaatgaatttcattgtctatgggatgacagttttcccgagggccctgagcggctccacgccatcaaagaacaactgattcaggaggggctgcttgatcgctgtgtgtcctttcaagccagattcgcagaaaaagaggagttgatgctggtccactctctggagtacattgacctgatggaaactacgcaatacatgaatgagggcgaactccgcgtactcgctgatacttacgactctgtatatttacaccccaacagttactcctgtgcttgcttggccagcggctccgtgttgagactggttgacgccgtccttggagccgaaattagaaatggaatggcaattatccggccccccggacatcatgctcagcactcactgatggacggatactgcatgttcaatcacgtggccgtcgccgccagatacgcccagcaaaaacacaggataagacgggtacttattgtggactgggacgtgcaccacggccagggtactcagtttacattcgatcaggacccgtccgtgctctatttttctattcaccggtacgagcagggccgcttctggcctcacctaaaggcctcgaactggtctacgacagggttcggccagggccaaggctatactattaacgtcccttggaatcaggtgggcatgcgcgatgcggactacatagctgccttcctccacgttttgctgccagttgcgctggagttccagccccagcttgtcctggtcgctgcggggtttgacgccctccagggggatcctaaaggcgagatggcagcaactccagcaggcttcgctcagctcacccatctgctcatgggactggctgggggaaaactaatcttgtccttggagggcggctataatctccgggctcttgccgagggggtatctgctagcctgcatacccttctcggggatccctgtccaatgctcgagtcaccgggggcaccctgtcgcagcgctcaagcaagtgtttcgtgcgctctggaagcacttgaacccttttgggaagtactcgtacgcagtaccgagaccgttgaaagggacaacatggaggaggacaacgtagaggagtctgaagaggagggtccgtgggaaccacccgtgttgcccatcctcacatggcctgtgctgcagtccagaacaggccttgtgtatgaccagaatatgatgaatcattgcaatctgtgggattcacaccacccagaagtgccgcagcgtatcctccggattatgtgcaggctcgaggaacttggcttagccggacgctgcctcactttaacaccgcgcccagccactgaagcggagcttctcacctgtcatagcgccgaatacgtgggtcacctgcgagcgaccgaaaagatgaagacacgcgagctgcatcgagaatcttccaattttgattccatctacatctgtcctagtacgttcgcttgtgcccagctcgccactggagctgcatgccggctggtggaggcagtactttcaggggaggttttgaacggagcagcagtcgtacgcccgccgggtcaccacgcagaacaggatgccgcctgcggcttttgcttctttaattctgtggctgtggctgcccggcatgcacaaacaatttccggccacgcccttagaatcttgatagtggattgggatgtgcaccatggcaacggtacgcaacacatgttcgaggatgatccaagcgtactctatgttagtttgcaccgctatgaccatgggacgttttttcccatgggggatgaaggcgcgtcttcacagataggtcgcgcggccggcactggcttcactgtaaacgtggcctggaacggacctcgcatgggcgacgcagattacctcgccgcatggcatcgactcgtattgcccatcgcatatgagtttaatccagagttggtcttggtttcagccgggtttgacgccgcccgtggggacccactcggtggctgtcaggtgagtcccgagggatatgcacacctgacgctgccaatcgcgtgcctgcgggggacaacaaccccagcccagaaagaacgcggggcagctcagtggccacaggaaggagctgacattatgaggattaccctggccggaggggaactcaccggacggcatggcaaagtggcctacgtgatcaagtacaaattgtag

SEQ ID NO: 161381 - DNA, 156 bp, Artificial Sequence
  derived and/or modified sequence
atgaccagcaccggccaggacagcaccaccacccggcagcggcggtcgagacagaacccacaaagcccaccacaagatagctccgtcactagtaaacggaatattaagaaaggggcagttcctcggtcaattcctaaccttgcagaggttaagtag

SEQ ID NO: 161382 - DNA, 516 bp, Artificial Sequence
  derived and/or modified sequence
atgaccagcaccggccaggacagcaccaccacccggcagcggcggagtcgacagaatcctcaatcgccaccacaggactctagcgtaacatcaaagcggaatatcaaaaagggggcggtaccccgctcaatacctaatctcgcggaagtgaaaaagaaggggaagatgaagaaactcggccaggccatggaagaagatctaattgtgggcctgcaggggatggatctgaatcttgaagccgaggcgttggccggcacaggtttagtgcttgatgagcagttgaacgagttccactgtctgtgggatgactccttccccgagggcccggagaggctccacgccatcaaggagcaattgatccaggaaggattgttggataggtgcgtgtccttccaagccagattcgccgaaaaagaagaactcatgctcgtccactcgctggagtacatcgatcttatggagactacccagtatatgaatgaaggtgagctgcgggttctcgctgacacctactag

SEQ ID NO: 161383 - DNA, 486 bp, Artificial Sequence
  derived and/or modified sequence
atgaccagcaccggccaggacagcaccaccacccggcagcggcggtctcgccagaaccctcagtcaccaccccaagatagcagcgtgaccagcaagcgcaacattaagaaaggagccgtgcctaggtccatccccaaccttgctgaggtaaagaagaagggaaagatgaagaagctggggcaggccatggaggaagatctaattgtggggctccaagggatggacctgaacttggaggccgaagcactggcaggcaccgggctcgttctggatgaacagctcaatgagttccattgtttgtgggatgattctttcccagagggtccagaacgtcttcacgctattaaagagcagcttatacaggaaggcctgctagacagatgcgtgtcttttcaggcaaggtttgcagaaaaagaagagctgatgctagtgcactcgttagaatacatagacctcatggagactacgcagtacatgaacgagtag

SEQ ID NO: 161384 - DNA, 504 bp, Artificial Sequence
  derived and/or modified sequence
atgaccagcaccggccaggacagcaccaccacccggcagcggcggagccgacagaatccccaatcccctccgcaagattctagtgtgacgtctaagcggaatatcaagaagggagctgttccacgctcaataccgaacctggccgaggttaaaaagaaggggaagatgaagaagttgggccaagccatggaggaggaccttatcgtaggccttcagggcatggacctcaatcttgaagcagaagcccttgctgggacaggtctggtactggacgagcagctgaacgagttccactgtctttgggatgactcatttcccgaaggcccagagcgcctgcatgcaatcaaagaacagctgatacaggagggcttgctggaccgctgtgtcagcttccaggcgaggtttgcagagaaagaggagctgatgctggttcattctttggaatacatcgatcttatggagaccactcagtatatgaatgagggcgagttgcgggtactatag

SEQ ID NO: 161385 - DNA, 3648 bp, Artificial Sequence
  derived and/or modified sequence
atgacctcgacgggacaggattccactactacccgtcaacgacgtagtaggcagaatccgcagtcgccaccgcaggactcttctgtaacctctaaaaggaatatcaagaaaggagcagttcccaggagcatcccaaacttggcagaggtaaagaagaaaggcaaaatgaaaaaactcggtcaggccatggaagaggacctgattgtcggcctgcaaggcatggatctgaatctggaagccgaagcccttgcgggtactggcctggtgctcgatgagcaactgaacgaattccattgtttatgggacgatagtttcccagaggggcctgagcgtctgcatgctatcaaggagcagctcatacaagagggcttgcttgataggtgcgtcagctttcaggcaaggtttgctgagaaagaagagctgatgctggtgcactccttagaatatattgatcttatggagactacccagtacatgaatgagggtgagttgagggttctggccgacacttatgattcagtgtatctgcacccgaacagttactcatgtgcctgcctcgctagcggcagcgtgctgcggctggtggatgcagttctgggcgcagaaatccgcaacggtatggccattatacggcctccagggcaccacgctcagcatagcctcatggacggatactgtatgtttaatcatgtggcggtggctgctaggtacgcacaacagaagcacagaatcaggcgcgtgctcatcgtcgactgggacgtacaccatggccagggaacccagtttacattcgaccaggatccgagcgtcctgtacttctctatccaccgttatgagcaggggaggttctggccccacctcaaggccagtaattggtctaccacgggcttcggccagggccaagggtacacgatcaacgtgccgtggaaccaggtgggtatgagggacgcagattacattgccgcttttctgcacgtgctcctacccgtggccttggaattccagccacagcttgtgctggtggccgctgggtttgacgcactgcagggcgatccaaagggagaaatggcagcgactcctgccggatttgctcagttgactcacctgctgatggggctcgccggagggaaattgattctcagtcttgaaggtgggtataacttgcgtgcccttgctgagggcgtcagtgccagtctgcacacccttctgggtgacccttgccccatgcttgagtcaccgggagcgccttgtcgatctgctcaggccagcgtgtcctgcgcgttagaagccttggaacccttctgggaagtgctggtacgatccaccgagaccgtggagcgggataacatggaagaagacaacgtcgaagagtcggaggaagaaggcccttgggagccacccgtacttccaatccttacctggcccgttcttcagtctagaaccggcctggtgtacgaccagaacatgatgaatcattgtaatctctgggattcacaccacccagaggtgccccagcgaattctgaggatcatgtgcaggttggaggagctgggtttggccggtcgctgcctgacactaacccccagacctgctaccgaagccgaattgctgacatgtcacagcgcagaatatgtgggccacctccgagcaaccgagaagatgaaaaccagggagctgcaccgggaatcaagcaattttgattccatttatatctgtccgtcaaccttcgcgtgcgcacaactcgcaaccggggcagcctgccgcctggttgaagctgttctaagcggggaggtgctcaacggggcagcagtggtccggccaccgggacaccatgccgaacaggatgcagcctgcggattttgcttttttaactctgtggccgtggccgcacgtcacgcccagacaatcagtggacacgctctgagaatcttaatcgttgattgggatgttcatcatggtaacggaacacagcatatgtttgaggacgatccctctgtcctttacgtttccctgcacagatacgatcacgggaccttctttcccatgggtgacgagggcgcttcttcccagattggacgcgctgccggaaccggatttacagtcaatgttgcatggaacggcccacgaatgggtgacgctgattacctcgccgcatggcatcgactggttctgcccatcgcttacgaatttaaccctgaattggtcctggtgagcgccggattcgacgccgctcggggagacccgctcggagggtgccaggtgtctcccgaaggttatgcacacctgactcatctcctgatgggactcgcgtcagggaggatcattctcattctggaaggtggctacaatttgacctcaattagcgaaagcatggctgcttgtaccaggagccttctgggcgaccccccaccgcttttgacgctgccccgacccccactctccggcgctctcgccagtattacagaaacgattcaagtgcaccggaggtattggcgctcgctcagagttatgaaggttgaggatcgcgagggcccttctagctccaaactggtcaccaagaaggctccccagcctgcaaagcctcgccttgcggaaaggatgactacccgggaaaagaaggttctcgaggccggaatgggtaaggtcacttctgcctccttcggtgaggagtccaccccaggccaaactaatagtgagaccgcagtcgtggcactgacgcaggaccagccttctgaggcagcgaccggcggtgcaaccttggctcaaactatttctgaggctgcaatcggtggcgcaatgctggggcagactacctctgaagaggcggttgggggagccactcctgaccagactacaagcgaagagactgtgggtggagccattctggaccagaccacatcggaggatgcagtcgggggagctacgctggggcagacaacctccgaagaggcagtcgggggagctaccctggcacagaccactagtgaggccgctatggagggtgcaacactggatcagaccacctccgaggaggcacctggcggtacagaacttatacagacccccctcgcctctagcactgaccaccagacgcctcctacgagcccagttcaggggactacaccacaaatcagtccttccaccttaatcggcagtctgagaactctggaattaggcagcgagtcacaaggggcttcagaatcgcaggcaccaggggaggagaatctactcggagaggctgcaggcggacaggacatggccgattcaatgctgatgcagggcagccgtgggttgaccgaccaggccattttttacgccgttaccccgcttccatggtgtccgcacctggtcgccgtatgccccattccggctgccggtctggatgtaacccagccttgcggagactgcggtaccatccaagagaactgggtgtgtctttcttgctaccaggtctattgtggtagatatatcaacggacacatgctgcaacatcacggcaacagcggccatcctcttgtgcttagctacatcgatttgagcgcatggtgctattactgtcaggcctatgttcaccaccaggcactgctggacgtgaaaaatatcgcccatcagaataaatttggtgaagacatgccgcatcctcattag

SEQ ID NO: 161386 - DNA, 633 bp, Artificial Sequence
  derived and/or modified sequence
atgacttcaactggccaggattcaacaaccacaaggcaacgaaggtcacgccagaacccacagtctccgccacaggattctagcgtcacttccaaacgtaatatcaaaaagggcgcagtgcctaggagtatcccgaatctcgccgaagtgaagaagaagggcaagatgaaaaagctgggccaggccatggaagaagatcttattgtaggcctgcaaggaatggaccttaacctcgaggctgaggcgctggcgggtaccggactggtcctcgacgaacaactgaacgaatttcattgtttgtgggacgattcctttcccgaaggcccagaaagactgcatgctatcaaggaacagctgattcaggaggggttgctggatcgctgcgtcagcttccaggcccgattcgctgagaaggaagaactaatgctggtgcatagcctggagtacatagacctcatggagactacacaatacatgaacgaaggggagttgagagttctggccgacacctacgactcagtttatctgcacccaaacagctactcgtgcgcttgtctggctagtggatcagtcctgcggctcgtggatgccgttctaggggcagagatacggaatggtatggcaatcatatag

SEQ ID NO: 161387 - DNA, 3648 bp, Artificial Sequence
  derived and/or modified sequence
atgaccagcaccggtcaggacagtaccactacgcgtcaacggagatcaaggcagaatccacagtcccccccacaggactccagtgtgacttctaagaggaacattaagaaaggcgcagttccaaggtcaatccccaacctggcagaggtgaaaaaaaagggaaagatgaaaaagttgggtcaggcaatggaagaggatctgattgtgggcctgcaagggatggacctgaatctggaggcggaagccctggctggcaccggcctggttctagacgagcagctgaacgagtttcactgtctgtgggacgatagctttccagaaggtcctgaaagacttcatgcaataaaagagcagctgatccaagaaggtctcctcgaccgctgtgttagctttcaggcacgatttgccgaaaaagaagaactgatgttagttcacagcctggaatatatcgatcttatggagacaacgcagtacatgaatgagggcgaactacgcgttcttgccgacacctatgattccgtttatctgcatcccaattcctatagttgcgcctgtctggcgtccggatccgttctgagattggtggacgcagtattgggcgcagagatacgtaacggcatggcgatcattagaccgcctggtcatcacgcccagcattccttgatggatggatactgcatgtttaatcacgtggccgtcgctgctcggtatgcacagcagaagcaccggatcagacgggtcctgatcgtagactgggacgtccaccacggacaggggacacagtttacattcgaccaggatccttcagtcttgtacttctccattcataggtacgaacaaggaaggttctggccccatctgaaggcctccaactggagtaccaccggtttcgggcagggtcagggctacaccataaatgtgccctggaaccaggtgggcatgagggacgccgactacatagccgctttcttgcacgtgctactccctgtagccctcgagtttcaaccacagctggtcttggtagccgctggcttcgacgccctccaaggagatcccaagggcgaaatggcagccacgcccgcagggttcgctcaactgacacaccttttaatggggctggcgggaggcaagctgattctttctctggagggcggttacaatcttcgcgcactagcagaaggagtgtcagcgtcactccacacattgctgggcgatccttgtcccatgttagaatcacccggagcgccatgtaggagcgcacaggctagcgttagctgtgccctggaggccttagagccattttgggaggtccttgtgaggagtacggaaactgtggagagagacaacatggaggaggacaacgtggaggagtctgaagaggaagggccatgggagccacctgtactgcctatattgacctggcctgttctgcagagcaggacaggtttagtctacgatcagaatatgatgaatcactgtaatctctgggactcccaccaccccgaggttccgcaaaggatacttaggatcatgtgccgcctcgaagaactggggctcgctggacggtgtttaacccttactccgcgacccgcaactgaagctgagttgctcacctgccactcagcagagtatgtcggtcatctacgtgccactgagaagatgaagactagagagctgcatagagagtctagcaacttcgactccatttacatctgcccctcgacgttcgcctgcgctcaactggccaccggagccgcatgcaggctagtggaggctgtgctttcaggggaagtgctaaatggcgctgccgttgtccggccacccggtcaccacgcagaacaggatgctgcctgtgggttttgcttttttaatagtgtcgccgtcgccgctcgacatgctcagactatctctggccatgccttacgaattcttatcgtggactgggacgtccaccatggtaatggcactcagcacatgttcgaggacgacccttccgtgctttacgtgtccctccatagatatgaccacgggacttttttcccaatgggcgatgagggcgcaagctcacaaataggcagggctgcgggaaccgggttcacagtgaacgtagcctggaatgggccacgtatgggggatgcggactacctggctgcctggcataggctggtgctgccgattgcatacgagtttaatcccgagcttgtccttgtcagcgcaggattcgacgcagcgaggggtgacccccttggcggttgccaggtgagccctgaaggctacgcccatttgacacatctcctgatgggcctggcctccggcaggataatcctgatccttgaagggggatacaacctaacttcaatctcggaaagtatggctgcttgcaccaggtcccttctgggggatcccccaccattactgaccctgcctcgcccaccactatccggtgcattagcatccattacagagacaattcaagtccaccggagatactggagatcactgcgcgtcatgaaggtagaggatcgagaggggccatcatcctccaagctcgtgacaaaaaaggccccacagcctgccaaaccaagactcgcagagagaatgaccacacgtgagaagaaggtgctggaagccggtatgggtaaggttacctctgcaagttttggagaggagtccacccctggacaaaccaatagcgaaaccgccgtggtcgccctcacccaggaccagccctcggaggctgctaccgggggagccaccctagctcagacgatctccgaagcagccatcggaggtgccatgctcggacaaacgaccagcgaagaagccgtcggcggagctacccccgaccagaccacaagcgaggagacagttgggggtgcgatactcgaccagacgacttcagaggatgctgttggtggggctaccttgggtcagacgacctcagaggaagcagttggaggagctacattggcgcagaccacatctgaggctgccatggagggcgctacccttgaccaaactacatctgaagaagcaccaggcggaacggaattaattcaaacaccccttgcaagtagcacagaccatcagactcctcctacctcacccgtccagggcactacgccccagatctcaccttctacattgataggttctttgcggaccctagagctgggatcagaatcccagggcgcaagtgaatctcaggctcctggggaggaaaatcttctgggagaggccgcaggtggacaggacatggccgactccatgcttatgcagggcagccgagggctgactgaccaggccatcttttacgccgtcacccccctgccatggtgccctcatctagttgccgtgtgcccaattccagctgctgggcttgacgttacccagccatgcggcgactgcggtaccatacaagagaactgggtgtgcctgtcttgctatcaggtgtactgcggacgttatatcaacggccacatgcttcaacaccacggcaactctggtcatccactagtattatcttacatcgatctcagcgcctggtgttactattgccaagcttacgtacaccaccaagcactgctagatgtgaaaaacattgcccaccagaataaatttggagaagatatgccacatccgcactag

SEQ ID NO: 161388 - DNA, 633 bp, Artificial Sequence
  derived and/or modified sequence
atgacgagcactggtcaggactctactaccacgagacagagacgatcccggcagaatcctcaaagtccgccacaggattccagtgtcacaagcaagcggaatatcaaaaagggcgctgtgcctcggtccatccctaatctggccgaagtgaaaaaaaaaggaaagatgaaaaaattgggacaggcaatggaagaagacctgatcgtgggactccaggggatggaccttaatttggaagcagaggcactggctggaactggcctcgtgctggacgagcaattaaacgagtttcattgtctgtgggatgattcttttccagagggcccagaacgcttacatgccattaaggagcaactgattcaggaggggctacttgatcgctgcgttagcttccaggcccgattcgctgaaaaggaagaactcatgctggttcatagcctggagtacatagatcttatggaaacgacacagtacatgaatgaaggtgagctgagagtccttgccgacacttatgatagtgtgtacctccacccaaactcctactcctgtgcctgtctggcctcagggagtgtactgcgcctcgtggatgctgtgctgggggcagaaataaggaacggtatggctatcatttag

SEQ ID NO: 161389 - DNA, 891 bp, Artificial Sequence
  derived and/or modified sequence
atgaaaaaactgggacaggccatggaggaagacctcatagtggggctgcagggtatggaccttaatctggaagcagaagcccttgcagggactggcctggtgcttgacgagcaactcaatgagtttcattgtctttgggatgactcttttcccgagggcccagagcgtcttcatgcaattaaagaacagctcattcaggagggtttgctggatcgctgtgtttcttttcaggctcgctttgcagagaaagaggaactgatgctcgttcattctctcgaatatatcgacttgatggaaaccacgcagtacatgaatgaaggcgagctaagagtcctcgcagatacgtacgactctgtctaccttcatcctaacagttacagttgtgcctgcctggccagcggaagcgtacttaggctggtcgacgctgttctaggcgctgagataaggaacggtatggcaatcatccgccctcccggacatcacgctcagcattcccttatggatggctattgtatgtttaatcacgtggctgtggccgctcgttatgctcagcagaaacatcggattcgcagagtgttaatcgtggactgggacgtccaccacggccagggcacacagttcacattcgatcaagaccccagtgttctttatttttcaattcacaggtatgagcagggtaggttctggcctcatctgaaggccagtaactggagtacgaccgggttcggtcagggacagggctataccattaatgtcccctggaaccaggtagggatgcgtgatgccgactacatcgcggcattcctccatgtcctgctgccagttgccctcgaggtgctgggaatttggggcgttttaggtgggggagtcgccctgaaggtcaggttgtag

SEQ ID NO: 161390 - DNA, 429 bp, Artificial Sequence
  derived and/or modified sequence
atgacttctacaggtcaagactcaaccacaactcgccagaggaggtcacggcagaacccacagtcgcctccacaagactcttccgtcaccagtaagcgcaacattaagaagggagcagtgcctcggagcattcccaatctggccgaggttaagaaaaaggggaagatgaaaaagctgggtcaggccatggaggaggacctgatcgtcggtttgcagggaatggacctcaatctggaggcggaagcccttgccggaactgggctggtcttagacgaacagctgaacgagttccattgcctttgggatgacagctttccagaagggccagaacgccttcacgcaattaaagagcagctgatccaggaaggcctacttgatagatgtgtctccttccaggctcggtttgccgaaaaggaagaactgatgtag

SEQ ID NO: 161391 - DNA, 810 bp, Artificial Sequence
  derived and/or modified sequence
atgaccagcacgggtcaagactctacgacaaccaggcagaggcgtagcaggcagaaccctcagtcacctccccaggacagcagcgtgaccagcaaaaggaatatcaagaaaggggcagtcccccgttcaattcctaatctcgcggaagttaagaagaagggaaaaatgaaaaaactgggccaggctatggaggaggacctgatcgttggcttgcagggtatggacctcaatttagaggccgaggctttagccggaacaggcctcgttttggacgaacaactgaacgaattccactgcttatgggacgactcttttcctgagggacccgaaaggctgcatgctataaaggaacaactgatccaggagggcctgctcgaccggtgcgtatcttttcaagcccgattcgcagaaaaggaagaactgatgcttgttcatagccttgagtatatcgatctgatggaaacaacccagtacatgaacgaaggtgaactgcgcgttctggccgatacttatgacagcgtatacctgcatcccaatagttatagctgtgcttgtctggcctccgggtctgtactgcgattggttgacgcagtccttggcgctgaaatccgcaacggtatggccattattaggccgcctggccatcacgcccaacactccctcatggatggctactgcatgttcaaccatgtcgctgtcgcggctaggtatgctcagcagaagcatcgtattcgtagggtgctgatcgtggattgggacgtccatcacgggcaggggactcaatttacctttgatcaagaccccagatag

SEQ ID NO: 161392 - DNA, 2454 bp, Artificial Sequence
  derived and/or modified sequence
atgaccagcaccggacaggactccacaaccaccaggcagcgaaggtccagacagaacccgcaaagtcctcctcaggattcctccgtaacaagcaaaaggaacattaaaaaaggggcagttcctcgaagtattcccaacttggctgaggtgaagaaaaagggcaagatgaagaagctgggccaggcaatggaagaggacctgattgtgggcctccagggtatggacctgaacctggaggctgaagcacttgctggcactggattagttctcgacgaacaacttaacgaatttcactgcctctgggacgactccttccctgaaggccctgaacggttgcatgccataaaagagcaactgatccaggaaggactgctagatcgatgtgtgtctttccaggcccgatttgccgagaaagaggaattgatgcttgtgcattccttggagtacatagacctcatggaaacaactcaatatatgaatgagggcgaacttagggttctcgcggacacctatgactctgtctatctgcatccaaacagttattcctgcgcctgcctcgcatctgggtctgtgctccgtctcgttgacgccgtgctcggcgcagaaatcagaaacggaatggctataatccgcccaccaggacaccacgcccagcattcattgatggatggctactgcatgttcaaccatgtggcggtggcagctaggtacgcgcagcagaaacaccgtatccgcagagtgctcattgtggattgggatgtccaccacggccagggaacccagtttacattcgatcaagatccttcagtcctgtatttcagcattcacaggtatgagcaggggcgtttctggcctcatctgaaagcttctaactggtccactacaggatttgggcagggtcaaggctatactattaatgtgccgtggaatcaggtgggaatgcgcgatgctgattacatcgctgcctttctgcacgtattgctgccagtggcgctggagtttcaaccccagctggtattggtggctgccggattcgacgccctgcagggcgatcctaagggcgaaatggcagctacccctgccggttttgctcagctgactcacttgctcatggggttggcgggagggaagttgatactcagcctggagggtggctacaatcttcgggctcttgctgaaggggtatctgcaagcctgcacaccctgctcggtgacccgtgccctatgctcgagagtccgggagcgccttgtaggagcgcacaggccagcgtctcttgcgcactcgaagccttggagcctttctgggaagtactggtgaggtccacagagaccgtagagagagacaacatggaggaagacaacgtagaggagtctgaagaggaggggccatgggagccaccggttctgcctattctcacttggcctgtactccaatcccggactgggctggtctacgatcagaacatgatgaatcactgcaatctgtgggatagccatcatcccgaagtgccccagcggattttgaggataatgtgccgccttgaagagctaggtcttgctggcagatgtttgacactcaccccacggccagctactgaggccgagctgctcacatgccacagtgcggagtatgttgggcatctacgcgctacagagaagatgaagaccagagagttgcatcgggagagcagcaacttcgactcaatttatatctgcccaagtacattcgcttgcgcccagctcgcaaccggggctgcatgtcgactcgtggaggcagtcttgtcaggtgaagtgttgaatggcgctgcagtagtgcggccacctggtcatcacgcagagcaagacgccgcttgtggcttctgcttctttaattccgtggccgtcgccgcacgccacgcccagactatctctggacacgccctaaggatcttgatcgttgactgggacgttcaccatgggaatggaacccagcatatgttcgaggatgacccatcggtgttgtacgttagtctgcataggtacgatcatggcacatttttcccaatgggagatgaaggagcctccagtcagatcggtagagctgccggtacaggattcacagtcaacgtcgcatggaatggtccccgaatgggcgatgcagactatctcgcagcctggcaccgtctggtcctgccaatcgcatacgagttcaaccccgagctggtgttagtgagtgcgggattcgacgctgcgcgtggggatccacttggtggatgccaagtgagccccgaggggtatgcccacctcactttgccaatcgcatgtctgagagggactaccactcccgcacagaaggagcggggtgcagctcaatggccacaggagggcgcagatatcatgcggattacgctggctggcggagaactcaccggtcgtcacgggaaggtggcatacgtcatcaagtacaagctgtag

SEQ ID NO: 161393 - DNA, 156 bp, Artificial Sequence
  derived and/or modified sequence
atgacttccacagggcaggattcgaccaccacccgacaacgcaggagcaggcagaaccctcagagccctccacaagacagtagcgtgacctcgaagcggaatatcaagaagggagctgtgccgagatctatccccaatctcgctgaggtgaagtag

SEQ ID NO: 161394 - DNA, 516 bp, Artificial Sequence
  derived and/or modified sequence
atgacctctaccggccaggatagcacgacaacacgccagcgtaggtcccgccagaacccgcagtccccaccccaggattcaagcgtaaccagcaagcgcaacattaaaaagggagcagtgccccgatccattcctaatcttgctgaggtcaaaaagaagggtaagatgaagaagctaggtcaggctatggaggaggatctcattgtggggctgcagggcatggatctgaacctcgaggctgaggctctcgctgggacaggcttggtactggatgagcagctgaatgaattccattgcctatgggacgacagcttcccggaggggccagagcggcttcacgccataaaggaacaactcattcaagagggcctcttggataggtgtgtgtcatttcaggcaagatttgcagagaaggaggagctgatgctggtccattctctggagtacattgatctgatggagaccactcagtacatgaatgaaggcgaactgcgtgtactggccgacacctattag

SEQ ID NO: 161395 - DNA, 486 bp, Artificial Sequence
  derived and/or modified sequence
atgacctcaacgggccaggactccactactactaggcagcgcagaagtcgccagaaccctcagagtccccctcaggattctagtgtcacctctaagcgcaacatcaagaaaggcgctgtcccaagaagcatccctaacctggccgaagtgaagaagaaaggaaaaatgaaaaagttaggacaggcaatggaggaagacttaatagttgggttacaggggatggacctgaatcttgaagcagaagctctggctggtaccggactggtgcttgatgagcaactcaacgaatttcattgcctttgggatgactcttttccagagggtcccgagcgactacacgccataaaggaacaattgatccaagaaggcctactcgatagatgcgtgtcttttcaagccagattcgccgagaaagaggaactgatgttggtacactccttagagtatatcgatctaatggagactactcagtacatgaatgaatag

SEQ ID NO: 161396 - DNA, 504 bp, Artificial Sequence
  derived and/or modified sequence
atgacctctactggccaggactccacaacaacgaggcagcggagatcacgccagaatccccagagccctccccaagactcttccgttacctctaagcgcaacattaaaaagggggctgtgccgagaagtatccccaatctcgccgaggtgaaaaagaaaggcaagatgaagaagctgggccaagccatggaagaggatctcatagtggggctgcaaggaatggacctgaatttggaggcagaagccctagccggtactggtctggtgctggatgaacagttgaacgaatttcattgtctctgggacgatagctttcccgagggcccagagaggcttcacgccattaaggaacagttaatccaagaagggctgctggacaggtgtgtgagttttcaggctcgcttcgcagagaaagaggagctgatgcttgtgcacagcctggagtacatagacctgatggagacgactcaatacatgaatgaaggggaactgcgagtcctttag

SEQ ID NO: 161397 - DNA, 3648 bp, Artificial Sequence
  derived and/or modified sequence
atgacctctactggccaggatagcaccactacaagacagagaaggagtaggcagaatccacaaagccccccgcaagactcaagtgtgacttccaagcgaaatataaagaagggcgctgtcccccggagtatccccaaccttgccgaggtgaaaaagaagggaaagatgaaaaagctaggtcaggcaatggaggaggacctcattgtcgggctgcaggggatggacctgaacctggaggctgaagccctggcgggaacaggtctggtcctggacgagcagctaaatgaatttcattgtttatgggacgattcttttccggagggccccgagcggctccatgcgattaaggaacagctgatccaggagggtctgctggatcgttgcgtaagtttccaggcacgtttcgcggagaaggaagaactaatgttggtgcattcactggaatatatcgacctgatggaaactacccagtacatgaatgaaggagaactgcgcgtactagcagatacatatgacagcgtctatttacatcctaatagctactcctgtgcatgcttggcttccggctcagtactgagactggttgatgccgtgctaggtgcggagatcaggaatgggatggctattatcagaccccccggacaccacgcccagcactcactcatggatggctactgcatgttcaaccacgtagccgtggccgctcggtacgcccaacaaaagcaccgtatccgtcgggtcttgattgttgattgggacgttcaccacggccagggcacccagttcactttcgaccaggaccctagtgtcctgtatttcagcattcatagatatgaacagggtcggttttggcctcatctgaaggcttccaattggagtaccaccgggtttggacagggccagggatacaccattaatgtgccttggaaccaagttgggatgagggacgctgactacatcgccgccttcctccatgttctgctgcctgttgccttggagtttcagcctcagctggtactagtcgctgccggcttcgacgcgctgcagggagatccaaaaggcgaaatggcagcaacccccgcaggcttcgcacaactaacccatctactgatgggtctggctggtgggaaattaattctttcactggaaggaggctacaatctgcgcgcactggctgaaggagtaagcgcatcgttacatacactgcttggggacccttgtcctatgctggaatcacccggagcaccttgccgaagcgctcaggcaagcgtgagttgcgccctcgaggccctggagcctttttgggaagtactcgtgagaagcaccgagaccgtagaacgagataacatggaggaggataatgtcgaggaatctgaggaagaaggcccgtgggaaccaccggtgcttcctatactgacatggccagtgctgcagagccgtacaggcctagtttatgaccagaacatgatgaatcactgcaatctatgggactctcaccaccccgaagtgccacaacgcatcttgcggatcatgtgccggctagaggagctggggctggcagggagatgcctcacattaacgccacggcctgccaccgaagctgagctcctgacatgtcacagcgccgaatacgttggccatctgcgggctacggagaagatgaaaactagggaacttcacagggagtcaagcaacttcgactcgatctacatttgccctagtacatttgcttgcgcccagttagcgacaggcgcagcgtgccgcctggtggaggctgtgctgtcaggggaggtcctcaacggagctgctgtggtgagacctcctggacatcacgcagaacaagacgccgcttgcggcttttgctttttcaattctgtcgctgtggcagcaagacatgcccagaccatttcaggacacgccctccgtattttaatcgtcgattgggacgtccaccacgggaacggcacccaacatatgttcgaagacgaccccagcgtgttgtacgttagcctgcataggtatgaccatggcactttcttccctatgggtgatgagggagcttcatcccagatcggtagagcggctggcaccggattcacagttaatgttgcctggaacggacctcgtatgggcgacgctgactacttagctgcctggcaccgccttgtgttgcccatcgcatatgaatttaaccccgagctcgtcctggtctcggcgggtttcgatgcggcaaggggggatcctctcggagggtgccaggtgtcacctgagggatatgctcatctcacacacctgctgatgggcctggcatctggtcgcatcattctgattctggagggtggctataatctaacttcaatctccgagagtatggccgcttgtacccggtccttacttggagatcccccccccctgctgactcttcctaggcctcctctcagcggggctctagccagtattacagaaaccatacaggtccatcggcgctattggcgaagcctccgggttatgaaagttgaagatcgggagggccctagcagctcaaaacttgttactaagaaggccccccagccagcgaagccccggcttgcagagcgaatgacaacacgtgagaaaaaggtcctggaagcaggcatgggaaaagttactagcgcatctttcggagaggagtcgactcctggccagacgaattcagagacagccgtagtggctcttacgcaagaccagccaagcgaggctgctacgggaggagctacactggcccagactatttcagaggcagctattggtggtgcgatgttgggccaaactacgtctgaggaagccgttgggggggccacacccgaccagacaacaagcgaggagacagtggggggtgcgatcttggaccagacgacatcagaggacgcagttgggggcgcaactttagggcagacgacatctgaagaggccgtcggaggcgctacactggcccagacgacaagcgaggccgccatggaaggggccaccctggaccagactacatcagaagaggcacctggcgggaccgagcttatacagacaccactagcgtcctcaaccgaccaccaaacccctccaacgtccccagtccaggggactacgccccaaatcagtccctcaacccttattggtagtttgcggaccttagaactgggttcagagagtcagggggccagcgagagccaggcccctggcgaggagaacctgttaggggaagccgcaggcgggcaggacatggcagactcgatgctgatgcaaggttcccgcggcttgaccgatcaagctatcttctacgcagttacaccactcccctggtgcccacacctggtggccgtttgtccaatacctgccgcaggcttagatgtgacccagccttgcggagactgcgggacaatacaggaaaattgggtgtgcctgtcctgctaccaagtctattgcggacgatatatcaatggacatatgttgcagcaccacggaaactctggacatcctctggtgctctcctatattgatctgagtgcttggtgctattactgccaggcctacgtacatcaccaagcactcctcgatgttaaaaacatcgcccatcagaacaagttcggcgaagatatgcctcatccccactag

SEQ ID NO: 161398 - DNA, 3648 bp, Artificial Sequence
  derived and/or modified sequence
atgaccagcaccggccaggacagcaccaccacccggcagcggcggtccaggcagaacccacagagcccccctcaagacagcagcgtgaccagcaagcgtaacattaaaaagggtgccgtgccacgctcaatccccaatctcgcagaggttaagaagaaaggcaagatgaagaagttgggtcaggctatggaagaagatctgatcgtaggcttgcagggcatggatttgaacctggaggctgaggcacttgcggggaccggattagtgctggatgagcagctcaacgaatttcactgtctctgggacgattcttttcctgagggacccgaacggttacatgctattaaagagcagctaattcaggaggggttgttggatcgttgcgtgtcgttccaggccagattcgccgaaaaagaagagcttatgctggttcacagtttagagtatattgacttgatggagactacacagtacatgaacgagggggagctcagagtcctggctgacacttacgacagtgtgtacctccacccaaattcatactcctgtgcctgcttggccagtggcagcgtccttaggctggttgatgccgtgctcggggctgagatccggaacggaatggcaatcatacgaccacctgggcaccatgcacaacactctctgatggacggctactgtatgtttaaccacgtggccgtcgccgctcgctatgcccagcagaaacaccggattcgccgggtgctgattgtcgactgggacgtgcaccacggacagggcactcaattcaccttcgatcaggatccttcagtactttacttttccatccaccgatacgagcaggggaggttctggcctcacttgaaggccagtaattggagcaccacaggcttcggacaaggtcagggctacacaattaacgtgccttggaatcaagttgggatgcgagacgctgactatatcgcagcttttctacacgttctcctgcctgttgcactggagtttcagcctcagctcgtgctggtagccgctgggttcgatgccctgcagggtgatccaaagggcgaaatggctgccaccccagccggatttgctcaacttacccatctcctcatgggtttggctgggggtaaacttatcctgtcgcttgaggggggttacaacctgcgcgccctcgccgagggagtgtccgcctcactgcatactctgctcggagatccatgcccaatgctcgagagtccaggggcgccgtgtcgttccgctcaggcctccgttagctgtgctcttgaggcgctggagcccttctgggaggttctggtacggagtactgagactgtggaacgtgacaatatggaagaggacaatgttgaggagtcagaggaagaggggccctgggagcccccagtgctccctatactgacgtggcccgtgctgcagtccagaactgggctggtctatgatcaaaatatgatgaatcattgcaatctgtgggatagtcatcaccccgaggtgccacagcgcattctgagaattatgtgcagactcgaagagcttgggttagcgggtaggtgcctaacactgacgcctagaccggccacagaggcagaactcctgacctgccactccgcagagtacgtggggcacctgcgagcaacagaaaagatgaaaacccgagaactgcaccgcgaatcgtcaaacttcgacagtatttatatttgcccctccacctttgcttgcgcacagttagcaactggcgcagcctgtcgactggtggaagccgtcctgagcggagaagtgctgaacggtgctgcggtggttcggcccccaggccaccacgcagagcaagatgcagcatgtgggttctgctttttcaactctgtcgccgtcgcggccaggcatgcgcagacgatttctggacatgctttaagaattttaatcgttgattgggatgtgcaccacggtaatggaactcaacacatgtttgaagatgacccatcagtgctctacgtttccttgcaccgatacgaccatgggaccttcttccctatgggtgacgagggcgcctcttctcaaatcgggcgggccgctggcaccggattcaccgtgaatgtggcctggaacggtcctaggatgggggacgcggactacttagcagcttggcatcgcttggttctccccatcgcttacgaattcaatcctgagctggtcctggtgtcagcggggtttgatgcagcaaggggtgatcccttgggcggctgtcaggtgtctcctgaagggtatgcacatctaacccatctgctgatgggacttgcctctgggcgaatcatccttatcctggagggcggctacaacctgacttcgattagcgaatcaatggccgcatgcacccggagccttcttggagatcccccacccctgctgaccctcccccgcccaccactttcaggagcgctggcatctatcacagagacaattcaagtccaccggcgttactggcgcagcttgagagtcatgaaggtcgaggatagagagggaccctcctctagcaaactcgtgaccaaaaaagcacctcagccagctaaaccaagactggctgagcgtatgacaactcgggagaaaaaggtgcttgaggcaggcatgggcaaggtgaccagcgcatctttcggggaagaatcaactccaggccagaccaatagcgaaacagccgtggtggcactgacacaggatcagccaagtgaggctgctacaggcggagctacccttgctcagaccatcagcgaagctgctattgggggcgcaatgcttggacagaccaccagtgaagaagccgtgggcggcgcaacaccagaccagactactagcgaggaaacagttgggggagccatactagatcagactacctctgaggatgcagtgggaggcgccaccctgggccagactacttcagaagaggctgtcggcggcgccaccctggcacagactacttctgaagcggctatggagggcgccaccctggaccaaactacatcagaagaagccccgggcggtacggaactgatacagacacccctggcctcctccacggaccatcaaactcctcctacctcccccgtgcaaggcacgacacctcaaatatccccctctactttgattggctcattaagaactctcgagctggggagcgagtcccaaggtgcaagcgaaagccaggcccccggcgaggagaatctactgggagaagcagccggaggccaagatatggccgattcgatgttaatgcaggggagtcggggcctgactgatcaagcgattttttatgcagtcacgccgctgccttggtgccctcaccttgttgccgtgtgtccaatccctgccgcaggcttggatgtgacccaaccgtgtggcgattgtggcaccatccaggaaaactgggtctgtctgtcctgctaccaggtgtattgcggtaggtatatcaatggccacatgctgcagcaccacgggaattccggtcacccactagttttgagttacatcgatctgtccgcatggtgctactactgccaggcctatgtccaccatcaagcacttcttgacgttaaaaatattgcgcatcaaaataagttcggtgaggacatgcctcacccccattag

SEQ ID NO: 161399 - DNA, 3648 bp, Artificial Sequence
  derived and/or modified sequence
atgacatccactgggcaggacagcaccacgactaggcagcgcaggtccagacagaatcctcagagccctccccaagactcctcagtcacttcaaagagaaatatcaagaaaggagcagtgcccaggagcattccaaatctggccgaggtcaagaagaagggcaagatgaaaaaactcggacaagctatggaagaagatctcatcgtggggctgcagggcatggacctgaatctggaggccgaagctcttgccggaaccggattggttctggatgaacagctcaacgaatttcattgcctgtgggatgacagcttccccgagggcccagaaagattgcatgcgattaaggagcagcttatccaggagggtctactcgaccgctgtgtttcttttcaggctagattcgcagagaaagaggaactgatgctggtgcactcactggaatacatagacctgatggagactactcagtatatgaacgaaggtgagctgcgtgttctggccgacacatatgattccgtttatttacatccaaattcttattcttgcgcctgtctggcaagtggcagcgtcctcaggttggtggacgcagttctgggagccgaaatccgtaacggcatggccatcattcgccctccgggacaccatgcgcaacattccttgatggatggatattgcatgtttaatcacgtggcggtggccgctaggtacgcgcagcagaagcatcggatcaggagggttctaatcgtggactgggacgtccaccatggccagggcacccagttcacatttgaccaggacccaagcgtgttatacttcagtatacacaggtatgaacaaggccgtttttggccccacctcaaggcatcaaattggagcactactggattcggccagggtcaaggctacactatcaacgttccatggaatcaagtgggcatgcgggatgctgactacatcgctgctttcctccacgtcctcctgcccgtggcattggaattccaacctcagctggtgttggtagctgcaggcttcgatgcccttcagggtgacccaaagggcgagatggcagcgacccctgccggttttgcccagctgacacacctcctgatgggcctggcaggaggtaagttaatcttaagcctggaaggcggatacaacctgcgagccttggctgagggagtttccgcttctctccacactctgctgggggatccatgtcccatgcttgagtcacctggcgcaccatgtcgctctgcccaggcctccgtgtcttgcgccctcgaggctttggagccattctgggaggttctcgtgcggtcaacggagactgtggagagagacaacatggaggaagataatgtcgaagagtctgaagaagaaggaccctgggaacccccagttctgcctattctcacctggcccgttctccaatctcgcaccggtctggtgtatgatcagaatatgatgaatcactgtaacttatgggatagtcatcaccccgaagtgcctcagaggattcttcgcatcatgtgcagactcgaggagcttggactcgcagggaggtgcttgaccctgacgccaaggcctgcaaccgaggcggagttgcttacatgtcatagcgccgagtacgtggggcacctgcgtgcaacggaaaagatgaagactagagaactgcatcgggagagcagcaattttgattcaatctacatttgtccaagcacttttgcttgcgcacagcttgccaccggagctgcttgccgcctggttgaggctgtgctctcaggtgaagtgttaaatggggctgcagttgttcgtccaccgggtcatcacgccgaacaagacgcggcatgtggcttttgtttttttaactctgtggctgtcgcggctcgtcacgcccaaacgatctcaggccatgctctgcggattttaatagtggattgggacgtacatcatggaaacggtacacagcatatgtttgaagatgacccgagcgtcctttacgtttcgctgcaccggtacgaccacgggacattttttccgatgggtgatgagggggcatcatctcagattggacgggcagccggaactggtttcaccgtgaatgtagcttggaacgggccaaggatgggggatgctgactacttagctgcctggcatagactcgtgcttccaattgcctatgagtttaacccagagctggtcctggtgtcagcaggcttcgatgccgctcggggtgatccattaggtggctgtcaggtctccccagaaggatatgcacacctgacccacttgcttatgggactggcttcaggaaggatcatcttgatcctggagggaggatataacctcacaagcatatcagagagtatggcagcatgcaccagatcgctcctcggggacccaccccctctcctgaccctccctcgccctcctctgagcggagccctcgcatccatcaccgaaaccatccaagtgcaccgtaggtactggaggtctcttcgcgttatgaaggtcgaggatcgagagggtccttcctctagtaagctggtgaccaagaaggcaccacagcctgccaaacctcgtctcgctgaaaggatgacaaccagagagaaaaaagtgttggaggctggcatgggcaaagtgacctctgccagttttggagaagaaagcacccccggtcaaacaaactcagagactgcagtcgtcgctttaacccaggatcagccctccgaggccgcaactggcggagccacccttgcgcaaactatttcagaggccgcaatcggaggcgcaatgctaggacagacaacctctgaggaggccgtgggaggggctaccccagatcagacaactagtgaagaaacagtcgggggagcaatactggaccaaaccacttcagaggacgccgtcgggggagccacactaggccagacaacctcagaagaggccgtcggaggggcaactctcgctcagacaacctctgaggcggcaatggagggcgctactctcgatcagaccaccagcgaagaggctccagggggaactgagctaattcagactcctctggcttcctccacggaccaccagaccccacctaccagtccagtgcaaggcacaaccccccaaataagtccatcaacgctaatcgggagcctgcggactctggaactcggaagcgagagccagggggcatcagagagtcaagcgcctggcgaggaaaatcttttaggggaggccgcaggcggtcaggatatggccgattccatgcttatgcaggggtccagaggcttaaccgaccaggcaatcttttatgcagtcacccccctgccgtggtgtcctcacctggtggctgtgtgcccaatccctgccgcaggactggacgtaacccagccatgcggagattgcggcacaattcaggaaaactgggtgtgtcttagctgttaccaagtctattgtggaaggtacatcaacggtcacatgttacaacaccacggcaattctggccatcctttggtgctgtcgtacatcgatctgtccgcttggtgctattattgccaagcatacgtccatcaccaggcgcttctggacgtgaagaatatagctcaccaaaataagtttggcgaagatatgccccaccctcactag

SEQ ID NO: 161400 - protein, 68 aa, Artificial Sequence
  derived and/or modified sequence
MLSRLQELRKEEETLLRLKAALHDQLNRLKMLVHVDNEASINQTTLELSTKSHVTEEEEEEEEEESDS

SEQ ID NO: 161401 - protein, 98 aa, Artificial Sequence
  derived and/or modified sequence
MLSRLQELRKEEETLLRLKAALHDQLNRLKVEELALQSMISSRRGDEMLSSHTVPEQSHDMLVHVDNEASINQTTLELSTKSHVTEEEEEEEEEESDS

SEQ ID NO: 161402 - DNA, 785 bp, Artificial Sequence
  derived and/or modified sequence
gggagtcggcggcgatggcgtcatcaccgagtgccgggccgacagcagcccggaggttggctatgtgaccaggcaacatgctgagccggcttcaggaactgcgcaaggaggaggagacgctgctgcggttgaaggcagccctgcacgaccagctgaaccgcctcaaggttgaagaattagccctccaatcaatgatcagttctagaagaggggatgagatgctgtcttctcacactgtacctgaacagtcacatgatatgttggtgcatgtagacaatgaagcatcaatcaaccaaacaaccctggagctgagcacaaagagtcatgtgacggaagaggaggaggaggaagaggaagaagaatcagattcctaaaggagggggaaagccaggctggtgaaatgcacatctgaacagagacaggcatgggaaggaggcccaaaagcgacatggcaaaccaccgggcaggggactcgctctttgttgcttcccaaacacttagacgccagcagcatgggttggtgtgctgggctggttaaggccgatggtggagcagagccaacctgcaaaatccacttcctcagcatcagatctcttgataaaagcatgaacctgcatgtaaggaaacgagaggacgtggtgttaaaaagaaacaaaaaaacaaaacccaccaggaaggaaaatccaagagtttcaggtctagagcttgtgctgcacttggaaagagcacctggcacctgcccctgagcaacagtggggccagctgcaggcccaaagacctgctcc

SEQ ID NO: 161403 - DNA, 207 bp, Artificial Sequence
  derived and/or modified sequence
atgctgtcccggctgcaagaacttcgcaaggaggaggaaaccctgttgcgcctgaaggctgctctgcacgaccagcttaatagactgaaaatgctagtgcatgtggataacgaggcatcaattaatcaaaccaccctggagctctccacaaagtctcacgtgacagaagaggaagaggaggaggaggaagaagaaagcgactcctag

SEQ ID NO: 161404 - DNA, 297 bp, Artificial Sequence
  derived and/or modified sequence
atgctttcccggcttcaggagctgcgaaaagaggaagaaactctgctgaggctgaaagcagcattacacgaccagctgaaccgcctgaaagtggaggagttggcgttacagtcgatgataagttctagacggggtgatgaaatgctgagttctcatacggtgccggagcagtcacacgatatgttagtccacgtggacaacgaagcgtccattaaccagacaacactggagctatcgactaaatctcacgtcactgaggaggaggaggaggaggaggaggaagagagcgacagctag

SEQ ID NO: 161405 - DNA, 297 bp, Artificial Sequence
  derived and/or modified sequence
atgttatcaagacttcaggagcttagaaaggaagaggagaccctgctgcggttaaaagccgcattgcatgaccaactaaacagactgaaggtggaggaactcgctctccagtctatgatctcctctaggcgaggtgatgaaatgctgagttcacacactgtgcctgagcagtctcacgacatgctggttcacgtggataatgaggcgtcaatcaaccagactaccctggaactctctactaaaagccacgtgactgaggaagaggaggaagaagaggaagaagagtctgatagctag

SEQ ID NO: 161406 - DNA, 207 bp, Artificial Sequence
  derived and/or modified sequence
atgctgagccggctgcaggagctgaggaaggaggaggagaccctgctgcggctgaaggccgccctgcatgaccagctgaaccggctgaagatgctggtgcacgtggacaatgaggccagcatcaaccagaccaccctggagctgagcaccaagagccacgtgacagaggaggaggaggaggaggaggaggaggagagtgacagctag

SEQ ID NO: 161407 - DNA, 297 bp, Artificial Sequence
  derived and/or modified sequence
atgctgagccggctgcaggagctgaggaaggaggaggagaccctgctgcggctgaaggccgccctgcatgaccagctgaaccggctgaaggtggaggagctggccctgcagagcatgatcagcagcagaagaggagatgagatgctgagcagccacacagtgcctgagcagagccatgacatgctggtgcacgtggacaatgaggccagcatcaaccagaccaccctggagctgagcaccaagagccacgtgacagaggaggaggaggaggaggaggaggaggagagtgacagctag

SEQ ID NO: 161408 - DNA, 207 bp, Artificial Sequence
  derived and/or modified sequence
atgctgagccggctgcaggagctgcggaaggaggaggagaccctgctaaggctgaaggccgccttgcatgaccagctgaataggttgaagatgcttgtccatgtagataatgaggcatccatcaaccagaccacgcttgaactaagtactaaatcgcacgtcactgaggaagaggaggaggaggaagaggaagaaagtgactcctag

SEQ ID NO: 161409 - DNA, 297 bp, Artificial Sequence
  derived and/or modified sequence
atgctgagccggctgcaggagctgcggaaggaggaggagaccctgctgcggcttaaggccgctttgcatgaccagctcaatcggctgaaagtggaagagctggcactgcagtctatgatttcctcgcggcgcggggacgaaatgctaagctcacacacagtgcccgaacagagtcatgacatgctggtgcacgtcgataacgaggccagcattaatcagaccaccctcgagttgtcaaccaagtcacacgtcactgaagaagaagaggaagaagaggaggaggaatccgactcatag

SEQ ID NO: 161410 - DNA, 297 bp, Artificial Sequence
  derived and/or modified sequence
atgctgagccggctgcaggagctgcggaaggaggaggagaccctgctgagactcaaggctgccctgcacgatcagctgaatcggctcaaggtggaagaactcgcccttcagagcatgatcagttcccggcgaggggatgagatgctgtccagtcacaccgtgccagaacagtcccatgacatgttggtccacgtagataatgaggcatcgattaatcagacaacattagagctatcgactaaaagccacgtaaccgaagaggaagaggaggaagaagaggaagagtccgacagttag

SEQ ID NO: 161411 - DNA, 599 bp, Artificial Sequence
  derived and/or modified sequence
gcagcccggaggttggctatgtgaccaggcaacatgctgagccggcttcaggaactgcgcaaggaggaggagacgctgctgcggttgaaggcagccctgcacgaccagctgaaccgcctcaagatgttggtgcatgtagacaatgaagcatcaatcaaccaaacaaccctggagctgagcacaaagagtcatgtgacggaagaggaggaggaggaagaggaagaagaatcagattcctaaaggagggggaaagccaggctggtcagttatacaaattgcatttctaaggctcaggctacttctcctcaaggaaatcatcttgccctgggccctgtgatctgcttgaaaggaaagcaagaactataaggaggatgtgtagttgcaaaaatggctccatcggtaactcaagcttcagaatgttatgacatacagaaaatcaaagatgctgtgtcttagcattgagtaatatgggtggtgctgtctgtaatctggtcagattcagttaactgttcagaacaaaatttcctctgaaatactgttgagaaagtctgtcatttgcaaaaagagcagagtttaaatacaagccagtctttccagtc

SEQ ID NO: 161412 - DNA, 989 bp, Artificial Sequence
  derived and/or modified sequence
gcggcgatggcgtcatcaccgagtgccgggccgacagcagcccggaggttggctatgtgaccaggcaacatgctgagccggcttcaggaactgcgcaaggaggaggagacgctgctgcggttgaaggcagccctgcacgaccagctgaaccgcctcaaggttgaagaattagccctccaatcaatgatcagttctagaagaggggatgagatgctgtcttctcacactgtacctgaacagtcacatgatatgttggtgcatgtagacaatgaagcatcaatcaaccaaacaaccctggagctgagcacaaagagtcatgtgacggaagaggaggaggaggaagaggaagaagaatcagattcctaaaggagggggaaagccaggctggtcagttatacaaattgcatttctaaggctcaggctacttctcctcaaggaaatcatcttgccctgggccctgtgatctgcttgaaaggaaagcaagaactataaggaggatgtgtagttgcaaaaatggctccatcggtaactcaagcttcagaatgttatgacatacagaaaatcaaagatgctgtgtcttagcattgagtaatatgggtggtgctgtctgtaatctggtcagattcagttaactgttcagaacaaaatttcctctgaaatactgttgagaaagtctgtcatttgcaaaaagagcagagtttaaatacaagccagtctttccagtcaacaatgcctctttgaagaaaaccaattaaagactgtttgcatgccgctgaacccttgtgagcagttaggacacagtctaggacagaaagatgacaaggggaaggactgagggccgtctgagagcacaagctgtttctacctctcagaggcattgaaatattgcatgctataaactgctttgtgtatctgttaccacctctcacttgagacatcactcactggtaaaatgttttataaataaatttataagtagccatcatgga

SEQ ID NO: 161413 - DNA, 207 bp, Artificial Sequence
  derived and/or modified sequence
atgctatcaagactgcaagaactcaggaaggaagaagagaccctgttgaggcttaaagcagctctacatgatcagctgaaccggttgaaaatgctagtgcatgtcgataacgaagccagcataaaccagactacacttgagctaagcacgaaatcccatgttactgaggaggaagaggaagaagaggaagaagagagcgatagttag

SEQ ID NO: 161414 - DNA, 297 bp, Artificial Sequence
  derived and/or modified sequence
atgctgagccggctgcaagaacttaggaaggaggaagagaccctcctccgtctcaaagcagccctccacgatcagcttaatcgcctcaaggtggaggagctggcactgcagagtatgatctccagccgcaggggggacgagatgctctcctcccatactgttccagagcaatcccacgacatgcttgtgcacgtggacaacgaagcatccatcaaccaaaccacactggaattgtctaccaaaagccatgtgaccgaggaggaagaggaggaagaagaggaggaaagtgattcatag

SEQ ID NO: 161415 - DNA, 297 bp, Artificial Sequence
  derived and/or modified sequence
atgcttagccggctgcaagaacttagaaaggaggaagaaacacttttgagactgaaggcagctttacatgaccagctcaaccgactcaaggttgaggagttggcgctccagtccatgatatcctccagacgaggcgatgagatgctgagctcccacacagtgcccgagcagtcccacgatatgcttgtccacgtggacaatgaggcatctattaaccagactaccctggagctgtccacaaaatcccacgtgactgaagaggaggaagaagaggaagaggaggagtccgattcttag

SEQ ID NO: 161416 - DNA, 207 bp, Artificial Sequence
  derived and/or modified sequence
atgctgagcagactgcaggagctgagaaaggaggaggagaccctgctgagactgaaggccgccctgcacgaccagctgaacagactgaagatgctggtgcacgtggacaacgaggccagcatcaaccagaccaccctggagctgagcaccaagagccacgtgaccgaggaggaggaggaggaggaggaggaggagagcgacagctag

SEQ ID NO: 161417 - DNA, 297 bp, Artificial Sequence
  derived and/or modified sequence
atgctgagcagactgcaggagctgagaaaggaggaggagaccctgctgagactgaaggccgccctgcacgaccagctgaacagactgaaggtggaggagctggccctgcagagcatgatcagcagcagaagaggcgacgagatgctgagcagccacaccgtgcccgagcagagccacgacatgctggtgcacgtggacaacgaggccagcatcaaccagaccaccctggagctgagcaccaagagccacgtgaccgaggaggaggaggaggaggaggaggaggagagcgacagctag

SEQ ID NO: 161418 - protein, 493 aa, Artificial Sequence
  derived and/or modified sequence
MLGKDYMLAIILVNCDDDLWGDHSLEVEAGLPPGWRKIHDAAGTYYWHVPSGSTQWQRPTWELGDAEDPGTGTEGIWGLRPPKGRSFSSLESSLDRSNSLSWYGGESYIQSMEPGAKCFAVRSLGWVEVPEEDLAPGKSSIAVNNCIQQLAQTRSRSQPPDGAWGEGQNMLMILKKDAMSLVNPLDHSLIHCQPLVHIRVWGVGSSKGRDSPISAPARDFAFVASDKDSCMLKCHVFCCDVPAKAIASALHGLCAQILSERVEVSGDASCCSPDPISPEDLPRQVELLDAVSQAAQKYEALYMGTLPVTKAMGMDVLNEAIGTLTARGDRNAWVPTMLSVSDSLMTAHPIQAEASTEEEPLWQCPVRLVTFIGVGRDPHTFGLIADLGRQSFQCAAFWCQPHAGGLSEAVQAACMVQYQKCLVASAARGKAWGAQARARLRLKRTSSMDSPGGPLPLPLLKGGVGGAGATPRKRGVFSFLDAFRLKPSLLHMP

SEQ ID NO: 161419 - protein, 245 aa, Artificial Sequence
  derived and/or modified sequence
MLGKDYMLAIILVNCDDDLWGDHSLEVEAGLPPGWRKIHDAAGTYYWHVPSGSTQWQRPTWELGDAEDPGTGTEGIWGLRPPKGRSFSSLESSLDRSNSLSWYGGESYIQSMEPGAKCFAVRSLGWVEVPEEDLAPGKSSIAVNNCIQQLAQTRSRSQPPDGAWGEGQNMLMILKKDAMSLVNPLDHSLIHCQPLVHIRVWGVGSSKGRSSDVDPGLLPLPGPALVGEGGPSSAGTVWGESERLG

SEQ ID NO: 161420 - DNA, 1482 bp, Artificial Sequence
  derived and/or modified sequence
atgctgggtaaggattatatgctcgcaattatcctggtcaactgcgatgatgacctgtggggagatcatagcttagaagtcgaggctggacttcctcccgggtggcggaagattcatgatgccgcaggtacctactattggcatgtcccctctggctcaactcaatggcagagacctacctgggagctgggcgacgccgaagacccaggcacaggcaccgagggaatttggggactgcgcccccccaagggtaggtcctttagttccctggagagcagcttggatcgaagcaattccctttcctggtacggaggggagagctacattcagtctatggagcctggagcaaaatgctttgccgtgcgctctctaggatgggtggaagtgcccgaggaggacctggctcctgggaaatcctctattgccgtgaacaattgtatccagcagctggcccagactaggagccggagtcagccgcccgatggcgcctggggtgagggccagaacatgcttatgatccttaaaaaagatgctatgagcctggtcaatccactggaccattccctgatacattgccagccgctggtccatattagggtctggggggtagggtcttctaagggccgcgactcacctataagtgctcccgcgagggattttgcgtttgtagcctctgacaaggactcgtgcatgctgaagtgtcacgtgttctgctgcgacgtacccgctaaagctatagcctccgccttgcatggactctgcgcacagatcctctcagaaagagttgaggtttccggagacgctagctgttgctcacccgaccctatttctccagaagacttgccacgtcaggtggaactactcgatgctgtgtctcaggctgcccagaaatacgaggcactgtacatgggcaccctgcctgttacaaaggcgatgggaatggacgtgcttaacgaggccattggaacactgacagcccgcggagatagaaacgcgtgggtacccacaatgctctctgttagtgacagcctgatgactgcccatccgattcaggcggaggcaagcacagaggaggagccactgtggcagtgcccagttcggctggtcacttttatcggtgtaggtagagatcctcacaccttcggactaattgctgatctaggtcgccaaagcttccagtgcgctgccttctggtgtcagccacacgctggcggcctgtctgaagccgtccaggccgcctgcatggtgcaatatcagaagtgtctggtcgccagcgcggcaagaggtaaggcctggggagcccaggctcgggctaggctccggctgaaacggaccagctctatggattccccgggaggcccgctccctctgcccctgcttaaaggtggcgtgggtggagcaggggctacaccccggaaaagaggagtgtttagcttccttgatgcctttcgcctcaagcctagccttctgcacatgccatag

SEQ ID NO: 161421 - DNA, 738 bp, Artificial Sequence
  derived and/or modified sequence
atgctggggaaggactacatgttggccatcatcctagtcaactgtgatgacgacctctggggagatcacagcctcgaagtggaggctggcctcccacccggttggcgcaagatccatgatgctgccggcacctattactggcatgtacccagcggcagtacccaatggcagagaccgacatgggagctcggcgatgccgaggaccccggcaccggcaccgaaggaatttgggggctaaggcccccaaagggaagatcattttctagcctcgagtcatcactagacagatcgaatagcttaagctggtacggaggtgaatcctacatccagagcatggaacccggggccaagtgtttcgccgtgcgctctctgggatgggtggaagtgcccgaagaggaccttgctccaggaaaaagctcgattgccgtgaacaattgcattcagcagctggcccaaacaagatcacgctctcagcccccagacggtgcatggggggaaggacaaaacatgctgatgatactgaagaaagacgcgatgagtctcgtaaatccgctcgatcacagtttgatccattgccagccgctggtccacatcagagtgtggggcgttgggtctagtaaggggagaagcagcgatgtggatccagggctccttcccttgcccggccctgctctggtaggggagggaggcccaagtagcgccggaacggtgtggggcgagtctgagcgtctcggatag

SEQ ID NO: 161422 - DNA, 1482 bp, Artificial Sequence
  derived and/or modified sequence
atgctgggcaaggactacatgctggccatcatcctggtgaactgtgatgatgacctgtggggagaccacagcctggaggtggaggccggcctgcccccaggctggaggaagatccatgatgctgctggcacctactactggcacgtgcccagcggcagcacccagtggcagaggcccacctgggagctgggagatgctgaagatcctggcactggaacagagggcatctggggcctgcggccccccaagggccgctccttcagcagcctggagagcagcctggacaggagcaacagcctgtcctggtatggaggagagagctacatccagagcatggagcccggggccaagtgctttgctgtgcgcagcctgggctgggtggaggtgcctgaggaggacctggcccctgggaagagcagcattgctgtgaacaactgcatccagcagctggcccagaccaggagccgcagccagcccccagatggagcctggggcgagggccagaacatgctgatgatcctgaagaaggatgccatgagcctggtgaaccccctggaccacagcctcatccactgccagcccctggtgcacatccgggtgtggggcgtgggcagcagcaagggccgggacagccccatcagcgccccagcccgggactttgcctttgtggccagtgacaaggacagctgcatgctgaagtgccacgtgttctgctgtgatgtgcctgccaaggccatcgccagcgccctgcacggcctgtgtgcccagatcctgtctgagcgggtggaggtgtctggagatgccagctgctgcagcccagaccccatcagccctgaggacctgccccggcaggtggagctgctggatgctgtgtcccaggccgcccagaagtatgaggccctgtacatgggcaccctgcctgtgaccaaggccatgggcatggatgtgctgaatgaggccatcggcaccctgacagcccggggggacagaaatgcctgggtgcccaccatgctgtctgtgtctgacagcctgatgacagcccaccccatccaggccgaggccagcacagaggaggagcccctgtggcagtgccctgtgcggctggtgaccttcatcggcgtgggccgggacccccacaccttcggcctgattgctgacctgggccggcagagcttccagtgtgccgccttctggtgccagccccatgctgggggcctgtctgaggccgtgcaggccgcctgcatggtgcagtaccagaagtgcctggtggccagcgctgcccggggcaaggcctggggcgcccaggcccgggcccggctgcggctgaagaggaccagctccatggacagccctgggggccccctgcccctgcccctgctgaagggcggcgtgggcggggccggggccacccccaggaagaggggcgtcttctccttcctggatgccttccggctgaagcccagcctgctgcacatgccctag

SEQ ID NO: 161423 - DNA, 738 bp, Artificial Sequence
  derived and/or modified sequence
atgctgggcaaggactacatgctggccatcatcctggtgaactgtgatgatgacctgtggggagaccacagcctggaggtggaggccggcctgcccccaggctggaggaagatccatgatgctgctggcacctactactggcacgtgcccagcggcagcacccagtggcagaggcccacctgggagctgggagatgctgaagatcctggcactggaacagagggcatctggggcctgcggccccccaagggccgctccttcagcagcctggagagcagcctggacaggagcaacagcctgtcctggtatggaggagagagctacatccagagcatggagcccggggccaagtgctttgctgtgcgcagcctgggctgggtggaggtgcctgaggaggacctggcccctgggaagagcagcattgctgtgaacaactgcatccagcagctggcccagaccaggagccgcagccagcccccagatggagcctggggcgagggccagaacatgctgatgatcctgaagaaggatgccatgagcctggtgaaccccctggaccacagcctcatccactgccagcccctggtgcacatccgggtgtggggcgtgggcagcagcaagggccgcagcagtgatgtggaccccggcctgctgcccctgcccggccctgccctggtgggggagggcggccccagcagcgctggcaccgtgtggggcgagagcgagcggctgggctag

SEQ ID NO: 161424 - DNA, 1482 bp, Artificial Sequence
  derived and/or modified sequence
atgctgggcaaggactacatgctggccatcatcctggtgaactgcgatgatgacttgtggggtgatcacagccttgaagtggaagctgggctgccgcccggctggcggaaaatccatgacgcagcagggacatattactggcacgtgccttcagggtctacccagtggcagcgcccaacctgggagttgggcgatgccgaggatcctggcacagggacggagggcatttgggggctacggccaccaaagggcagatcattcagcagtttggagtcatcattagaccgatcaaatagcctgagttggtacggaggggagtcctatatccaatctatggagccgggggctaagtgctttgctgtcagatccctgggatgggtggaggtgccggaggaggacttagcacctgggaaatcatcaattgcggtgaacaattgtatccagcaactcgcgcagactaggtcacggagccaacccccagatggagcatggggagagggccagaatatgctcatgattctgaaaaaagacgcgatgtccctggtcaaccccttggaccacagtttgatacactgccagcctctcgtgcacattcgcgtgtggggggtgggctcctctaaaggccgggacagccctatatccgcccctgcacgggactttgcattcgtggcgtccgataaagacagctgtatgcttaagtgtcatgtgttttgctgtgatgtgcctgctaaggccatcgcttcggcgctccatggactgtgcgctcagatcctgtctgagcgagttgaggtctctggggatgcatcttgctgctcaccagatccaatcagccccgaggacctccctagacaggtcgagctgctggacgctgtttctcaggccgcccaaaagtacgaggccctgtacatgggcactctcccagtgaccaaggctatgggcatggacgtgctgaatgaagctatcggaactcttacagcgcgtggcgacagaaatgcctgggtaccaaccatgctttccgtgagtgattccctgatgaccgcccaccccattcaggccgaggcctccactgaagaggaaccgctgtggcaatgtccagtgcgcctcgtcactttcattggagtcggacgcgatccccatacattcggattgattgcggatctgggcaggcaatcgtttcagtgcgctgccttttggtgtcagccgcacgctggcggattatccgaggccgtccaggctgcttgcatggtgcagtaccagaaatgccttgtcgctagtgccgctaggggaaaagcttggggagcccaggcaagagctaggctgcgactgaagcgcactagttctatggacagtccggggggccctctgccattgcccctgctgaaagggggcgtcgggggagccggagctacgccacggaagagaggagtgttctcatttctagacgcctttaggctcaagccttctcttttacatatgccttag

SEQ ID NO: 161425 - DNA, 738 bp, Artificial Sequence
  derived and/or modified sequence
atgctgggcaaggactacatgctggccatcatcctggtgaactgcgacgatgatttatggggtgaccactcacttgaggtagaggcggggctgcctccaggctggcgcaaaattcatgatgccgctgggacctattactggcatgtgccatccggctcaactcagtggcagcgcccaacgtgggagttaggagacgcagaggaccccggaaccggcactgaggggatatggggcttaaggcctcccaagggcaggtccttttcctcccttgagagctcattagaccgatccaatagcttgagttggtatgggggcgagtcatacatacagagcatggagccaggcgcaaaatgcttcgccgtaaggagtctggggtgggtggaggtcccagaggaggatctggcccctggaaaaagcagcatcgcggtcaacaattgcattcagcaattggctcaaacgagatccagaagtcagccccccgatggagcctggggcgagggtcagaacatgctaatgatactcaagaaggatgccatgtctctggtcaatcccctcgatcactcactgattcactgccagccactggtccatatccgcgtctggggagtaggttcctctaaggggaggtctagtgacgtggatcccggcctgctgccactccccggcccagccctggtcggcgaaggcggaccctcaagtgcgggcaccgtttggggggaaagtgaacgactaggctag

SEQ ID NO: 161426 - DNA, 1810 bp, Artificial Sequence
  derived and/or modified sequence
ggagcagccggggttatgctgggcaaggattacatgctggccatcattctggtcaactgcgatgatgacttgtggggggaccacagtctggaggtggaggctggcctgcctcctggctggaggaagatccacgatgctgcaggtacttactactggcatgtacccagcggtagcacccagtggcagcgcccaacctgggaactaggagatgcagaggacccaggcacgggaacggaggggatctggggactgcggccccccaaagggagatccttctccagcctggagagttcactggaccggagtaactctctgtcctggtatggtggggaatcctacatccagagcatggagccaggggctaagtgctttgcagtccgctctctgggctgggtagaggtacctgaagaggacctggcaccggggaagagcagtattgcagtcaataactgtatccagcagctggcccagacccgcagccggagccagcctccagatggtgcctggggtgagggccagaacatgctgatgatcctgaagaaggatgccatgagcctagtgaatcccctggaccacagtctgatccactgccagcctctggtgcacatccgtgtgtggggcgtggggagctccaagggccgtgacagccccatctctgcccctgctagggacttcgcttttgtggcaagtgacaaagatagctgtatgctcaagtgccatgtgttttgctgtgatgtccctgccaaggccattgccagtgccctacatgggctttgtgcccagatcttgtcagagcgagtagaggtcagtggtgatgcctcttgctgctccccagaccccatctctcctgaagacctgccacggcaagtggagctgctggatgcggtaagccaagctgctcagaagtacgaggcactgtatatggggacactgccagtcaccaaggccatgggcatggatgtgctgaacgaggccattggtaccctcaccgccaggggggaccggaatgcctgggtccccaccatgctcagtgtgtctgactctctcatgactgcacaccccattcaggcagaggccagtacagaggaggagccattgtggcagtgccctgtgcgccttgtgacatttattggtgttggccgcgacccacacacctttggcctcatcgctgacctgggccgtcagagcttccagtgcgcagccttctggtgccagccccatgcagggggactctctgaagctgtgcaggctgcctgtatggttcagtaccagaagtgtcttgtggcctctgcagctcgaggcaaggcctggggtgcccaggcccgtgcccgcctgcggctcaagcggaccagctccatggattccccaggaggtcccctgcccctccccctgctcaaaggaggggttggcggtgcaggggcaacccctcgaaagcggggtgtcttctcttttcttgatgccttccggctgaaaccctctctgctccatatgccctaaacttatctgggaaggctggggaagtaggctctgggtccatgcctaactctgtaccgttttattcctcaaggcctatagcctgtcactccttgaagccttctctgcctgtccctccgatccttgtccaccgtctatttattgcccaatttattgtttatacggatgactgggaggcactgcaccacaacgtaggaccctggctcccctttccttgggtccttgtgttccttgcccctgtccaaccctggacagttggctctacctcagtaacactttatagcaaaatcagtgcaaataaaaatccctcagtgac

SEQ ID NO: 161427 - DNA, 2032 bp, Artificial Sequence
  derived and/or modified sequence
gtgcggcgccagctggccccgcagcctgcggcgcagagaggctgggcttgcaggcgcagtagctccagaggtcgcgctgggctgagagtgcgggccggcagaggctggcggggagcagccggggttatgctgggcaaggattacatgctggccatcattctggtcaactgcgatgatgacttgtggggggaccacagtctggaggtggaggctggcctgcctcctggctggaggaagatccacgatgctgcaggtacttactactggcatgtacccagcggtagcacccagtggcagcgcccaacctgggaactaggagatgcagaggacccaggcacgtgctttgcagtccgctctctgggctgggtagaggtacctgaagaggacctggcaccggggaagagcagtattgcagtcaataactgtatccagcagctggcccagacccgcagccggagccagcctccagatggtgcctggggtgagggccagaacatgctgatgatcctgaagaaggatgccatgagcctagtgaatcccctggaccacagtctgatccactgccagcctctggtgcacatccgtgtgtggggcgtggggagctccaagggccggtgaggatgcctacatcccccaagcaagagctacttctccctcccggctgcaggctgtgatccccactgatgctgatccccagtacttgaacccctggacacagatcctctgatgtggacccaggactgcttcccctgcctggtccagccctggttggggagggtgggcccagctcagcagggacagtttggggagagtccgagaggctgggctgattcccttctgtgctcccacatgcttccggaacagtgacaggtgagtgaaaaccaggtatcctgagccccatccctgatgtccctactccatccctgctatatccctagcctgactttccagcctcctgcaggctcctgcctctaaccagcttctaccccagccccatctctgcccctgctagggacttcgcttttgtggcaagtgacaaagatagctgtatgctcaagtgccatgtgttttgctgtgatgtccctgccaaggccattgccagtgccctacatgggctttgtgcccagatcttgtcagagcgagtagaggtcagtggtgatgcctcttgctgctccccagaccccatctctcctgaagacctgccacggcaagtggagctgctggatgcggtaagccaagctgctcagaagtacgaggcactgtatatggggacactgccagtcaccaaggccatgggcatggatgtgctgaacgaggccattggtaccctcaccgccaggggggaccggaatgcctgggtccccaccatgctcagtgtgtctgactctctcatgactgcacaccccattcaggcagaggccagtacagaggaggagccattgtggcagtgccctgtgcgccttgtgacatttattggtgttggccgcgacccacacacctttggcctcatcgctgacctgggccgtcagagcttccagtgcgcagccttctggtgccagccccatgcagggggactctctgaagctgtgcaggctgcctgtatggttcagtaccagaagtgtcttgtggcctctgcagctcgaggcaaggcctggggtgcccaggcccgtgcccgcctgcggctcaagcggaccagctccatggattccccaggaggtcccctgcccctccccctgctcaaaggaggggttggcggtgcaggggcaacccctcgaaagcggggtgtcttctcttttcttgatgccttccggctgaaaccctctctgctccatatgccctaaacttatctgggaaggctggggaagtaggctctgggtccatgcctaactctgtaccgttttattcctcaaggcctatagcctgtcactccttgaagccttctctgcctgtccctccgatccttgtccaccgtctatttattgcccaatttattgtttatacggatgactgggaggcactgcaccacaacgta

SEQ ID NO: 161428 - DNA, 2020 bp, Artificial Sequence
  derived and/or modified sequence
ggctgggcttgcaggcgcagtagctccagaggtcgcgctgggctgagagtgcgggccggcagaggctggcggggagcagccggggttatgctgggcaaggattacatgctggccatcattctggtcaactgcgatgatgacttgtggggggaccacagtctggaggtggaggctggcctgcctcctggctggaggaagatccacgatgctgcaggtacttactactggcatgtacccagcggtagcacccagtggcagcgcccaacctgggaactaggagatgcagaggacccaggcacgggaacggaggggatctggggactgcggccccccaaagggagatccttctccagcctggagagttcactggaccggagtaactctctgtcctggtatggtggggaatcctacatccagagcatggagccaggggctaagtgctttgcagtccgctctctgggctgggtagaggtacctgaagaggacctggcaccggggaagagcagtattgcagtcaataactgtatccagcagctggcccagacccgcagccggagccagcctccagatggtgcctggggtgagggccagaacatgctgatgatcctgaagaaggatgccatgagcctagtgaatcccctggaccacagtctgatccactgccagcctctggctgtgatccccactgatgctgatccccagtacttgaacccctggacacagatcctctgatgtggacccaggactgcttcccctgcctggtccagccctggttggggagggtgggcccagctcagcagggacagtttggggagagtccgagaggctgggctgattcccttctgtgctcccacatgcttccggaacagtgacagggacttcgcttttgtggcaagtgacaaagatagctgtatgctcaagtgccatgtgttttgctgtgatgtccctgccaaggccattgccagtgccctacatgggctttgtgcccagatcttgtcagagcgagtagaggtcagtggtgatgcctcttgctgctccccagaccccatctctcctgaagacctgccacggcaagtggagctgctggatgcggtaagccaagctgctcagaagtacgaggcactgtatatggggacactgccagtcaccaaggccatgggcatggatgtgctgaacgaggccattggtaccctcaccgccaggggggaccggaatgcctgggtccccaccatgctcagtgtgtctgactctctcatgactgcacaccccattcaggcagaggccagtacagaggaggagccattgtggcagtgccctgtgcgccttgtgacatttattggtgttggccgcgacccacacacctttggcctcatcgctgacctgggccgtcagagcttccagtgcgcagccttctggtgccagccccatgcagggggactctctgaagctgtgcaggctgcctgtatggttcagtaccagaagtgtcttgtggcctctgcagctcgaggcaaggcctggggtgcccaggcccgtgcccgcctgcggctcaagcggaccagctccatggattccccaggaggtcccctgcccctccccctgctcaaaggaggggttggcggtgcaggggcaacccctcgaaagcggggtgtcttctcttttcttgatgccttccggctgaaaccctctctgctccatatgccctaaacttatctgggaaggctggggaagtaggctctgggtccatgcctaactctgtaccgttttattcctcaaggcctatagcctgtcactccttgaagccttctctgcctgtccctccgatccttgtccaccgtctatttattgcccaatttattgtttatacggatgactgggaggcactgcaccacaacgtaggaccctggctcccctttccttgggtccttgtgttccttgcccctgtccaaccctggacagttggctctacctcagtaacactttatagcaaaatcagtgcaaataaaaatccctcagtgacctc

SEQ ID NO: 161429 - DNA, 1482 bp, Artificial Sequence
  derived and/or modified sequence
atgctgggcaaagattatatgttagccattatcctggtgaattgtgatgacgatctgtggggcgatcattccctcgaggtggaggctgggctgcctcctggatggcgcaagatccacgatgctgcaggaacctattattggcatgtcccctcggggagcacccagtggcagcgccctacttgggagctgggggacgcagaggacccagggacaggaactgagggcatctggggcctacggcctcccaaaggccgttctttctcctctttagagagctccttagatcggtccaacagcttgtcatggtatggcggagagtcctacatccagtccatggaacctggagcaaagtgctttgcagtacggagcttgggctgggtagaagtccccgaggaagatctggccccaggcaaatcaagcatcgccgtcaataattgcatccagcaattggcccagacccggagtcgcagccagccaccagacggggcatggggagagggccagaatatgctcatgattcttaagaaggatgccatgagtctagtcaaccctctcgatcactcactgatccactgccagccccttgtgcacatcagggtgtggggtgtcggttctagtaagggacgggactcacccattagtgctcctgccagagattttgcttttgtggcctccgacaaggactcttgcatgttaaaatgtcacgtgttttgttgcgacgtccctgccaaggctatcgcgtccgcccttcacgggctgtgcgctcaaatcctgtcagaaagagtcgaagtcagtggagatgccagctgctgctctccagatccaattagccccgaagacttacctcggcaagttgaattgcttgatgccgtgtctcaggctgcccagaaatatgaagccctgtacatgggaacactccccgtcacgaaggcgatggggatggatgtattgaacgaggctattggcactctgaccgcccgaggagaccgtaatgcttgggtgcccaccatgctctccgtgagtgatagcctaatgacagcccaccccatccaggcagaggcatccacggaggaagagccactgtggcaatgtccggttcgtttggtgacgttcattggggttggcagagacccccacaccttcggcctgatcgctgatctaggccgacagtcattccagtgtgccgctttctggtgtcagcctcacgcgggagggctgtctgaagccgtgcaggctgcctgcatggtgcagtatcagaaatgcctcgtggctagcgcagctcgaggcaaagcttggggcgcacaggctagggcaagactccgcctgaagaggactagctcgatggactcgcctggcggacccctccctcttcctttgctcaaaggcggagtcggcggtgctggcgctacaccacgtaagcgtggtgtgttctcttttctggacgcttttcgcctgaagccttccctcctgcatatgccgtag

SEQ ID NO: 161430 - DNA, 738 bp, Artificial Sequence
  derived and/or modified sequence
atgctcggcaaggattacatgctggcgatcatcctggtaaactgtgacgatgatctgtggggagatcacagcttagaggtagaggccggtctgccgcctggctggcgaaaaattcacgatgccgctggcacatactattggcacgtgccatcgggctccacccagtggcagagaccgacatgggagctaggcgatgccgaagaccccggtactggaactgaagggatctggggacttcgcccacccaaagggagatccttctcatcacttgagagctcactggatcgttcaaactctctctcttggtacggtggagagtcatacatccaatcgatggaacctggagccaagtgttttgcagtcagaagcctgggttgggtcgaggtgccagaagaagacctagctccaggaaaatctagtattgcggtgaataactgcattcagcaactcgcccaaaccaggagccggtcacagcccccagacggggcatggggagagggccaaaacatgctgatgatcttaaagaaggacgccatgtccctggtcaatcctttggaccattcccttatccattgccagccactggtgcatatacgagtgtggggggtcggtagttcgaaaggtaggagctctgatgtggaccctggactgctgccattgcccggtccagcgctcgtgggcgaggggggaccctcgtcagcaggtacggtgtggggggagagcgaacgtctcggctag

SEQ ID NO: 161431 - DNA, 1482 bp, Artificial Sequence
  derived and/or modified sequence
atgctgggcaaggactacatgctggccatcatcctggtgaactgcgacgacgacctgtggggcgaccacagcctggaggtggaggccggcctgccccccggctggagaaagatccacgacgccgccggcacctactactggcacgtgcccagcggcagcacccagtggcagagacccacctgggagctgggcgacgccgaggaccccggcaccggcaccgagggcatctggggcctgagaccccccaagggcagaagcttcagcagcctggagagcagcctggacagaagcaacagcctgagctggtacggcggcgagagctacatccagagcatggagcccggcgccaagtgcttcgccgtgagaagcctgggctgggtggaggtgcccgaggaggacctggcccccggcaagagcagcatcgccgtgaacaactgcatccagcagctggcccagaccagaagcagaagccagccccccgacggcgcctggggcgagggccagaacatgctgatgatcctgaagaaggacgccatgagcctggtgaaccccctggaccacagcctgatccactgccagcccctggtgcacatcagagtgtggggcgtgggcagcagcaagggcagagacagccccatcagcgcccccgccagagacttcgccttcgtggccagcgacaaggacagctgcatgctgaagtgccacgtgttctgctgcgacgtgcccgccaaggccatcgccagcgccctgcacggcctgtgcgcccagatcctgagcgagagagtggaggtgagcggcgacgccagctgctgcagccccgaccccatcagccccgaggacctgcccagacaggtggagctgctggacgccgtgagccaggccgcccagaagtacgaggccctgtacatgggcaccctgcccgtgaccaaggccatgggcatggacgtgctgaacgaggccatcggcaccctgaccgccagaggcgacagaaacgcctgggtgcccaccatgctgagcgtgagcgacagcctgatgaccgcccaccccatccaggccgaggccagcaccgaggaggagcccctgtggcagtgccccgtgagactggtgaccttcatcggcgtgggcagagacccccacaccttcggcctgatcgccgacctgggcagacagagcttccagtgcgccgccttctggtgccagccccacgccggcggcctgagcgaggccgtgcaggccgcctgcatggtgcagtaccagaagtgcctggtggccagcgccgccagaggcaaggcctggggcgcccaggccagagccagactgagactgaagagaaccagcagcatggacagccccggcggccccctgcccctgcccctgctgaagggcggcgtgggcggcgccggcgccacccccagaaagagaggcgtgttcagcttcctggacgccttcagactgaagcccagcctgctgcacatgccctag

SEQ ID NO: 161432 - DNA, 738 bp, Artificial Sequence
  derived and/or modified sequence
atgctgggcaaggactacatgctggccatcatcctggtgaactgcgacgacgacctgtggggcgaccacagcctggaggtggaggccggcctgccccccggctggagaaagatccacgacgccgccggcacctactactggcacgtgcccagcggcagcacccagtggcagagacccacctgggagctgggcgacgccgaggaccccggcaccggcaccgagggcatctggggcctgagaccccccaagggcagaagcttcagcagcctggagagcagcctggacagaagcaacagcctgagctggtacggcggcgagagctacatccagagcatggagcccggcgccaagtgcttcgccgtgagaagcctgggctgggtggaggtgcccgaggaggacctggcccccggcaagagcagcatcgccgtgaacaactgcatccagcagctggcccagaccagaagcagaagccagccccccgacggcgcctggggcgagggccagaacatgctgatgatcctgaagaaggacgccatgagcctggtgaaccccctggaccacagcctgatccactgccagcccctggtgcacatcagagtgtggggcgtgggcagcagcaagggcagaagcagcgacgtggaccccggcctgctgcccctgcccggccccgccctggtgggcgagggcggccccagcagcgccggcaccgtgtggggcgagagcgagagactgggctag

SEQ ID NO: 161433 - protein, 614 aa, Artificial Sequence
  derived and/or modified sequence
MTFLISYWGEQIGQKIRKITDCFHCHVFPFLQQEEARLGALQQLQQQSQELQEVLGETERFLSQVLGRVLQLLPPGQVQVHKMKAVYLALNQCSVSTTHKCLIAEAWCSVRDLPALQEALRDSSMEEGVSAVAHRIPCRDMPPTLIRTNRFTASFQGIVDAYGVGRYQEVNPAPYTIITFPFLFAVMFGDVGHGLLMFLFALAMVLAENRPAVKAAQNEIWQTFFRGRYLLLLMGLFSIYTGFIYNECFSRATSIFPSGWSVAAMANQSGWSDAFLAQHTMLTLDPNVTGVFLGPYPFGIDPIWSLAANHLSFLNSFKMKMSVILGVVHMAFGVVLGVFNHVHFGQRHRLLLETLPELTFLLGLFGYLVFLVIYKWLCVWAARAASAPSILIHFINMFLFSHSPSNRLLYPRQEVVQATLVVLALAMVPILLLGTPLHLLHRHRRRLRRRPADRQEENKAGLLDLPDASVNGWSSDEEKAGGLDDEEEAELVPSEVLMHQAIHTIEFCLGCVSNTASYLRLWALSLAHAQLSEVLWAMVMRIGLGLGREVGVAAVVLVPIFAAFAVMTVAILLVMEGLSAFLHALRLHWVEFQNKFYSGTGYKLSPFTFAATDD

SEQ ID NO: 161434 - protein, 123 aa, Artificial Sequence
  derived and/or modified sequence
MAEPSAATQSHSISSSSFGAEPSAPGGGGSPGACPALGTKSCSSSCAVHDLIFWRDVKKTGFVFGTTLIMLLSLAAFSVISVVSYLILALLSVTISFRIYKSVIQAVQKSEEGHPFNWLSSCG

SEQ ID NO: 161435 - protein, 236 aa, Artificial Sequence
  derived and/or modified sequence
MAEPSAATQSHSISSSSFGAEPSAPGGGGSPGACPALGTKSCSSSCAVHDLIFWRDVKKTGFVFGTTLIMLLSLAAFSVISVVSYLILALLSVTISFRIYKSVIQAVQKSEEGHPFKAYLDVDITLSSEAFHNYMNAAMVHINRALKLIIRLFLVEDLVDSLKLAVFMWLMTYVGAVFNGITLLILAELLIFSVPIVYEKYKTQIDHYVGIARDQTKSIVEKIQAKLPGIAKKKAE

SEQ ID NO: 161436 - DNA, 768 bp, Artificial Sequence
  derived and/or modified sequence
atggctgaacccagcgctgccacacaatcacacagtatcagttcttccagtttcggcgccgaaccaagcgcccccggcggcggcgggtccccaggagcttgcccggcattgggcactaagagctgtagttcgagttgtgctgacagttttgtgtcaagtagttcaagccaacctgtgagcttatttagtacaagccaggtgcacgatcttatcttttggagggacgtcaaaaaaactggctttgtcttcggaaccactcttatcatgctactgtcattggcagccttctctgtgataagcgtcgttagctatttaatactggcgctgctgtccgttaccatcagttttaggatttacaaaagcgtgatccaggctgtacaaaaatcagaagaagggcaccctttcaaggcctatctggatgtagatattacactctctagcgaggctttccataattatatgaacgctgccatggttcatattaaccgagctctaaagcttattatcaggttgttcctggtggaggacttggtggactccctaaaactagccgtcttcatgtggctcatgacatacgtcggcgcggtattcaacggtatcacgctcttgattctggccgagctcctcatcttcagtgtcccaatcgtctacgaaaaatataaaacccagatcgatcactatgtgggcatagcacgagaccagaccaagagcatcgttgaaaaaattcaggcaaagctacctggcattgctaagaagaaagccgaatag

SEQ ID NO: 161437 - DNA, 711 bp, Artificial Sequence
  derived and/or modified sequence
atggccgagcctagtgccgccacccagagccactccatttcttcctctagcttcggggctgaacctagcgccccgggtggcgggggcagccccggggcttgcccagcgctaggcacaaaatcatgcagcagctcttgtgcggtgcatgacctgatcttttggcgggacgtgaagaagaccggcttcgtattcggaacaaccctgattatgttgctgtccttagctgcattctcagtcatcagtgttgtctcatacctgattctagctctgctgagtgtgactatcagctttaggatttacaagagtgtgatacaggccgttcaaaaatccgaggagggacacccatttaaggcttatctcgacgtggacattactctaagttctgaagcttttcacaactatatgaatgccgcgatggtgcatattaacagggccctgaagctgatcatccgcctgtttctggtggaagacctggtggatagccttaaactcgcagtgttcatgtggctaatgacttacgtgggcgcagtgttcaacggtatcactttgctcatcctagctgagctcttgatcttcagtgtgcctattgtgtacgagaagtacaagacccagattgatcactacgtcggtattgcccgagaccagacgaaatcgatcgttgaaaagatccaagcaaagctccccgggatcgccaaaaagaaagctgagtag

SEQ ID NO: 161438 - DNA, 768 bp, Artificial Sequence
  derived and/or modified sequence
atggccgagcccagcgctgccacccagagccacagcatcagcagcagcagctttggagctgagcccagcgcccctgggggcggcggcagccctggggcctgcccagccctgggcaccaagagctgcagcagcagctgtgccgacagctttgtgagcagcagcagcagccagcctgtgtccctcttcagcaccagccaggtgcatgacctgatcttctggagagatgtgaagaagacaggctttgtgtttggcaccaccctcatcatgctgctgagcctggccgccttcagcgtcatctctgtggtgtcctacctgatcctggccctgctgtctgtgaccatctccttccgcatctacaagagcgtcatccaggccgtgcagaagtctgaggagggccaccccttcaaggcctacctggatgtggacatcaccctgagcagcgaggccttccacaactacatgaatgctgccatggtgcacatcaacagagccctgaagctgatcatccgcctcttcctggtggaggacctggtggacagcctgaagctggccgtgttcatgtggctgatgacctacgtgggcgctgtgttcaacggcatcaccctgctgatcctggccgagctgctgatcttctctgtgcccatcgtgtatgagaagtacaagacccagattgaccactacgtgggcatcgcccgggaccagaccaagagcatcgtggagaagatccaggccaagctgcccggcatcgccaagaagaaggccgagtag

SEQ ID NO: 161439 - DNA, 711 bp, Artificial Sequence
  derived and/or modified sequence
atggccgagcccagcgctgccacccagagccacagcatcagcagcagcagctttggagctgagcccagcgcccctgggggcggcggcagccctggggcctgcccagccctgggcaccaagagctgcagcagcagctgtgctgtgcatgacctgatcttctggagagatgtgaagaagacaggctttgtgtttggcaccaccctcatcatgctgctgagcctggccgccttcagcgtcatctctgtggtgtcctacctgatcctggccctgctgtctgtgaccatctccttccgcatctacaagagcgtcatccaggccgtgcagaagtctgaggagggccaccccttcaaggcctacctggatgtggacatcaccctgagcagcgaggccttccacaactacatgaatgctgccatggtgcacatcaacagagccctgaagctgatcatccgcctcttcctggtggaggacctggtggacagcctgaagctggccgtgttcatgtggctgatgacctacgtgggcgctgtgttcaacggcatcaccctgctgatcctggccgagctgctgatcttctctgtgcccatcgtgtatgagaagtacaagacccagattgaccactacgtgggcatcgcccgggaccagaccaagagcatcgtggagaagatccaggccaagctgcccggcatcgccaagaagaaggccgagtag

SEQ ID NO: 161440 - DNA, 768 bp, Artificial Sequence
  derived and/or modified sequence
atggccgagcccagcgccgccacccagagccacagcatcagcagcagctcattcggagctgaacctagcgcacccggaggcggaggaagccctggcgcctgtccagcactgggaaccaaatcttgctccagctcctgcgcagatagtttcgtcagcagctcctctagccagccagtgagtctgttcagtacaagccaggttcatgatttaatcttttggagagatgtgaaaaaaacaggattcgtgttcggaacaactttaataatgctcctgagcttggctgctttctccgtgatatcagtggtgtcctacctaattttagccctcttgtccgttacaataagctttcgaatctataaatcagtgatacaggccgttcagaaaagtgaggaaggccatccgtttaaggcgtacctggacgtggacatcaccttaagtagcgaagcatttcacaactatatgaatgctgcaatggtgcatattaaccgggcactgaaactcataatcagattattcctggtggaggacctcgtggattctcttaagttagccgtgtttatgtggctgatgacatatgtgggagctgtgtttaacgggataacactgctgattctggccgagctgctcatttttagtgttccgatcgtgtacgaaaagtataagacccagatcgaccactacgtgggtattgcccgggaccagacaaagagtattgtggaaaaaattcaagccaaactccccggtatagccaagaagaaggccgagtag

SEQ ID NO: 161441 - DNA, 711 bp, Artificial Sequence
  derived and/or modified sequence
atggccgagcccagcgccgccacccagagccacagcatcagcagctcatctttcggcgccgagccttcagcgccaggcggaggtggttccccaggcgcttgcccagcgttaggaacaaaatcatgctctagcagctgcgccgtgcacgacctgatcttctggcgcgacgtgaagaaaacaggcttcgtttttggtaccactctaatcatgctgctctctctggccgctttcagtgttatctccgtggtgagttatctgattctggccctgctcagcgtgaccatctctttccggatctataaatctgtgattcaggccgtgcaaaagtcagaggagggtcacccttttaaggcatatctggatgtggatattaccctatcctcagaggcctttcacaactacatgaacgccgccatggtgcatattaatcgagccctgaaattgattattcgccttttcctcgtcgaggaccttgtagattccttgaaattggcggtgttcatgtggctaatgacatatgtcggggccgtgttcaacgggatcactctgttaatactggccgagctattaatcttttcagtgcccattgtctacgagaaatataagacacagatcgaccattacgtggggatagcacgggaccagaccaaatcaatcgtggagaagatccaggccaagttgccagggatcgccaagaagaaagccgagtag

SEQ ID NO: 161442 - DNA, 768 bp, Artificial Sequence
  derived and/or modified sequence
atggcggagccgagcgcggctacccaatcccattccatatcgagctcaagttttggggctgagccgagcgcaccgggagggggtggcagtcccggagcatgccctgctctcggcacgaagagctgcagctcctcttgcgccgatagctttgtgagtagtagctcttcccagcccgttagtctgttttctacgtcccaagtccacgacctcatcttctggagagatgtgaagaagaccggattcgtattcggaaccaccttaattatgcttctgagcctcgccgctttcagtgtaatttccgtggtgagttacctaattctcgctctgttaagtgtgaccatcagcttcagaatctataagtcagtcattcaagccgtgcaaaaaagtgaggagggccatcctttcaaggcatacctggacgttgacattacactgtcttctgaggcctttcataattacatgaatgctgctatggtgcacatcaatcgcgcattgaagctcattattcgattattcctggtggaggacctggtggacagcctgaagctagccgtctttatgtggttgatgacctatgtcggggcagtgtttaacggtataactctcctgatcctggccgagctgctcatcttttcagttcccatcgtgtatgagaaatacaaaacccaaattgatcactacgtcggaatcgccagggatcaaaccaaatctatagtggagaagatccaggcaaaactcccaggaatagcaaagaaaaaagccgagtag

SEQ ID NO: 161443 - DNA, 711 bp, Artificial Sequence
  derived and/or modified sequence
atggccgagccctccgccgctacccagtctcattctattagctcttcctccttcggagcggagccgtctgcacctggcggaggaggcagtcctggtgcctgtcccgctctaggaaccaaatcctgcagtagtagctgtgccgtccacgatctgattttttggcgggacgtgaagaaaactggcttcgtctttggcactaccttaatcatgcttctctctcttgccgcattcagcgtcatcagcgtggtaagctatctaatactcgcactcctgtctgtgaccatctcgttccggatttacaaatctgtcattcaggccgttcagaaatcggaagaagggcaccctttcaaggcgtatctggacgttgacattaccctgagctccgaggcctttcacaattatatgaacgcggcaatggtccacatcaaccgggcactcaaactgattataagactctttctcgtagaggatctggtggattcactgaagctcgccgttttcatgtggctgatgacttatgtgggcgctgtctttaatggaatcaccctcctaatcttggcagaactgctcattttcagcgtgccaatcgtatacgagaagtacaagactcagattgaccactacgtgggaatcgctcgcgatcagacaaaatcaattgttgagaaaatccaggccaaactccccggtatcgccaaaaaaaaggcagaatag

SEQ ID NO: 161444 - DNA, 2619 bp, Artificial Sequence
  derived and/or modified sequence
gcatgcgcgctcgcgctcccgccctctagctgcgctcggctgagtcagtcagtctgtcggagtctgtcctcggagcaggcggagtaaagggacttgagcgagccagttgccggattattctatttcccctccctctctcccgccccgtatctcttttcacccttctcccaccctcgctcgcgtagccatggcggagccgtcggcggccactcagtcccattccatctcctcgtcgtccttcggagccgagccgtccgcgcccggcggcggcgggagcccaggagcctgccccgccctggggacgaagagctgcagctcctcctgtgcggattcctttgtttcttcctcttcctctcagcctgtatctctattttcgacctcacaagtgcacgatctgattttctggagagatgtgaagaagactgggtttgtctttggcaccacgctgatcatgctgctttccctggcagctttcagtgtcatcagtgtggtttcttacctcatcctggctcttctctctgtcaccatcagcttcaggatctacaagtccgtcatccaagctgtacagaagtcagaagaaggccatccattcaaagcctacctggacgtagacattactctgtcctcagaagctttccataattacatgaatgctgccatggtgcacatcaacagggccctgaaactcattattcgtctctttctggtagaagatctggttgactccttgaagctggctgtcttcatgtggctgatgacctatgttggtgctgtttttaacggaatcacccttctaattcttgctgaactgctcattttcagtgtcccgattgtctatgagaagtacaagacccagattgatcactatgttggcatcgcccgagatcagaccaagtcaattgttgaaaagatccaagcaaaactccctggaatcgccaaaaaaaaggcagaataagtacatggaaaccagaaatgcaacagttactaaaacaccatttaatagttataacgtcgttacttgtactatgaaggaaaatactcagtgtcagcttgagcctgcattccaagctttttttttaatttggtgttttctcccatcctttccctttaaccctcagtatcaagcacaaaaattgatggactgataaaagaactatcttagaactcagaagaagaaagaatcaaattcataggataagtcaataccttaatggtggtagagcctttacctgtagcttgaaaggggaaagattggaggtaagagagaaaatgaaagaacacctctgggtccttctgtccagttttcagcactagtcttactcagctatccattatagttttgcccttaagaagtcatgattaacttatgaaaaaattatttggggacaggagtgtgataccttccttggtttttttttgcagccctcaaatcctatcttcctgccccacaatgtgagcagctacccctgatactccttttctttaatgatttaactatcaacttgataaataacttataggtgatagtgataattcctgattccaagaatgccatctgataaaaaagaatagaaatggaaagtgggactgagagggagtcagcaggcatgctgcggtggcggtcactccctctgccactatccccagggaaggaaaggctccgccatttgggaaagtggtttctacgtcactggacaccggttctgagcattagtttgagaactcgttcccgaatgtgctttcctccctctcccctgcccacctcaagtttaataaataaggttgtacttttcttactataaaataaatgtctgtaactgctgtgcactgctgtaaacttgttagagaaaaaaataacctgcatgtgggctcctcagttattgagtttttgtgatcctatctcagtctgggggggaacattctcaagaggtgaaatacagaaagcctttttttcttgatcttttcccgagattcaaatctccgattcccatttgggggcaagtttttttcttcaccttcaatatgagaattcagcgaacttgaaagaaaaatcatctgtgagttccttcaggttctcactcatagtcatgatccttcagagggaatatgcactggcgagtttaaagtaagggctatgatatttgatggtcccaaagtacggcagctgcaaaaagtagtggaaggaaattgtctacgtgtcttggaaaaattagttaggaatttggatgggtaaaaggtacccttgccttactccatcttattttcttagccccctttgagtgttttaactggtttcatgtcctagtaggaagtgcattctccatcctcatcctctgccctcccaggaagtcagtgattgtctttttgggcttcccctccaaaggaccttctgcagtggaagtgccacatccagttcttttcttttgttgctgctgtgtttagataattgaagagatctttgtgccacacaggatttttttttttttttaagaaaaacctatagatgaaaaattactaatgaaactgtgtgtacgtgtctgtgcgtgcaacataaaaatacagtagcacctaaggagcttgaatcttggttcctgtaaaatttcaaattgatgtggtatt

SEQ ID NO: 161445 - DNA, 2532 bp, Artificial Sequence
  derived and/or modified sequence
agtctgtcggagtctgtcctcggagcaggcggagtaaagggacttgagcgagccagttgccggattattctatttcccctccctctctcccgccccgtatctcttttcacccttctcccaccctcgctcgcgtagccatggcggagccgtcggcggccactcagtcccattccatctcctcgtcgtccttcggagccgagccgtccgcgcccggcggcggcgggagcccaggagcctgccccgccctggggacgaagagctgcagctcctcctgtgcggtgcacgatctgattttctggagagatgtgaagaagactgggtttgtctttggcaccacgctgatcatgctgctttccctggcagctttcagtgtcatcagtgtggtttcttacctcatcctggctcttctctctgtcaccatcagcttcaggatctacaagtccgtcatccaagctgtacagaagtcagaagaaggccatccattcaaagcctacctggacgtagacattactctgtcctcagaagctttccataattacatgaatgctgccatggtgcacatcaacagggccctgaaactcattattcgtctctttctggtagaagatctggttgactccttgaagctggctgtcttcatgtggctgatgacctatgttggtgctgtttttaacggaatcacccttctaattcttgctgaactgctcattttcagtgtcccgattgtctatgagaagtacaagacccagattgatcactatgttggcatcgcccgagatcagaccaagtcaattgttgaaaagatccaagcaaaactccctggaatcgccaaaaaaaaggcagaataagtacatggaaaccagaaatgcaacagttactaaaacaccatttaatagttataacgtcgttacttgtactatgaaggaaaatactcagtgtcagcttgagcctgcattccaagctttttttttaatttggtgttttctcccatcctttccctttaaccctcagtatcaagcacaaaaattgatggactgataaaagaactatcttagaactcagaagaagaaagaatcaaattcataggataagtcaataccttaatggtggtagagcctttacctgtagcttgaaaggggaaagattggaggtaagagagaaaatgaaagaacacctctgggtccttctgtccagttttcagcactagtcttactcagctatccattatagttttgcccttaagaagtcatgattaacttatgaaaaaattatttggggacaggagtgtgataccttccttggtttttttttgcagccctcaaatcctatcttcctgccccacaatgtgagcagctacccctgatactccttttctttaatgatttaactatcaacttgataaataacttataggtgatagtgataattcctgattccaagaatgccatctgataaaaaagaatagaaatggaaagtgggactgagagggagtcagcaggcatgctgcggtggcggtcactccctctgccactatccccagggaaggaaaggctccgccatttgggaaagtggtttctacgtcactggacaccggttctgagcattagtttgagaactcgttcccgaatgtgctttcctccctctcccctgcccacctcaagtttaataaataaggttgtacttttcttactataaaataaatgtctgtaactgctgtgcactgctgtaaacttgttagagaaaaaaataacctgcatgtgggctcctcagttattgagtttttgtgatcctatctcagtctgggggggaacattctcaagaggtgaaatacagaaagcctttttttcttgatcttttcccgagattcaaatctccgattcccatttgggggcaagtttttttcttcaccttcaatatgagaattcagcgaacttgaaagaaaaatcatctgtgagttccttcaggttctcactcatagtcatgatccttcagagggaatatgcactggcgagtttaaagtaagggctatgatatttgatggtcccaaagtacggcagctgcaaaaagtagtggaaggaaattgtctacgtgtcttggaaaaattagttaggaatttggatgggtaaaaggtacccttgccttactccatcttattttcttagccccctttgagtgttttaactggtttcatgtcctagtaggaagtgcattctccatcctcatcctctgccctcccaggaagtcagtgattgtctttttgggcttcccctccaaaggaccttctgcagtggaagtgccacatccagttcttttcttttgttgctgctgtgtttagataattgaagagatctttgtgccacacaggatttttttttttttttaagaaaaacctatagatgaaaaattactaatgaaactgtgtgtacgtgtctgtgcgtgcaacataaaaatacagtagcacctaaggagcttgaatcttggttcctgtaaaatttcaaattgatgtggtattaataaaaaaaaaaaaaacac

SEQ ID NO: 161446 - DNA, 768 bp, Artificial Sequence
  derived and/or modified sequence
atggccgagcccagcgccgccacccagagccacagcatcagcagcagcagcttcggcgccgagcccagcgcccccggcggcggcggcagccccggcgcctgccccgccctgggcaccaagagctgcagcagcagctgcgccgacagcttcgtgagcagcagcagcagccagcccgtgagcctgttcagcaccagccaggtgcacgacctgatcttctggagagacgtgaagaagaccggcttcgtgttcggcaccaccctgatcatgctgctgagcctggccgccttcagcgtgatcagcgtggtgagctacctgatcctggccctgctgagcgtgaccatcagcttcagaatctacaagagcgtgatccaggccgtgcagaagagcgaggagggccaccccttcaaggcctacctggacgtggacatcaccctgagcagcgaggccttccacaactacatgaacgccgccatggtgcacatcaacagagccctgaagctgatcatcagactgttcctggtggaggacctggtggacagcctgaagctggccgtgttcatgtggctgatgacctacgtgggcgccgtgttcaacggcatcaccctgctgatcctggccgagctgctgatcttcagcgtgcccatcgtgtacgagaagtacaagacccagatcgaccactacgtgggcatcgccagagaccagaccaagagcatcgtggagaagatccaggccaagctgcccggcatcgccaagaagaaggccgagtag

SEQ ID NO: 161447 - DNA, 711 bp, Artificial Sequence
  derived and/or modified sequence
atggccgagcccagcgccgccacccagagccacagcatcagcagcagcagcttcggcgccgagcccagcgcccccggcggcggcggcagccccggcgcctgccccgccctgggcaccaagagctgcagcagcagctgcgccgtgcacgacctgatcttctggagagacgtgaagaagaccggcttcgtgttcggcaccaccctgatcatgctgctgagcctggccgccttcagcgtgatcagcgtggtgagctacctgatcctggccctgctgagcgtgaccatcagcttcagaatctacaagagcgtgatccaggccgtgcagaagagcgaggagggccaccccttcaaggcctacctggacgtggacatcaccctgagcagcgaggccttccacaactacatgaacgccgccatggtgcacatcaacagagccctgaagctgatcatcagactgttcctggtggaggacctggtggacagcctgaagctggccgtgttcatgtggctgatgacctacgtgggcgccgtgttcaacggcatcaccctgctgatcctggccgagctgctgatcttcagcgtgcccatcgtgtacgagaagtacaagacccagatcgaccactacgtgggcatcgccagagaccagaccaagagcatcgtggagaagatccaggccaagctgcccggcatcgccaagaagaaggccgagtag

SEQ ID NO: 161448 - protein, 426 aa, Artificial Sequence
  derived and/or modified sequence
MTPLCLNCSVLPGDLYPGGARNPMACNGSAARGHFDPEDLNLTDEALRLKYLGPQQTELFMPICATYLLIFVVGAVGNGLTCLVILRHKAMRTPTNYYLFSLAVSDLLVLLVGLPLELYEMWHNYPFLLGVGGCYFRTLLFEMVCLASVLNVTALSVERYVAVVHPLQARSMVTRAHVRRVLGAVWGLAMLCSLPNTSLHGIRQLHVPCRGPVPDSAVCMLVRPRALYNMVVQTTALLFFCLPMAIMSVLYLLIGLRLRRERLLLMQEAKGRGSAAARSRYTCRLQQHDRGRRQVTKMLFVLVVVFGICWAPFHADRVMWSVVSQWTDGLHLAFQHVHVISGIFFYLGSAANPVLYSLMSSRFRETFQEALCLGACCHRLRPRHSSHSLSRMTTGSTLCDVGSLGSWVHPLAGNDGPEAQQETDPS

SEQ ID NO: 161449 - DNA, 1281 bp, Artificial Sequence
  derived and/or modified sequence
atgactcccctgtgcttaaactgcagtgtcctgccgggggacttgtatcctggaggagctcgcaaccctatggcctgcaatggctctgctgccaggggtcacttcgaccctgaggacttgaacttaacggacgaggccctccgtctcaagtatctgggtccccaacagactgagctcttcatgccaatctgcgctacctatctgctgatcttcgtcgttggcgcggtgggtaacgggctgacctgcctcgtgatcctgcggcataaagccatgagaactcccacaaattactacttgttcagcctcgcggtgagtgacctcttagtcctccttgttggattgccactagagctgtacgaaatgtggcataattatcccttcttgctgggcgtgggcggatgttattttcgtacgctgctattcgaaatggtctgtctcgcctcagtattgaacgtgacagctctcagcgtggagagatatgtggcggtggttcatcctctccaggccagatcgatggtaacacgggcccatgtgcgtagagtgttgggagccgtttggggacttgccatgctgtgcagcctgcctaatacctctctacatggaattcggcaactgcatgttccttgtagaggccctgtacccgattccgctgtgtgcatgttagttagaccccgcgcactctacaatatggtagtccaaacgacggcgctgctgttcttctgtctaccaatggcaattatgagcgttctgtatttactcataggactccggctgagacgggagaggctcctactcatgcaggaagctaaaggtcgaggttcggcagccgcacgcagtaggtacacctgccgcctccagcagcacgatagaggaaggcggcaggtgactaagatgttattcgtgttggtggtggtgttcggtatctgctgggccccgtttcacgccgatagggtcatgtggtccgtggtatcacaatggaccgacggactgcatttagcctttcagcacgtccatgtgatcagcggcatattcttctacctaggaagcgcagcgaatcctgtgctctacagtctaatgagctctcgctttagagagaccttccaggaggcactctgcctcggggcttgctgccaccgattgaggcccagacacagcagccatagtctttctaggatgactaccggatcaacgctttgcgacgtggggtccctcgggtcctgggtccaccccctggccggtaatgacggccctgaggcacagcaggaaaccgacccctcctag

SEQ ID NO: 161450 - DNA, 1281 bp, Artificial Sequence
  derived and/or modified sequence
atgacccccctgtgcctgaactgcagcgtgctgcccggggacctgtacccaggaggagccaggaaccccatggcctgcaatggatctgctgcccggggccactttgatcctgaggacctgaacctgacagatgaggccctgcggctgaagtacctgggcccccagcagacagagctgttcatgcccatctgtgccacctacctgctgatctttgtggtgggcgctgtgggcaatggcctgacctgcctggtgatcctgcggcacaaggccatgaggacccccaccaactactacctgttcagcctggccgtgtctgacctgctggtgctgctggtgggcctgcccctggagctgtatgagatgtggcacaactaccccttcctgctgggcgtgggcggctgctacttccgcaccctgctgtttgagatggtgtgcctggcctctgtgctgaatgtgacagccctgtctgtggagcgctacgtggccgtggtgcaccccctgcaggcccgctccatggtgacccgggcccacgtgagaagagtgctgggcgctgtgtggggcctggccatgctgtgcagcctgcccaacaccagcctgcacggcatccggcagctgcacgtgccctgccggggccctgtgcctgacagcgctgtgtgcatgctggtgcggccccgggccctgtacaacatggtggtgcagaccacagccctgctcttcttctgcctgcccatggccatcatgtctgtgctgtacctgctgattggcctgcggctgcggcgggagcggctgctgctgatgcaggaggccaagggccggggcagcgctgctgcccggagccgctacacctgccgcctgcagcagcacgaccggggccggcggcaggtgaccaagatgctgtttgtgctggtggtggtgtttggcatctgctgggcccccttccacgccgacagagtgatgtggagcgtggtgtcccagtggacagatggcctgcacctggccttccagcacgtgcacgtgatcagcggcatcttcttctacctgggcagcgctgccaaccctgtgctgtacagcctgatgagcagccgcttccgggagaccttccaggaggccctgtgcctgggcgcctgctgccaccggctgcggcccaggcacagcagccacagcctgagcaggatgaccaccggcagcaccctgtgtgatgtgggcagcctgggctcctgggtgcaccccctggccggaaatgatggccctgaggcccagcaggagacagaccccagctag

SEQ ID NO: 161451 - DNA, 1281 bp, Artificial Sequence
  derived and/or modified sequence
atgacccccctgtgcctgaactgcagcgtgctgcccggcgacctgtacccagggggggctaggaaccccatggcctgtaacggctcagctgcacgagggcattttgaccctgaggatctgaatctcactgacgaagccctgaggttgaaatacctgggtccacagcagacagaactgtttatgccgatttgcgccacctacttgctaatttttgtggtgggggccgtaggaaacggattaacatgcctagtgatcctgagacataaagccatgagaacacctacaaattactacttgttttctctcgccgtgagcgaccttctcgtcctgctggtggggttgcccctcgagctgtatgagatgtggcacaactacccatttcttttgggcgtgggcggctgttactttcgaactctcctgttcgagatggtctgtttagccagtgttttgaatgttacagccctatctgtggaaagatacgtggctgtcgttcatcccctccaggcaaggtctatggtgacccgggcccacgtacgtcgagtgttaggcgcagtctggggactggctatgttatgcagcctgcccaacacaagtctgcacgggattcgtcagctgcatgtcccatgccgggggccagtgcctgactccgcagtatgtatgctggtgagaccacgagctctttacaacatggttgtgcagaccacagcgttgctcttcttctgcctgcccatggcgatcatgtctgtgctctatctgcttataggcctgagactgcgtagggagcgtctgctccttatgcaggaagctaaaggaagaggcagcgctgcggcacgaagcagatacacatgtcggcttcaacagcacgatcgggggcggaggcaggtcaccaaaatgctgttcgtcctggtcgtggtctttgggatctgctgggctccttttcacgctgatagggttatgtggtccgtggtcagtcaatggaccgatggactgcacctggcttttcagcacgtgcacgttatctcagggattttcttttatctggggtccgccgcgaaccctgttctgtacagtctcatgagctctagattcagggaaaccttccaggaagctctgtgcttaggcgcatgttgtcaccgtttgcgacctcgtcatagcagccactcactgtcaagaatgactacgggaagcactttgtgcgatgtgggaagcttagggtcttgggtgcaccctctggcgggtaacgacggacctgaagctcaacaggagacagacccatcctag

SEQ ID NO: 161452 - DNA, 3298 bp, Artificial Sequence
  derived and/or modified sequence
ggcgttcccggccggacaggcggggcgtcggggcgcgggctggggccgctgtcagtcagtccactggctcccgcgccgcgtctgtgtccgtcgctcggagggtggaagccggggtctcgcgggccgcgggccgcatgactcctctctgcctcaattgctctgtcctccctggagacctgtacccagggggtgcaaggaaccccatggcttgcaatggcagtgcggccagggggcactttgaccctgaggacttgaacctgactgacgaggcactgagactcaagtacctggggccccagcagacagagctgttcatgcccatctgtgccacatacctgctgatcttcgtggtgggcgctgtgggcaatgggctgacctgtctggtcatcctgcgccacaaggccatgcgcacgcctaccaactactacctcttcagcctggccgtgtcggacctgctggtgctgctggtgggcctgcccctggagctctatgagatgtggcacaactaccccttcctgctgggcgttggtggctgctatttccgcacgctactgtttgagatggtctgcctggcctcagtgctcaacgtcactgccctgagcgtggaacgctatgtggccgtggtgcacccactccaggccaggtccatggtgacgcgggcccatgtgcgccgagtgcttggggccgtctggggtcttgccatgctctgctccctgcccaacaccagcctgcacggcatccggcagctgcacgtgccctgccggggcccagtgccagactcagctgtttgcatgctggtccgcccacgggccctctacaacatggtagtgcagaccaccgcgctgctcttcttctgcctgcccatggccatcatgagcgtgctctacctgctcattgggctgcgactgcggcgggagaggctgctgctcatgcaggaggccaagggcaggggctctgcagcagccaggtccagatacacctgcaggctccagcagcacgatcggggccggagacaagtgaccaagatgctgtttgtcctggtcgtggtgtttggcatctgctgggccccgttccacgccgaccgcgtcatgtggagcgtcgtgtcacagtggacagatggcctgcacctggccttccagcacgtgcacgtcatctccggcatcttcttctacctgggctcggcggccaaccccgtgctctatagcctcatgtccagccgcttccgagagaccttccaggaggccctgtgcctcggggcctgctgccatcgcctcagaccccgccacagctcccacagcctcagcaggatgaccacaggcagcaccctgtgtgatgtgggctccctgggcagctgggtccaccccctggctgggaacgatggcccagaggcgcagcaagagaccgatccatcctgagtggagccttaaagtggcttcacctggaggggccagagggtcacctggagctggggagacacatctgccttcctctgcagggatgccttcacgtactgtccctagttcagcctagaaattctgaccagcacctcagtttccctcagagggaaacagcaggaggagggatccctgactgctgaggactcacactgaccagacgccacaccttgtgcttcttatctgtccactgccactcccccagttcaaatccttaccctgcagaaatatcacagttagctggggctcagcagtcctccctctggggactccctgccaccactgccagtttctgaaacggtcccactgggtcctcactgtccttcccagttcctgttcaggttctggcaggggcccagggatccaggggacctggttccaatctcagccctgctgtcaccaccttgtcatgcaccatcaagcatatcagtctacctttctttttttctgagacagagtctcactctgtcgcccaggctagagtgcagtggcgcgattttggctcactgcaacctccgcctccggggttcaagcgattctcctgcctcagcctcccgagtagctgggactacaggtgagccccagcatgcccagctaattttttttaatttttagtagagacggggtttcaccatgttggccaggctggtctcaaactcttgacctcaggtgatccgccgacctcggcctcccaaagtcctcggattacaggcatgagccaccacacccggccaatcagtccacctttctaggccttggttccttgcctgaaaaatgaaagaggcgctggctttccacagtgtcatgctttggcactttagctatggttttctttctgtgtgtgtgtaagccactgcttataataaaaccaacaataccctcagactgaaagggcggaagttattatctgcatctttatcaaccccaagccccacttcctccctgacctccccatgccctccccagcctctcccagcacaagtggggcaaagccagcatgcaagcagaccccaccaccacagcccacctccgtcctcacatacgtgcaggctggctcgggagtccagtgagcagagcattggacttggctggccagagggtctctgagggcaagagacatggccaaccaagggcaaggagtgaccctgtggagggttctgccgaactcaatgcagtgagaagagggacagggacaagtagtccttgaaactgagccccattctgaatccctgcaggccaagtcattgctcagccaggactcagttcatggaggaaacttgtcctgctgcagtccctgagtcttgtcctcctgagaggaagccctggcttccaaggctgggagctggaggatgaccttcggtcggtctgtctgggttctccctgcagacagcttcctagctcatgcccatagctcatgctccctgccgagaaagtggaggacgtggtacagggttgcagatgtttagttttaaaaattcaattataaaaataataaatgctcatgatagaaaatttggaaagtgcaaataagcaaaaatgaaaacaattttaaaaatgtaaaacctctcttgccagggaatgggggaagggcaagtgaggagttctttaatgggtgaagagtttcagttttgcaaaatgaaaaagttctggagatcagttgtgcaacaatatgaatatacataacaatactgaactatacactgaaatggttaagatggtacattttatgttatgtgtattttaccacaatttttataaaaagaggattaaatctaaaggaaagaaaaaattaaaaccacccataactttactctgaagcagtaacagtggcatgtttcctccta

SEQ ID NO: 161453 - DNA, 1281 bp, Artificial Sequence
  derived and/or modified sequence
atgactcctctgtgccttaattgctccgttcttccaggcgatttatatcccggaggcgctcggaatcctatggcgtgcaatggcagtgctgcccgaggtcactttgacccagaggacttgaatcttactgatgaagccttgcgacttaagtacctgggccctcaacaaaccgaattgtttatgccgatatgcgcaacatatctcttgattttcgtcgtcggagccgtaggaaatggcttgacatgtctcgtgattctccggcataaggctatgcgaacacctactaactactacttatttagtctggctgtgagcgacctgctcgtgctgcttgtaggactcccccttgaactttacgaaatgtggcataattacccctttctcctgggggttggcggatgctactttcgaacattgctcttcgaaatggtgtgtttggcctctgtgttaaatgtaaccgccctgtcagttgagagatacgtcgccgtggtacacccattacaggcccgatcgatggtgacccgggcacacgttcgacgagtacttggggctgtctggggactggctatgctctgctccctccccaacacctctttacacggtataagacagctgcacgtgccatgtcgtggccctgtgccggactccgcagtctgcatgttggtgcggcctagggcgctgtacaacatggtagttcagaccaccgctttacttttcttctgcctgcccatggcgattatgtctgtgctctaccttctgattgggctgcgccttagacgggagagattgcttctgatgcaggaggccaaagggcgagggtccgctgccgctcggtcacgatatacctgccgtctccagcagcacgaccggggtagacgacaggtcactaagatgctgtttgtgctggttgtggttttcgggatctgctgggctcctttccatgccgatcgcgtgatgtggtccgtcgtttcccaatggacagatgggcttcacctggcttttcagcacgtccatgttatttcagggatctttttttatcttggatcagctgctaacccagtgctgtactccctcatgtccagccgatttcgcgaaacatttcaggaggcattgtgcctgggagcctgctgtcacaggctgagacccagacactcatctcactctttatccagaatgactacaggctctacactctgcgacgttggtagcctcggttcctgggttcacccgctggctggaaacgacgggccagaagcacagcaagagacagacccttcctag

SEQ ID NO: 161454 - DNA, 1281 bp, Artificial Sequence
  derived and/or modified sequence
atgacccccctgtgcctgaactgcagcgtgctgcccggcgacctgtaccccggcggcgccagaaaccccatggcctgcaacggcagcgccgccagaggccacttcgaccccgaggacctgaacctgaccgacgaggccctgagactgaagtacctgggcccccagcagaccgagctgttcatgcccatctgcgccacctacctgctgatcttcgtggtgggcgccgtgggcaacggcctgacctgcctggtgatcctgagacacaaggccatgagaacccccaccaactactacctgttcagcctggccgtgagcgacctgctggtgctgctggtgggcctgcccctggagctgtacgagatgtggcacaactaccccttcctgctgggcgtgggcggctgctacttcagaaccctgctgttcgagatggtgtgcctggccagcgtgctgaacgtgaccgccctgagcgtggagagatacgtggccgtggtgcaccccctgcaggccagaagcatggtgaccagagcccacgtgagaagagtgctgggcgccgtgtggggcctggccatgctgtgcagcctgcccaacaccagcctgcacggcatcagacagctgcacgtgccctgcagaggccccgtgcccgacagcgccgtgtgcatgctggtgagacccagagccctgtacaacatggtggtgcagaccaccgccctgctgttcttctgcctgcccatggccatcatgagcgtgctgtacctgctgatcggcctgagactgagaagagagagactgctgctgatgcaggaggccaagggcagaggcagcgccgccgccagaagcagatacacctgcagactgcagcagcacgacagaggcagaagacaggtgaccaagatgctgttcgtgctggtggtggtgttcggcatctgctgggcccccttccacgccgacagagtgatgtggagcgtggtgagccagtggaccgacggcctgcacctggccttccagcacgtgcacgtgatcagcggcatcttcttctacctgggcagcgccgccaaccccgtgctgtacagcctgatgagcagcagattcagagagaccttccaggaggccctgtgcctgggcgcctgctgccacagactgagacccagacacagcagccacagcctgagcagaatgaccaccggcagcaccctgtgcgacgtgggcagcctgggcagctgggtgcaccccctggccggcaacgacggccccgaggcccagcaggagaccgaccccagctag

SEQ ID NO: 161455 - protein, 1575 aa, Artificial Sequence
  derived and/or modified sequence
MAAAALLLGLALLAPRAAGAGMGACYDGAGRPQRCLPVFENAAFGRLAQASHTCGSPPEDFCPHVGAAGAGAHCQRCDAADPQRHHNASYLTDFHSQDESTWWQSPSMAFGVQYPTSVNITLRLGKAYEITYVRLKFHTSRPESFAIYKRSRADGPWEPYQFYSASCQKTYGRPEGQYLRPGEDERVAFCTSEFSDISPLSGGNVAFSTLEGRPSAYNFEESPGLQEWVTSTELLISLDRLNTFGDDIFKDPKVLQSYYYAVSDFSVGGRCKCNGHASECGPDVAGQLACRCQHNTTGTDCERCLPFFQDRPWARGTAEAAHECLPCNCSGRSEECTFDRELFRSTGHGGRCHHCRDHTAGPHCERCQENFYHWDPRMPCQPCDCQSAGSLHLQCDDTGTCACKPTVTGWKCDRCLPGFHSLSEGGCRPCTCNPAGSLDTCDPRSGRCPCKENVEGNLCDRCRPGTFNLQPHNPAGCSSCFCYGHSKVCASTAQFQVHHILSDFHQGAEGWWARSVGGSEHPPQWSPNGVLLSPEDEEELTAPEKFLGDQRFSYGQPLILTFRVPPGDSPLPVQLRLEGTGLALSLRHSSLSGPQDAGHPREVELRFHLQETSEDVAPPLPPFHFQRLLANLTSLRLRVSPGPSPAGPVFLTEVRLTSARPGLSPPASWVEICSCPTGYTGQFCESCAPGYKREMPQGGPYASCVPCTCNQHGTCDPNTGICVCSHHTEGPSCERCLPGFYGNPFAGQADDCQPCPCPGQSACTTIPESREVVCTHCPPGQRGRRCEVCDDGFFGDPLGLFGHPQPCHQCQCSGNVDPNAVGNCDPLSGHCLRCLHNTTGDHCEHCQEGFYGSALAPRPADKCMPCSCHPQGSVSEQMPCDPVTGQCSCLPHVTARDCSRCYPGFFDLQPGRGCRSCKCHPLGSQEDQCHPKTGQCTCRPGVTGQACDRCQLGFFGFSIKGCRACRCSPLGAASAQCHENGTCVCRPGFEGYKCDRCHDNFFLTADGTHCQQCPSCYALVKEEAAKLKARLTLTEGWLQGSDCGSPWGPLDILLGEAPRGDVYQGHHLLPGAREAFLEQMMSLEGAVKAAREQLQRLNKGARCAQAGSQKTCTQLADLEAVLESSEEEILHAAAILASLEIPQEGPSQPTKWSHLATEARALARSHRDTATKIAATAWRALLASNTSYALLWNLLEGRVALETQRDLEDRYQEVQAAQKALRTAVAEVLPEAESVLATVQQVGADTAPYLALLASPGALPQKSRAEDLGLKAKALEKTVASWQHMATEAARTLQTAAQATLRQTEPLTKLHQEARAALTQASSSVQAATVTVMGARTLLADLEGMKLQFPRPKDQAALQRKADSVSDRLLADTRKKTKQAERMLGNAAPLSSSAKKKGREAEVLAKDSAKLAKALLRERKQAHRRASRLTSQTQATLQQASQQVLASEARRQELEEAERVGAGLSEMEQQIRESRISLEKDIETLSELLARLGSLDTHQAPAQALNETQWALERLRLQLGSPGSLQRKLSLLEQESQQQELQIQGFESDLAEIRADKQNLEAILHSLPENCASWQ

SEQ ID NO: 161456 - DNA, 1590 bp, Artificial Sequence
  derived and/or modified sequence
atggccgccgccgccctgctgcttggtctggccttgcttgccccccgggccgcaggagcaggaatgggtgcctgttatgacggggcaggaagaccgcagagatgccttccagtgtttgagaatgccgcgtttggtcgtctggctcaggcctctcatacctgcggatcacctccagaggatttttgtcctcatgtcggagcagcgggcgcaggggctcattgccaaaggtgtgacgcggccgacccacaacgccaccacaacgcatcatatttgaccgacttccactcgcaggatgagtctacctggtggcagagccctagtatggcatttggcgtccagtaccccaccagcgttaatatcacattaaggctcgggaaagcctacgagattacctatgtgcgactgaaattccacaccagccggcccgagagttttgccatttacaaacgctcgcgcgctgacgggccatgggaaccttaccagttctattcggcatcgtgccagaagacttacggccggcccgagggacagtacttgcggcctggcgaggacgagcgagtcgccttctgtacttctgagttctccgatatctcacccctatcagggggaaatgtggctttctcaactttggagggcaggcccagcgcttacaatttcgaagagtcaccaggtttgcaggaatgggttactagcacggaactactcatttcccttgataggctgaatacctttggagatgacatcttcaaagaccccaaggtactccagtcttactattacgcagtgtctgatttctctgtcggcggtagatgtaagtgtaatggccatgcatccgaatgtgggcccgacgttgctggacagctcgcctgtaggtgtcagcacaacaccactggaaccgattgcgagagatgcctgcctttcttccaggaccgcccttgggcgaggggaactgctgaagccgcccatgagtgtttgccatgcaattgttctggccgcagtgaagaatgcactttcgacagagaactattcagaagcacagggcacggaggacggtgtcatcactgcagagatcacaccgccggacctcactgcgagcgctgccaggagaacttctatcattgggatcctaggatgccgtgtcagccttgcgactgtcagtccgccgggtcactgcatttgcagtgcgatgacacaggaacatgtgcctgtaaaccaactgtgacaggatggaaatgcgacaggtgcctgccaggatttcacagtctgtccgagggggggtgtcggccgtgcacatgcaatcccgccgggtcattagatacgtgtgaccctcggagtggccggtgcccctgcaaggaaaatgtggagggcaatctctgtgaccggtgcaggcctggcacttttaatctccagccgcataaccccgccggccgttcatgcaggtccagagctagtcgcgtcacatcacctcggagcgctcctacaaaccggacatggcgccctttctgcaccgcctgcccccgcacggttcccgcaggaagcgagggctgccctgacccacggcatacgctgccccatcttttgttcacatag

SEQ ID NO: 161457 - DNA, 4728 bp, Artificial Sequence
  derived and/or modified sequence
atggccgctgcagcgctgctcctggggctggcacttttggccccaagggccgctggggcagggatgggcgcatgttacgacggcgccggccgaccccagcgttgtctccccgtttttgagaatgctgccttcggccggctggctcaagcatcccatacctgcgggtccccccctgaagacttctgtcctcacgttggcgccgctggcgcaggcgctcactgccaaagatgtgatgccgctgatccgcagcgacaccacaatgccagctacctgacggactttcattcccaggacgagtcaacttggtggcagagcccaagcatggccttcggcgtccaatacccgacgtctgtgaatattacattgaggctggggaaagcttatgaaattacctatgttagactgaaatttcatacctccaggcccgaatccttcgccatttacaaaaggtcgagagcggatggcccttgggaaccctaccagttttattccgcgtcatgccaaaagacctatggacgccccgaggggcaatacctgcgaccaggcgaggacgaacgcgtcgcattttgtacatccgagtttagtgacatctctccccttagcggtggaaacgtggcattttccaccctggaggggcgtcccagcgcttataactttgaagaaagccctgggctccaagaatgggttacaagtacagagttgctaatcagtctcgacaggctcaacaccttcggggacgatatatttaaagatcccaaagttctccaatcctactactatgcagtgtctgactttagcgtgggcggccgatgtaagtgcaatgggcatgcttccgagtgcggtcctgatgtggccggtcaactcgcatgcagatgccagcacaacactacgggaaccgactgcgaacgctgcttgcccttctttcaggatcgcccatgggcaaggggaaccgccgaagcagcccatgaatgcctcccctgcaattgctcagggcggagcgaagaatgtaccttcgaccgcgaactgttccggtccacaggacatggcggtcggtgtcaccattgcagagaccacaccgctgggccccattgtgagaggtgccaggagaacttctatcattgggatccaaggatgccctgtcagccgtgtgattgtcaatcggccggttcactccacttgcaatgcgacgacacaggcacgtgcgcttgcaagccgaccgtaacgggatggaagtgtgaccgctgtctgccgggcttccacagtctgagtgaaggggggtgtcgaccatgcacctgcaatcctgctggatctctggacacatgtgatccccggagcgggcgttgcccttgcaaggagaatgtggaagggaatctctgcgaccgatgcaggccaggaacattcaatctacagccccataatcccgcaggctgcagtagctgtttctgttatggacactccaaggtttgcgcaagtacggcccagttccaggtgcatcatattctctctgactttcatcagggcgccgagggttggtgggccaggagcgttggtggctccgaacaccctccacagtggtcgcctaatggtgtgctgcttagtccggaagacgaagaagaactgactgctcctgaaaagtttttaggggatcaacgattttcatatggacagccactgatactcacgttccgggtgccacccggcgattctcccctccctgtgcagcttaggctggaagggaccgggctggctctttcactgaggcactctagcctctcaggtccccaggatgccggccatcccagggaagtagaacttagatttcacctgcaggagacaagcgaagacgttgcgcctcctctgcctcctttccatttccagcggcttctggcaaacctgacttcactcagattacgagtgagtccgggcccaagtccggctgggccagtgttcttaaccgaggtgcgactgactagcgcaaggcctgggttgtctccaccggcatcctgggttgagatctgttcatgcccaacaggttatactggccagttttgcgagagctgcgcgccaggttacaagcgcgagatgccgcagggcggcccttatgcgagttgtgtgccatgtacctgcaaccaacacggaacatgcgacccgaatactggaatttgcgtttgctcccaccatactgagggaccgagctgcgagcgctgtctgcctggtttttatggtaacccatttgccgggcaggcagatgattgccagccgtgcccctgcccaggtcagtccgcatgtactacaattcctgagagcagagaggtcgtctgcacacattgcccaccagggcaacgggggcgaagatgtgaagtgtgtgacgacgggttttttggcgaccccctggggctgtttggacatcctcaaccttgtcatcaatgccagtgctcaggcaatgtcgacccaaatgcagtcgggaactgtgaccccctctctggacactgtctgaggtgcttgcataacacgactggagatcactgcgagcactgtcaggagggattttacgggtcagccctggcacctcgccctgcggacaagtgcatgccctgttcttgtcatcctcaaggcagcgttagcgagcagatgccatgtgatccagtgactggtcagtgcagctgtcttccgcatgtaactgctagggactgcagtcggtgttatccaggattctttgacctacagcctgggagaggatgtaggagttgtaaatgtcaccctcttggcagccaagaagaccagtgccaccctaagaccgggcagtgtacttgtcgcccaggggtcactggtcaagcttgtgaccgctgccagctcggcttttttggtttcagtatcaaggggtgccgtgcctgtcggtgcagccccttaggcgctgctagcgcccaatgtcacgaaaatggtacttgcgtgtgccgcccaggtttcgagggttataagtgcgaccggtgccatgataattttttcctaaccgccgatggtacccattgccaacagtgccccagttgctacgccttagtcaaagaggaagccgctaagctgaaggccagacttacacttaccgagggttggctgcagggatccgattgcggttcaccctggggacccctggatatcctgctgggtgaagcacctaggggggatgtgtatcagggacatcatctcctgcctggcgctcgcgaggcattccttgagcagatgatgtccctcgagggagcagtgaaggccgctcgtgagcaattacagcggctgaataagggagcccggtgcgctcaagctggcagtcagaaaacctgtacccagctcgccgacctggaggcggttctagagtcttccgaagaggagattctacacgccgctgctattctggcaagcttagaaatcccccaggagggtccttcccagcctaccaagtggtcccacctggccacagaggcgcgcgcgctagcccgatctcatcgcgatacggcaactaagatcgcagccactgcttggcgcgcgctcctggccagcaacacatcctatgccctactttggaatctgctggaaggcagagtggcattagaaactcaacgagacctggaggataggtatcaggaggtgcaggccgcgcaaaaagcactccggactgcggtggcagaagtgctgcctgaggcggagtcagtcctagctacggtgcagcaggtgggcgcagacacggcaccctatttggctttgctggcctcaccaggggctctgcctcagaaatctcgggccgaggacctggggctcaaggccaaggcattagaaaagacggttgcctcctggcagcatatggctaccgaagccgccaggactctgcaaactgcagcccaggcaacccttcggcagactgagcctcttaccaagcttcatcaggaagcccgggccgccctgacccaggcttccagctccgtgcaagctgcaaccgtcacggtcatgggagcacggacgctcctggctgacctcgaaggaatgaagctgcagtttccccgccctaaagaccaggccgctctgcagagaaaagcggatagcgtctcggatcgattgttggccgacaccagaaaaaaaacaaagcaggctgagcgcatgttaggaaatgccgctcctctgtccagtagcgctaagaaaaaaggccgagaggcagaggtgctcgccaaagatagcgctaagttggctaaagcattactgcgggaacggaagcaggctcataggagagcatcccggctgacatcccagacgcaagcaaccctccagcaggcctctcagcaggtgctggcctctgaggctcggagacaagaactagaagaagcagaacgcgtgggcgcaggactttctgagatggaacagcagatccgcgaaagtaggattagcctagagaaggacatcgaaaccctgtccgagctactggcacggctgggcagtctggacactcaccaggcgcctgcccaggctctgaacgaaacacagtgggcactcgagcgcctgcgtctgcaattgggctcgcccgggtcattgcagcggaagctaagtcttcttgaacaagaatcacagcagcaagagctgcagatccagggctttgagagcgatctagccgagattcgggccgacaagcagaatctggaggccatcttgcattccttgcccgagaactgcgctagctggcagtag

SEQ ID NO: 161458 - DNA, 1688 bp, Artificial Sequence
  derived and/or modified sequence
ccccgcaggggaaggcgggtcctggcggccagcgcgcggtccgcgcccaccctagccgagcggggccggcagagcgcgcggcgtcggtgcccttgaccatggcggcggctgcgcttctgctggggctggcgctgctggcaccgcgggcggccggcgcgggcatgggcgcgtgctatgacggcgcagggcgcccgcagcgctgcctgccggtgttcgagaacgcggcgtttgggcggctcgcccaggcctcgcacacgtgcggcagcccgcccgaggacttctgtccccacgtgggcgccgcgggcgcgggggctcattgccagcgctgcgacgccgccgacccccagcgccaccacaacgcctcctacctcaccgacttccacagccaggacgagagcacctggtggcagagcccgtccatggccttcggcgtgcagtaccccacctcggtcaacatcaccctccgcctagggaaggcttatgagatcacgtatgtgaggctgaagttccacaccagtcgccctgagagctttgccatctacaagcgcagccgcgccgacggcccatgggagccctaccagttctacagcgcctcctgccagaagacctacggccggcccgagggccagtacctgcgccccggcgaggacgagcgcgtggccttctgcacctctgagttcagcgacatctccccgctgagtggcggcaacgtggccttctccaccctggagggccggcccagcgcctacaacttcgaggagagccctgggctgcaggagtgggtcaccagcaccgaactcctcatctctctagaccggctcaacacgtttggggacgacatcttcaaggaccccaaggtgctccagtcctactattatgccgtgtccgacttctctgtgggcggcaggtgcaagtgcaacgggcatgccagcgagtgcggccccgacgtggcaggccagttggcctgccggtgccagcacaacaccaccggcacagactgtgagcgctgcctgcccttcttccaggaccgcccgtgggcccggggcaccgccgaggctgcccacgagtgtctgccctgcaactgcagtggccgctccgaggaatgcacgtttgatcgggagctcttccgcagcacaggccacggcgggcgctgtcaccactgccgtgaccacacagctgggccacactgtgagcgctgtcaggagaatttctatcactgggacccgcggatgccatgccagccctgtgactgccagtcggcaggctccctacacctccagtgcgatgacacaggcacctgcgcctgcaagcccacggtgactggctggaagtgtgaccgctgtctgcccgggttccactcgctcagtgagggaggctgcagaccctgcacttgcaatcccgctggcagcctggacacctgtgacccccgcagtgggcgctgcccctgcaaagagaatgtggaaggcaacctatgtgacagatgtcgcccggggacctttaacctgcagccccacaatccagctggcaggagctgcagatccagggcttcgagagtgacctcgccgagatccgcgccgacaaacagaacctggaggccattctgcacagcctgcccgagaactgtgccagctggcagtgagggctgcccagatccccggcacacactcccccacctgctgtttacatga

SEQ ID NO: 161459 - DNA, 6133 bp, Artificial Sequence
  derived and/or modified sequence
gccgccgccgcccgcccctccctccagcctccccgccccgcaggggaaggcgggtcctggcggccagcgcgcggtccgcgcccaccctagccgagcggggccggcagagcgcgcggcgtcggtgcccttgaccatggcggcggctgcgcttctgctggggctggcgctgctggcaccgcgggcggccggcgcgggcatgggcgcgtgctatgacggcgcagggcgcccgcagcgctgcctgccggtgttcgagaacgcggcgtttgggcggctcgcccaggcctcgcacacgtgcggcagcccgcccgaggacttctgtccccacgtgggcgccgcgggcgcgggggctcattgccagcgctgcgacgccgccgacccccagcgccaccacaacgcctcctacctcaccgacttccacagccaggacgagagcacctggtggcagagcccgtccatggccttcggcgtgcagtaccccacctcggtcaacatcaccctccgcctagggaaggcttatgagatcacgtatgtgaggctgaagttccacaccagtcgccctgagagctttgccatctacaagcgcagccgcgccgacggcccatgggagccctaccagttctacagcgcctcctgccagaagacctacggccggcccgagggccagtacctgcgccccggcgaggacgagcgcgtggccttctgcacctctgagttcagcgacatctccccgctgagtggcggcaacgtggccttctccaccctggagggccggcccagcgcctacaacttcgaggagagccctgggctgcaggagtgggtcaccagcaccgaactcctcatctctctagaccggctcaacacgtttggggacgacatcttcaaggaccccaaggtgctccagtcctactattatgccgtgtccgacttctctgtgggcggcaggtgcaagtgcaacgggcatgccagcgagtgcggccccgacgtggcaggccagttggcctgccggtgccagcacaacaccaccggcacagactgtgagcgctgcctgcccttcttccaggaccgcccgtgggcccggggcaccgccgaggctgcccacgagtgtctgccctgcaactgcagtggccgctccgaggaatgcacgtttgatcgggagctcttccgcagcacaggccacggcgggcgctgtcaccactgccgtgaccacacagctgggccacactgtgagcgctgtcaggagaatttctatcactgggacccgcggatgccatgccagccctgtgactgccagtcggcaggctccctacacctccagtgcgatgacacaggcacctgcgcctgcaagcccacggtgactggctggaagtgtgaccgctgtctgcccgggttccactcgctcagtgagggaggctgcagaccctgcacttgcaatcccgctggcagcctggacacctgtgacccccgcagtgggcgctgcccctgcaaagagaatgtggaaggcaacctatgtgacagatgtcgcccggggacctttaacctgcagccccacaatccagctggctgcagcagctgtttctgctatggccactccaaggtgtgcgcgtccactgcccagttccaggtgcatcacatcctcagcgatttccaccagggagccgaaggctggtgggccagaagtgtggggggctctgagcaccccccacaatggagcccaaatggggtcctcctgagcccagaagacgaggaggagctcacagcaccagagaagttcctgggagaccagcggttcagctatgggcagcccctcatactgaccttccgggtgccccccggggactccccactccctgtacagctgaggctggaagggacaggcttggccctgtccctgaggcactctagcctgtctggcccccaggatgccgggcatcccagggaggtagagctcaggttccacctgcaggagacctccgaggacgtggcccctccactgccccccttccacttccagcggctcctcgccaacctgaccagcctccgcctccgcgtcagtcccggccccagccctgccggtccagtgttcctgactgaggtccggctcacatccgcccggccagggctttccccgccagcctcctgggtggagatttgttcatgtcccactggctacacgggccagttctgtgaatcctgtgctccgggatacaagagggagatgccacaggggggtccctatgccagctgtgtcccctgcacctgtaaccagcatggcacctgtgaccccaacacagggatctgtgtctgcagccaccataccgagggcccatcctgtgaacgctgtttgccaggtttctatggcaaccctttcgcgggccaagccgacgactgccagccctgtccctgccctggccagtcggcctgtacgaccatcccagagagccgggaggtggtgtgtacccactgccccccgggccagagagggcggcgctgtgaggtctgtgatgatggcttttttggggacccgctggggctctttgggcacccccagccctgccaccagtgccagtgtagcgggaacgtggaccccaatgccgtgggcaactgtgaccccctgtctggccactgcctgcgctgcctgcacaacaccacgggtgaccactgtgagcactgtcaggaaggcttctacgggagcgccctggcccctcgacccgcagacaaatgcatgccttgcagctgtcacccacagggctcggtcagtgagcagatgccctgcgacccagtgacaggccaatgctcctgcctgcctcatgtgactgcacgggactgcagccgctgctaccctggcttcttcgacctccagcctgggaggggctgccggagctgcaagtgtcacccactgggctcccaggaggaccagtgccatcccaagactggacagtgcacctgccgcccaggtgtcacaggccaggcctgtgacaggtgccagctgggtttcttcggcttctccatcaagggctgccgggcctgcaggtgctccccactgggcgctgcctcggcccagtgccacgagaacggcacatgcgtgtgcaggcctggcttcgagggctacaaatgtgaccgctgccacgacaacttcttcctcacggcagacggcacacactgccagcaatgtccgtcctgctacgccctggtgaaggaggaggcagccaagctgaaggccagactgactttgacggaggggtggctccaagggtccgactgtggcagtccctggggaccactagacattctgctgggagaggccccaaggggggacgtctaccagggccatcacctgcttccaggggctcgggaagccttcctggagcagatgatgagcctcgagggtgctgtcaaggccgcccgggagcagctgcagaggctgaacaagggtgcccgctgtgcccaggccggatcccagaagacctgcacccagctggcagacctggaggcagtgctggagtcctcggaagaggagattctgcatgcagctgccattctcgcgtctctggagattcctcaggaaggtcccagtcagccgaccaaatggagccacctggccacagaggcccgtgccctcgccaggagccacagagacaccgccaccaagatcgcagccactgcttggagggccctgctcgcctccaacaccagctacgcgcttctctggaatctgctggagggaagggtggccctagagacccagcgggacctggaggacaggtaccaggaggtccaggcggcccagaaagcactgaggacggctgtggcagaggtgctgcctgaagcggaaagcgtgttggccaccgtgcagcaagttggcgcagatacagccccgtacctggccttgctggcttccccgggagctctgcctcagaagtcccgggctgaagacctgggcctgaaggcgaaggccctggagaagacagttgcatcatggcagcacatggccactgaggctgcccgaaccctccagactgctgcccaggcgacgctacggcaaacagaacccctcacaaagctgcaccaggaggccagagccgccctgacccaggcttcctcatctgtccaggctgcgacagtgactgtcatgggagccaggactctgctggctgatctggaaggaatgaagctgcagtttccccggcccaaggaccaggcggcattgcagaggaaggcagactccgtcagtgacagactccttgcagacacgagaaagaagaccaagcaggcggagaggatgctgggaaacgcggcccctctttcctccagtgccaagaagaagggcagagaagcagaggtgttggccaaggacagtgccaagcttgccaaggccttgctgagggagcggaaacaggcgcaccgccgtgccagcaggctcaccagccagacgcaagccacgctccaacaggcgtcccagcaggtgctggcgtctgaagcacgcagacaggagctggaggaagctgagcgggtgggtgctgggctgagcgagatggagcagcagatccgggaatcgcgtatctcactggagaaggacatcgagaccttgtcagagctgcttgccaggctggggtcgctggacacccatcaagccccagcccaggccctgaacgagactcagtgggcactagaacgcctgaggctgcagctgggctccccggggtccttgcagaggaaactcagtctgctggagcaggaatcccagcagcaggagctgcagatccagggcttcgagagtgacctcgccgagatccgcgccgacaaacagaacctggaggccattctgcacagcctgcccgagaactgtgccagctggcagtgagggctgcccagatccccggcacacactcccccacctgctgtttacatgacccagggggtgcacactaccccacaggtgtgcccatacagacattccccggagccggctgctgtgaactcgcccccgtgtggatagtcactccctgccgattctgtctgtggcttcttccctgccagcaggactgagtgtgcgtacccagttcacctggacatgagtgcacactctcacccctgcacatgcataaacgggcacaccccagtgtcaataacatacacacgtgagggtgcatgtctgtgtgtatgacccacacgtgttcaagtctaatccatccagtcagcagcttacggtccacacacattacagtccacagctgttgtgagagccacctgtgtgctggacaccctctggatgttgggcaagttgttacatgagatgccctggggtgctacatccactcactccagatagcagggaggtctcagcagatctgcagagatcaagggggtcagcaacagccaaagcccctagtcccagagctggctgccctctgtttcacagcagctccctgacctgtgttgctgcgtgcactccctacagctcgacacagccaggggaccaacaggccaagaaatgcaagatcccgggagggttcttagcagcagaatctgaggcccagagaccctgaggccgtggccaggcctgctagtctggctagagcaaggcccattcctggcgggggtgtcattgccttcaccggacgcttccctctcagggtcctgggactgcaccagatgccctgagggaatggcccaccctggcctgtacccacttcagcctgtgatctatccaaagagccaggcccaaaagcgcctaggtcagggtgctcaggctaccaggagcacgcctctgtgcccccggcaacccagttgacctttaattgacgctttccagaccagccctgcggcaccacttgccatgcgggaggccaccagggtgtgcaagcctggctgccattccagtctgtcctgtctgggaatcgccctgtggccaggcccgcatgctggcctctgcccaggactcctcagcatttcctcttggcatccctcccctctcccagaccctcttccagcagatggcaaggcctcggcattgggaagtcaggcacctctgcgggcccagccccctcccgtggctcccctgacaggggcaggggtagggcagcagcacagaccaattccgttgaacgtggaaataaaggaccctttcactggg

SEQ ID NO: 161460 - DNA, 1590 bp, Artificial Sequence
  derived and/or modified sequence
atggctgctgctgccctgctgctgggcctggccctgctggcccccagggctgctggggccggcatgggcgcctgctatgatggagctggccggccccagcgctgcctgcctgtgtttgaaaatgctgccttcggccgcctggcccaggccagccacacctgtggcagccccccagaggacttctgcccccacgtgggcgccgccggggccggggcccactgccagagatgtgatgctgctgacccccagaggcaccacaatgccagctacctgacagacttccacagccaggatgagagcacctggtggcagagccccagcatggccttcggcgtgcagtaccccacctctgtgaacatcaccctgcggctgggcaaggcctatgagatcacctacgtgcggctgaagttccacaccagcaggcctgagagctttgccatctacaagaggagcagagcagatggcccctgggagccctaccagttctacagcgccagctgccagaagacctacggccggcctgagggccagtacctgcggcctggagaagatgagcgggtggccttctgcaccagcgagttcagtgacatcagccccctgagcggcggcaatgtggccttcagcaccctggagggccggcccagcgcctacaactttgaggagagccctggcctgcaggagtgggtgaccagcacagagctgctgatcagcctggaccggctgaacacctttggagatgacatcttcaaggaccccaaggtgctgcagagctactactatgctgtgtctgacttctctgtgggcggccgctgcaagtgcaatggccacgcctctgaatgtggcccagatgtggccggccagctggcctgccgctgccagcacaacaccactggaacagactgtgagcgctgcctgcccttcttccaggaccggccctgggcccggggcacagctgaggccgcccatgaatgtctgccctgcaactgcagcggccgctcagaagaatgtacctttgaccgggagctgttccgcagcacaggccacggcggccgctgccaccactgccgggaccacacagctggcccccactgtgagcgctgccaggagaacttctaccactgggaccccaggatgccctgccagccctgtgactgccagagcgctggcagcctgcacctgcagtgtgatgacaccggcacctgtgcctgcaagcccaccgtgacaggctggaagtgtgaccgctgcctgcccggcttccacagcctgtctgagggcggctgccggccctgcacctgcaacccagctggcagcctggacacctgtgaccccaggagcggccgctgcccctgcaaggaaaatgtggagggcaacctgtgtgaccgctgccggcccggcaccttcaacctgcagccccacaacccagctggccgcagctgccgcagccgggccagccgggtgaccagccccaggtctgcccccaccaacagaacctggaggcccttctgcacagcctgccccaggacagtgcctgctggcagcgagggctgcccagaccccaggcacaccctgccccacctgctcttcacctag

SEQ ID NO: 161461 - DNA, 4728 bp, Artificial Sequence
  derived and/or modified sequence
atggctgctgctgccctgctgctgggcctggccctgctggcccccagggctgctggggccggcatgggcgcctgctatgatggagctggccggccccagcgctgcctgcctgtgtttgaaaatgctgccttcggccgcctggcccaggccagccacacctgtggcagccccccagaggacttctgcccccacgtgggcgccgccggggccggggcccactgccagagatgtgatgctgctgacccccagaggcaccacaatgccagctacctgacagacttccacagccaggatgagagcacctggtggcagagccccagcatggccttcggcgtgcagtaccccacctctgtgaacatcaccctgcggctgggcaaggcctatgagatcacctacgtgcggctgaagttccacaccagcaggcctgagagctttgccatctacaagaggagcagagcagatggcccctgggagccctaccagttctacagcgccagctgccagaagacctacggccggcctgagggccagtacctgcggcctggagaagatgagcgggtggccttctgcaccagcgagttcagtgacatcagccccctgagcggcggcaatgtggccttcagcaccctggagggccggcccagcgcctacaactttgaggagagccctggcctgcaggagtgggtgaccagcacagagctgctgatcagcctggaccggctgaacacctttggagatgacatcttcaaggaccccaaggtgctgcagagctactactatgctgtgtctgacttctctgtgggcggccgctgcaagtgcaatggccacgcctctgaatgtggcccagatgtggccggccagctggcctgccgctgccagcacaacaccactggaacagactgtgagcgctgcctgcccttcttccaggaccggccctgggcccggggcacagctgaggccgcccatgaatgtctgccctgcaactgcagcggccgctcagaagaatgtacctttgaccgggagctgttccgcagcacaggccacggcggccgctgccaccactgccgggaccacacagctggcccccactgtgagcgctgccaggagaacttctaccactgggaccccaggatgccctgccagccctgtgactgccagagcgctggcagcctgcacctgcagtgtgatgacaccggcacctgtgcctgcaagcccaccgtgacaggctggaagtgtgaccgctgcctgcccggcttccacagcctgtctgagggcggctgccggccctgcacctgcaacccagctggcagcctggacacctgtgaccccaggagcggccgctgcccctgcaaggaaaatgtggagggcaacctgtgtgaccgctgccggcccggcaccttcaacctgcagccccacaacccagctggctgcagcagctgcttctgctacggccacagcaaggtgtgtgccagcacagcccagttccaggtgcaccacatcctgagtgacttccaccagggcgctgagggctggtgggcccggtctgtgggcggcagcgagcaccccccccagtggagccccaacggggtgctgctgagcccagaagatgaggaggagctgacagcccctgagaagttcctgggggaccagcgcttctcctatggccagcccctcatcctgaccttccgggtgcccccaggggacagccccctgcctgtgcagctgcggctggagggcaccggcctggccctgagcctgcggcacagcagcctgagcggcccccaggatgctggccacccccgggaggtggagctgcgcttccacctgcaggagaccagtgaagatgtggccccacccctgccccccttccacttccagaggctgctggccaacctgaccagcctgcggctgcgggtgtccccaggccccagccctgctggccctgtgttcctgacagaggtgcggctgaccagcgcccggcccggcctgagccccccagcctcctgggtggagatctgcagctgccccaccggctacacaggccagttctgtgagagctgtgcccctggctacaagcgggagatgccccagggcggcccctatgccagctgtgtgccctgcacctgcaaccagcacggcacctgtgaccccaacacaggcatctgtgtgtgcagccaccacacagagggccccagctgtgagcgctgcctgcccggcttctacggcaacccctttgctggccaggctgatgactgccagccctgcccctgccccggccagagcgcctgcaccaccatccctgagagccgggaggtggtgtgcacccactgccccccaggccagaggggccgccgctgtgaggtgtgtgatgatggcttcttcggggaccccctgggcctgtttggccacccccagccctgccaccagtgccagtgcagcggaaatgtggaccccaatgctgtgggcaactgtgaccccctgagcggccactgcctgcgctgcctgcacaacaccactggagaccactgtgagcactgccaggagggcttctacggcagcgccctggcccccaggcctgctgacaagtgcatgccctgcagctgccacccccagggctctgtgtctgagcagatgccctgtgaccctgtgacaggccagtgcagctgcctgccccacgtgacagcccgggactgcagccgctgctacccaggcttctttgacctgcagcccggccggggctgccgcagctgcaagtgccaccccctgggcagccaggaggaccagtgccaccccaagacaggccagtgcacctgcaggcctggggtgacaggccaggcctgtgaccgctgccagctgggcttcttcggcttcagcatcaagggctgccgggcctgccgctgcagccccctgggcgccgccagcgcccagtgccatgaaaatggcacctgtgtgtgcaggcctggctttgagggctacaagtgtgaccgctgccacgacaacttcttcctgacagcagatggcacccactgccagcagtgccccagctgctacgccctggtgaaggaggaggccgccaagctgaaggcccggctgaccctgacagagggctggctgcagggcagtgactgtggcagcccctggggccccctggacatcctgctgggggaggcccccagaggagatgtgtaccagggccaccacctgctgcccggggcccgggaggccttcctggagcagatgatgagcctggagggcgctgtgaaggccgcccgggagcagctgcagaggctgaacaagggggcccgctgtgcccaggccggcagccagaagacctgcacccagctggccgacctggaggccgtgctggagagcagcgaggaggagatcctgcacgccgccgccatcctggccagcctggagatcccccaggagggccccagccagcccaccaagtggagccacctggccacagaggcccgggccctggcccggagccaccgggacacagccaccaagattgctgccacagcctggagggccctgctggccagcaacaccagctatgccctgctgtggaacctgctggagggccgggtggccctggagacccagagggacctggaggaccgctaccaggaggtgcaggccgcccagaaggccctgaggacagctgtggccgaggtgctgcctgaggccgagagcgtgctggccaccgtgcagcaggtgggcgctgacacagccccctacctggccctgctggccagccctggggccctgccccagaagagcagagctgaggacctgggcctgaaggccaaggccctggagaagacagtggcctcctggcagcacatggccacagaagctgcccggaccctgcagacagctgcccaggccaccctgcggcagacagagcccctgaccaagctgcaccaggaggcccgggccgccctgacccaggccagcagctctgtgcaggccgccaccgtgacagtgatgggcgcccggaccctgctggccgacctggagggcatgaagctgcagttcccccggcccaaggaccaggccgccctgcagaggaaggctgacagcgtgtctgaccggctgctggccgacaccaggaagaagaccaagcaggccgagaggatgctgggcaatgctgcccccctgagcagcagcgccaagaagaagggccgggaggccgaggtgctggccaaggacagcgccaagctggccaaggccctgctgcgggagaggaagcaggcccaccggcgggccagccggctgaccagccagacccaggccaccctgcagcaggccagccagcaggtgctggccagcgaggcccggcggcaggagctggaggaggccgagcgggtgggcgccggcctgtctgagatggagcagcagatccgggagagccgcatcagcctggagaaggacatcgagaccctgtctgagctgctggcccggctgggcagcctggacacccaccaggccccagcccaggccctgaatgagacccagtgggccctggagcggctgcggctgcagctgggcagccctggcagcctgcagaggaagctgagcctgctggagcaggagagccagcagcaggagctgcagatccagggctttgaaagtgacctggccgagatccgggctgacaagcagaacctggaggccatcctgcacagcctgcctgagaactgtgcctcctggcagtag

SEQ ID NO: 161462 - DNA, 1590 bp, Artificial Sequence
  derived and/or modified sequence
atggccgccgccgccctgctgctgggcctggccctgctggccccccgcgcggcaggtgccggcatgggagcttgctacgacggagccggacgcccccagcgttgtctgccagtttttgaaaacgccgcattcggccgtctggcacaggcttctcacacctgtggttcccctccagaggatttttgtccacatgttggtgcagcaggtgcaggcgctcattgccaaaggtgtgacgctgcagatccgcagaggcatcacaacgcatcataccttacagactttcacagtcaggatgagagcacctggtggcagagcccaagtatggcttttggtgttcagtaccctacaagtgtgaacatcacacttcggcttggaaaggcctatgagattacgtatgtgagattaaaattccatacttcacgaccagagtccttcgccatatataagagaagtcgagctgatggaccctgggaaccgtatcagttctactcagcctcctgccagaagacctatggtaggcccgaaggccaatacctgcggccaggtgaggacgagagagttgccttctgtacatcagaattttccgacatatcgcccctgagtggcgggaatgtcgccttcagcacactggaaggcaggccgagcgcatataacttcgaggaatcccccggactgcaagagtgggtaacctctacagagttactgattagcctggacaggctgaacacgtttggcgatgacatttttaaggatccaaaggtgctccaaagctactattatgccgtgtcagattttagtgttggaggcagatgcaaatgcaatggccacgcctctgagtgcgggcctgatgtggccggccaactcgcttgcaggtgtcaacacaacacaactggcactgactgtgagcgctgcttgcctttttttcaagatcgcccctgggcacgcggaactgccgaggccgcgcacgagtgcctgccttgcaactgttcaggcagatccgaggaatgcactttcgaccgtgaactgtttagatcaactggtcatggaggccggtgccatcattgcagggaccacacggccggaccacactgtgagcggtgtcaggaaaatttctaccactgggacccgcggatgccttgccagccgtgtgattgtcagtctgccggtagtctccacctgcagtgtgatgataccggtacctgcgcttgcaaacctaccgtgacgggatggaaatgtgacagatgcctcccaggttttcactcccttagtgagggaggatgccggccatgcacatgcaacccagctggatcacttgacacctgtgatccccgctcgggccgatgtccctgcaaggagaacgtcgagggcaacctctgcgaccggtgcaggcctggcaccttcaatctccaacctcacaaccccgccggccggagttgcaggtcccgggcatcccgagtcacaagtccccgctccgccccgaccaaccgaacctggaggccgttctgcaccgcttgcccgaggactgtacccgcaggctctgaagggtgcccggacccacggcacactttaccccacttacttttcacgtag

SEQ ID NO: 161463 - DNA, 4728 bp, Artificial Sequence
  derived and/or modified sequence
atggccgccgccgccctgctgctgggcctggccctgctggccccccgcgctgcgggcgccggtatgggtgcttgctatgacggagcaggcagacctcagagatgcctgccagtgttcgagaatgcggccttcggtcgccttgcccaggcctcccacacttgcgggagccctcctgaagacttctgcccccacgtcggcgccgccggggcaggcgcccactgccagaggtgcgacgctgctgacccacaaaggcaccataacgctagttatctgaccgattttcacagccaggatgagagtacctggtggcagagccctagcatggccttcggggttcagtaccccacatctgttaacataacgctgaggctgggcaaggcgtacgagatcacctacgtgaggctgaagttccatacatctagacctgagtcgttcgccatctacaaacgcagtagagcagatggtccgtgggagccctaccagttctactcagccagctgccagaaaacttacggacgtcctgagggacaatacctgaggccaggcgaggatgaacgagtggccttttgtacttccgaattctccgacatctccccacttagcggagggaacgtggctttctcaacacttgaaggccgccctagcgcctataatttcgaggaaagtcctggattgcaggagtgggtgacatctacagagctgttaatcagcctcgataggctcaacactttcggcgatgatatttttaaggatccaaaggtgctgcagagctactactacgcagtgtccgacttctctgtcggtggaaggtgcaaatgcaacggccacgcatccgagtgcggacctgacgtcgccggtcagctagcttgtaggtgccagcacaatacgacaggaaccgactgcgaacggtgtctgcctttctttcaagatcgaccctgggccaggggcaccgcagaagctgcccatgagtgtttaccctgcaattgctcagggcgctctgaagaatgcacatttgaccgggaacttttcaggagcacagggcacggcggacgctgccatcattgcagggatcacaccgcagggccacactgcgaacggtgtcaggagaatttctaccattgggacccccggatgccatgccagccatgtgattgccaaagtgcaggctccctgcacctgcagtgcgatgatacgggaacatgtgcttgtaagcccacggtgactggctggaagtgcgatagatgcctacctggatttcacagtttgagcgaagggggttgccgaccctgcacctgtaatcccgccgggtcgcttgatacctgcgacccgcggtcggggagatgcccatgtaaggagaatgtggaaggcaatctttgtgataggtgtagaccgggcaccttcaatttgcagcctcacaaccccgccggatgctcttcttgtttttgctatggccacagcaaggtatgcgcatccactgcacagtttcaggtgcatcacatcctcagcgactttcaccagggcgccgagggctggtgggccagaagtgtgggtggcagcgagcatccaccccagtggtcccccaatggcgtgttgcttagcccagaggatgaggaggagctgaccgctcccgaaaagttcttaggggaccagcgtttcagttacgggcagccccttattctgacgttccgtgtcccgcccggcgatagcccgctgccggtccagctgcggctggagggcacaggcttggccctgtcgcttaggcacagctccctatcagggccccaggatgccggacatccaagggaggtggaactgcgtttccacctgcaggaaactagcgaggacgttgcgcccccattgccaccattccacttccagcggcttctggcaaacctgacctctcttcgcttgagggtgtcaccgggcccatcccccgctggaccagtatttctgacagaagtccggctgacaagcgctcggcccggcctgtcccctccggccagctgggttgagatctgtagttgtccgaccggatacactgggcaattctgcgagtcttgtgcgcccggctacaagcgagaaatgccgcagggaggcccttatgcttcttgtgtcccctgcacttgtaatcagcacggaacttgcgaccccaatacaggaatttgcgtgtgttcacaccatacagagggaccctcatgtgagcggtgtctccccggtttttacggaaacccattcgccggtcaggctgacgactgtcagccatgcccgtgtccagggcagtctgcttgtaccacaatccccgagtcccgggaagtcgtgtgtacacactgtccccccgggcaacggggccgccgatgcgaagtgtgcgatgatggctttttcggagaccccctgggccttttcggccacccacaaccttgtcaccagtgccagtgttctgggaatgtggaccccaacgccgtcgggaattgcgacccgctcagtggacattgtctcaggtgcctgcacaacacaaccggcgatcactgcgaacattgtcaagaaggcttctacggctcagccttagcacctaggcccgcagacaagtgcatgccttgttcttgtcacccgcagggaagcgtttctgaacaaatgccgtgtgaccccgtcaccgggcagtgctcctgtctccctcacgttaccgcccgagattgttcccgctgctatcccggtttctttgacctgcagcccgggaggggttgtcgttcatgtaaatgtcatccactaggtagtcaggaggaccagtgtcatcccaaaaccggccagtgtacctgtagacctggcgttaccggccaggcctgcgaccggtgccaactgggtttcttcggattctcaataaaagggtgcagagcatgccggtgctcacccctcggcgctgcaagcgcacagtgccatgagaatggaacgtgcgtgtgccgaccaggctttgagggctacaaatgtgaccggtgccacgataacttctttctgaccgctgacgggactcactgccagcagtgcccgtcttgctatgctctggtcaaggaagaggccgcgaaactcaaagcccggctgactcttacggaaggctggcttcagggctccgactgcggctccccctggggtcctctggatatcctgctgggcgaagctcccaggggggatgtgtatcaagggcaccatctgctgccaggtgctagagaggcctttttagagcaaatgatgtcgcttgaaggagcggtgaaggctgcacgggaacagctccaacgactcaacaagggtgcacgctgcgcccaagctggatcacagaagacatgcacccaactcgctgacctggaagccgtgctggagagttctgaggaagaaattctgcatgccgccgctattttggcaagcctcgaaattccgcaggaggggcctagccagcctaccaaatggagtcatctggccactgaggccagggctctcgcacgttcacatcgggatacggccactaagatcgccgccacggcctggagggcccttcttgcttcgaatacctcctatgcactgttatggaatctgcttgagggccgcgtcgctctggagacacagcgagacctggaagacaggtaccaggaagtacaggctgcccagaaggctcttcggacagccgtcgcagaagtgcttccagaagctgagagcgttctggctaccgtgcaacaggtaggcgccgatactgctccatacttggctttgcttgcatcccctggagccctgcctcagaaatcccgagcagaagatctcggccttaaggcaaaggctttggagaagaccgttgcctcctggcagcatatggctacagaggccgcacgcacgttacaaacggcagcccaggccaccctgcgacagacagagccactgacgaaattgcaccaggaagctcgagctgctctaacacaagccagcagctctgtccaagcagctactgtcactgtgatgggcgctagaacccttctggccgatcttgagggaatgaagcttcagtttccccgccccaaggaccaggctgcactgcagcggaaggccgacagcgtgagtgacaggctgctggcagataccaggaaaaagacaaagcaggctgagcgcatgctgggcaatgccgctcccctcagttcttctgccaaaaagaaaggacgcgaggccgaagtgttggctaaggactcagctaagctggctaaagcactgttaagggaaagaaagcaggcgcaccgtcgggccagcagacttacttcccagactcaggccacacttcagcaggcatcccagcaggtgctggccagtgaagcccgtaggcaggagctcgaagaggctgagcgcgttggagctggcctgagcgaaatggagcagcagattagggaaagcagaatctcccttgagaaagacatcgagacactttccgaattacttgcgcggttagggagcctggatacacaccaggcccccgcgcaggccctgaacgaaacccagtgggccttggaaagactgcgattacagttgggcagccctggctcgctacaaagaaaactgtctctcctcgagcaggagtcgcagcagcaggagttgcagatccagggattcgaatccgacttggctgagatcagagctgacaaacagaatttagaggctatcctgcatagtctcccagagaattgcgctagctggcagtag

SEQ ID NO: 161464 - DNA, 1590 bp, Artificial Sequence
  derived and/or modified sequence
atggctgccgcagccttgctgctggggctggccttattggcacccagagctgctggagcaggcatgggcgcttgctacgatggagcaggtcgtcctcagcggtgtcttccggtgttcgaaaacgccgcatttgggagactggcgcaggcctcacatacatgcggctcccccccagaggacttctgccctcatgtgggggcagcaggcgcaggcgcacattgccagaggtgcgacgctgccgaccctcaacgccaccacaatgcctcatacttaaccgattttcactcacaggatgagtcaacttggtggcagtcaccctcgatggccttcggtgtccagtaccccactagcgttaatatcacactcaggcttgggaaagcgtacgaaattacctacgttcgtctaaaatttcacacctcgcgtcctgagtctttcgcaatttataaaagaagcagggccgacggcccttgggaaccctatcaattttactccgcatcctgccagaagacgtacggacgaccagaaggccagtatctcagaccaggtgaggatgagcgagtcgccttctgtaccagtgaattttctgacattagccccctctccggcggaaacgtggcattttctaccctcgaaggcagaccgagtgcttataatttcgaggagtcgcctggcctgcaggagtgggtcacatctactgagctgctgatcagtctcgaccgcctcaacaccttcggtgatgacatttttaaagaccctaaggtcctgcaatcgtactactacgccgtgtctgatttcagtgtgggcggacgttgtaaatgtaacggccacgcctccgagtgcggtccagacgtggccggacagctcgcctgcaggtgccagcacaacaccacaggcaccgattgcgaaagatgtctacccttttttcaggaccgaccctgggctcgcggaaccgctgaggccgctcacgagtgtctgccttgcaattgctccggacgaagcgaggagtgcacatttgatcgagagctgttccggtccaccggtcacggcggaagatgccaccattgtagggaccatacggctggtcctcactgtgagagatgtcaggagaatttctaccactgggatcctcggatgccttgccagccatgtgactgtcagtcagccggttctctgcacctgcagtgtgacgatacaggtacatgcgcctgcaaacctaccgtcactggctggaagtgcgatagatgtctgccaggctttcatagcctctcggaaggtggctgtaggccgtgcacctgcaatcctgccggaagcctggatacctgtgatccgagaagcggaagatgtccctgtaaagagaatgtagaaggaaacttgtgtgaccgctgccggcctggcacctttaacttacaaccccacaatcctgccggtcgttcctgtagatcaagggcttctagagtgaccagtcccaggtcagctccaactaatcgcacgtggagacccttctgcacagcctgccccagaactgtgcccgctggtagcgagggttgccctgatccacggcataccctgccgcaccttctcttcacgtag

SEQ ID NO: 161465 - DNA, 4728 bp, Artificial Sequence
  derived and/or modified sequence
atggccgctgccgcactgctccttggccttgctctgctggctccacgggcagcgggagctggcatgggggcttgttacgatggagcaggacggccacagcgttgtttgcctgtgtttgagaacgcagcatttggcaggctagcacaggccagccatacgtgcggatcacctcccgaggatttttgtcctcacgtgggagctgccggtgcgggagctcactgccagcgttgcgacgcagccgaccctcaaaggcaccacaatgctagctatttgactgactttcattcgcaagatgagtctacttggtggcagtctccaagcatggcctttggcgtccaataccccacaagcgtgaacatcactctccgtttgggcaaggcgtatgagattacatacgtgcggctgaagttccatacttcccggcctgagtcctttgccatctacaaaagaagtcgcgcagatgggccatgggaaccctatcagttctactctgcttcctgccaaaaaacctacggacggcctgaaggccagtatctgcgacctggggaggacgagcgcgtcgccttctgtacaagcgagttttcagatatctctcccctgtccgggggaaacgtggcgttctccacgctagaggggagaccatcagcctataattttgaagaaagccctggtctgcaggagtgggtgacatccacagaactgcttatctctctggaccggctgaacacatttggagacgacatatttaaggatcctaaagtgctgcagtcatattactacgctgtatccgacttcagcgtcgggggtcgatgtaaatgtaatggacatgccagcgagtgtggacccgacgttgccggacagctggcttgccggtgtcagcacaacactacagggaccgactgtgagcgctgcctgccgttcttccaagatagaccctgggcaaggggcacagccgaagctgcacatgagtgtctgccatgtaactgtagcgggagatccgaagaatgtacctttgaccgtgagctcttccgctccacagggcatggcggacgctgccaccactgcagagaccacacagccggaccacattgcgagagatgccaagaaaatttttaccactgggatcctcggatgccatgccaaccttgcgactgccagagcgctggatcgttgcatctgcagtgtgatgataccggtacgtgcgcctgcaaaccaacagttaccggctggaaatgtgacaggtgcctgcccggattccatagtctgtccgaaggtgggtgtcggccttgtacctgtaatcccgcaggctcactggatacctgcgatcctaggtccgggcgatgtccttgtaaggaaaacgttgagggaaatctgtgtgatcggtgccgccctgggacttttaatctgcaaccacacaaccctgcgggatgcagtagttgcttctgctatggtcactctaaggtctgcgcatcaactgctcagttccaagtccaccatattctgagcgactttcatcagggcgctgaagggtggtgggcaaggagcgtaggcggtagtgagcatcctccacaatggtctcccaacggggtgctgctgagcccagaggacgaggaagagctgactgcccctgagaaattcttgggagatcagaggttcagttacggccagccactcatcttgacttttcgagttcccccaggcgactccccactccctgtacagctgagactagaaggaaccgggttggctttaagcctgagacactctagcctttctggaccacaggatgcgggacacccaagagaagtcgaactacgcttccatctacaagagacgtcggaggacgtggcaccccctctgccgcctttccactttcagcggctcctcgctaatctaaccagtttaaggctgagggtctctcccggtcccagccccgcaggcccagttttccttactgaggtgcgcctgacctcggcacggcctggtctatctccccctgcgtcctgggtggaaatttgttcctgtccaacaggatacaccggacagttttgcgaaagttgcgcacccggttacaagagagagatgcctcagggaggcccatacgccagctgtgtgccctgcacatgcaaccagcatggaacctgcgatcccaacaccggaatttgcgtttgttcacaccacactgagggccctagttgtgaacgctgcctgccaggattttatgggaaccccttcgcaggccaggcagatgattgccagccctgtccctgtcccggacagagtgcctgcacaaccattccagagtctcgtgaagtcgtgtgtacacattgtccgcctggccagcgcggaaggcggtgcgaggtatgcgacgatggattcttcggagatcccctgggcctcttcggccatccccagccctgccatcagtgtcagtgcagcggaaacgtcgatccaaatgcagttggaaactgcgatccgctgtctggccactgcctcagatgtttgcacaataccaccggggatcactgcgaacactgccaggagggcttctacggcagcgcccttgcgcctcgcccagcggacaagtgtatgccatgtagctgtcatcctcagggttcagtgagcgaacaaatgccttgtgatccagtgactggacagtgttcatgcctcccccacgtcactgccagagactgtagccgttgctatccgggattctttgacctccagcccggacggggatgtcggtcatgcaagtgtcaccctctggggtcccaggaggatcagtgccacccaaaaaccggccaatgcacttgtaggccgggagttaccgggcaagcttgcgacaggtgccaattgggtttttttggatttagcatcaagggatgcagggcatgtcgatgctcaccgctcggggcagcctccgcccaatgtcacgagaatggtacctgcgtgtgtcgacccggatttgagggctacaaatgcgataggtgtcatgataatttttttctcacggctgacgggacacattgtcagcagtgtccttcttgttacgctctcgtgaaggaagaagctgctaagctgaaagctagactgaccctgacagaaggttggcttcaaggttcagattgcgggtcaccttggggcccactggatatcttgctgggcgaagctcctcgaggagacgtgtatcaaggacatcatctcctgcctggtgcacgggaggcctttctggaacagatgatgagtctggagggtgctgtcaaggccgctcgggagcagctgcagaggctgaacaagggtgccagatgtgctcaagctgggagccagaaaacttgcacacaattagccgatttagaagctgtgctggagtcttctgaagaggagatattacacgccgcagccatactggcctctttggaaatcccccaggagggcccaagccagcctacaaagtggtcccacctcgctacagaagctcgcgctctggctcggtctcatcgcgacaccgctaccaagattgccgctaccgcttggcgcgctttgttggcttccaatacctcttatgcccttttatggaacctgctcgagggccgagtcgctctggaaacccagagagatctggaagaccgataccaggaggttcaggctgcccagaaggcgctgcgaacggctgtagctgaagtgcttccagaggctgagtctgtccttgccacagtccagcaggtgggcgcagacactgcaccttatctggcactgctggccagccccggagctcttccgcagaaaagtcgcgcagaggatttaggactgaaggccaaggctctcgaaaagactgtggccagctggcagcatatggcaaccgaggccgctcgcaccctccagaccgcggctcaggccactctccgacagacagagcctcttacaaagctccaccaggaagctcgagcagccctcacacaggcttccagtagcgtgcaggcagctacggtgaccgtgatgggtgctcgcacgctgctggcagatctcgagggtatgaaattgcagttccccaggcccaaggatcaggctgccttacagagaaaggccgacagcgtgagcgaccggctgctggccgacaccagaaagaagacaaaacaggcggaacgaatgctgggaaacgccgcaccactaagttcctcggctaaaaagaaaggacgggaggcggaagtgctagccaaggatagcgccaaactggcaaaggcgcttctgagagaacgcaagcaggctcatagacgtgcatcaaggctaacatctcagacccaggccacgctccaacaggcttctcagcaggttctggcgtcggaggctaggaggcaagagctggaggaggctgagcgcgtgggtgccggtctgtccgaaatggagcaacaaatccgggaatctcggatatcattggaaaaggacattgaaacactaagcgagctcctcgcgagactcggtagcttagatacacatcaggctcctgcccaggctctgaacgagacgcagtgggccctcgagcgcttacgactccaactgggaagtccaggcagtctccagaggaagctgagcttactcgaacaagagtcacagcagcaggagctgcagattcaggggtttgagtcggacctggccgagatccgagccgataagcagaatctcgaggctattctgcactctctccccgagaattgtgcgtcgtggcagtag

SEQ ID NO: 161466 - DNA, 1590 bp, Artificial Sequence
  derived and/or modified sequence
atggccgccgccgccctgctgctgggcctggccctgctggcccccagagccgccggcgccggcatgggcgcctgctacgacggcgccggcagaccccagagatgcctgcccgtgttcgagaacgccgccttcggcagactggcccaggccagccacacctgcggcagcccccccgaggacttctgcccccacgtgggcgccgccggcgccggcgcccactgccagagatgcgacgccgccgacccccagagacaccacaacgccagctacctgaccgacttccacagccaggacgagagcacctggtggcagagccccagcatggccttcggcgtgcagtaccccaccagcgtgaacatcaccctgagactgggcaaggcctacgagatcacctacgtgagactgaagttccacaccagcagacccgagagcttcgccatctacaagagaagcagagccgacggcccctgggagccctaccagttctacagcgccagctgccagaagacctacggcagacccgagggccagtacctgagacccggcgaggacgagagagtggccttctgcaccagcgagttcagcgacatcagccccctgagcggcggcaacgtggccttcagcaccctggagggcagacccagcgcctacaacttcgaggagagccccggcctgcaggagtgggtgaccagcaccgagctgctgatcagcctggacagactgaacaccttcggcgacgacatcttcaaggaccccaaggtgctgcagagctactactacgccgtgagcgacttcagcgtgggcggcagatgcaagtgcaacggccacgccagcgagtgcggccccgacgtggccggccagctggcctgcagatgccagcacaacaccaccggcaccgactgcgagagatgcctgcccttcttccaggacagaccctgggccagaggcaccgccgaggccgcccacgagtgcctgccctgcaactgcagcggcagaagcgaggagtgcaccttcgacagagagctgttcagaagcaccggccacggcggcagatgccaccactgcagagaccacaccgccggcccccactgcgagagatgccaggagaacttctaccactgggaccccagaatgccctgccagccctgcgactgccagagcgccggcagcctgcacctgcagtgcgacgacaccggcacctgcgcctgcaagcccaccgtgaccggctggaagtgcgacagatgcctgcccggcttccacagcctgagcgagggcggctgcagaccctgcacctgcaaccccgccggcagcctggacacctgcgaccccagaagcggcagatgcccctgcaaggagaacgtggagggcaacctgtgcgacagatgcagacccggcaccttcaacctgcagccccacaaccccgccggcagaagctgcagaagcagagccagcagagtgaccagccccagaagcgcccccaccaacagaacctggagacccttctgcaccgcctgccccagaaccgtgcccgccggcagcgagggctgccccgaccccagacacaccctgccccacctgctgttcacctag

SEQ ID NO: 161467 - DNA, 4728 bp, Artificial Sequence
  derived and/or modified sequence
atggccgccgccgccctgctgctgggcctggccctgctggcccccagagccgccggcgccggcatgggcgcctgctacgacggcgccggcagaccccagagatgcctgcccgtgttcgagaacgccgccttcggcagactggcccaggccagccacacctgcggcagcccccccgaggacttctgcccccacgtgggcgccgccggcgccggcgcccactgccagagatgcgacgccgccgacccccagagacaccacaacgccagctacctgaccgacttccacagccaggacgagagcacctggtggcagagccccagcatggccttcggcgtgcagtaccccaccagcgtgaacatcaccctgagactgggcaaggcctacgagatcacctacgtgagactgaagttccacaccagcagacccgagagcttcgccatctacaagagaagcagagccgacggcccctgggagccctaccagttctacagcgccagctgccagaagacctacggcagacccgagggccagtacctgagacccggcgaggacgagagagtggccttctgcaccagcgagttcagcgacatcagccccctgagcggcggcaacgtggccttcagcaccctggagggcagacccagcgcctacaacttcgaggagagccccggcctgcaggagtgggtgaccagcaccgagctgctgatcagcctggacagactgaacaccttcggcgacgacatcttcaaggaccccaaggtgctgcagagctactactacgccgtgagcgacttcagcgtgggcggcagatgcaagtgcaacggccacgccagcgagtgcggccccgacgtggccggccagctggcctgcagatgccagcacaacaccaccggcaccgactgcgagagatgcctgcccttcttccaggacagaccctgggccagaggcaccgccgaggccgcccacgagtgcctgccctgcaactgcagcggcagaagcgaggagtgcaccttcgacagagagctgttcagaagcaccggccacggcggcagatgccaccactgcagagaccacaccgccggcccccactgcgagagatgccaggagaacttctaccactgggaccccagaatgccctgccagccctgcgactgccagagcgccggcagcctgcacctgcagtgcgacgacaccggcacctgcgcctgcaagcccaccgtgaccggctggaagtgcgacagatgcctgcccggcttccacagcctgagcgagggcggctgcagaccctgcacctgcaaccccgccggcagcctggacacctgcgaccccagaagcggcagatgcccctgcaaggagaacgtggagggcaacctgtgcgacagatgcagacccggcaccttcaacctgcagccccacaaccccgccggctgcagcagctgcttctgctacggccacagcaaggtgtgcgccagcaccgcccagttccaggtgcaccacatcctgagcgacttccaccagggcgccgagggctggtgggccagaagcgtgggcggcagcgagcaccccccccagtggagccccaacggcgtgctgctgagccccgaggacgaggaggagctgaccgcccccgagaagttcctgggcgaccagagattcagctacggccagcccctgatcctgaccttcagagtgccccccggcgacagccccctgcccgtgcagctgagactggagggcaccggcctggccctgagcctgagacacagcagcctgagcggcccccaggacgccggccaccccagagaggtggagctgagattccacctgcaggagaccagcgaggacgtggccccccccctgccccccttccacttccagagactgctggccaacctgaccagcctgagactgagagtgagccccggccccagccccgccggccccgtgttcctgaccgaggtgagactgaccagcgccagacccggcctgagcccccccgccagctgggtggagatctgcagctgccccaccggctacaccggccagttctgcgagagctgcgcccccggctacaagagagagatgccccagggcggcccctacgccagctgcgtgccctgcacctgcaaccagcacggcacctgcgaccccaacaccggcatctgcgtgtgcagccaccacaccgagggccccagctgcgagagatgcctgcccggcttctacggcaaccccttcgccggccaggccgacgactgccagccctgcccctgccccggccagagcgcctgcaccaccatccccgagagcagagaggtggtgtgcacccactgcccccccggccagagaggcagaagatgcgaggtgtgcgacgacggcttcttcggcgaccccctgggcctgttcggccacccccagccctgccaccagtgccagtgcagcggcaacgtggaccccaacgccgtgggcaactgcgaccccctgagcggccactgcctgagatgcctgcacaacaccaccggcgaccactgcgagcactgccaggagggcttctacggcagcgccctggcccccagacccgccgacaagtgcatgccctgcagctgccacccccagggcagcgtgagcgagcagatgccctgcgaccccgtgaccggccagtgcagctgcctgccccacgtgaccgccagagactgcagcagatgctaccccggcttcttcgacctgcagcccggcagaggctgcagaagctgcaagtgccaccccctgggcagccaggaggaccagtgccaccccaagaccggccagtgcacctgcagacccggcgtgaccggccaggcctgcgacagatgccagctgggcttcttcggcttcagcatcaagggctgcagagcctgcagatgcagccccctgggcgccgccagcgcccagtgccacgagaacggcacctgcgtgtgcagacccggcttcgagggctacaagtgcgacagatgccacgacaacttcttcctgaccgccgacggcacccactgccagcagtgccccagctgctacgccctggtgaaggaggaggccgccaagctgaaggccagactgaccctgaccgagggctggctgcagggcagcgactgcggcagcccctggggccccctggacatcctgctgggcgaggcccccagaggcgacgtgtaccagggccaccacctgctgcccggcgccagagaggccttcctggagcagatgatgagcctggagggcgccgtgaaggccgccagagagcagctgcagagactgaacaagggcgccagatgcgcccaggccggcagccagaagacctgcacccagctggccgacctggaggccgtgctggagagcagcgaggaggagatcctgcacgccgccgccatcctggccagcctggagatcccccaggagggccccagccagcccaccaagtggagccacctggccaccgaggccagagccctggccagaagccacagagacaccgccaccaagatcgccgccaccgcctggagagccctgctggccagcaacaccagctacgccctgctgtggaacctgctggagggcagagtggccctggagacccagagagacctggaggacagataccaggaggtgcaggccgcccagaaggccctgagaaccgccgtggccgaggtgctgcccgaggccgagagcgtgctggccaccgtgcagcaggtgggcgccgacaccgccccctacctggccctgctggccagccccggcgccctgccccagaagagcagagccgaggacctgggcctgaaggccaaggccctggagaagaccgtggccagctggcagcacatggccaccgaggccgccagaaccctgcagaccgccgcccaggccaccctgagacagaccgagcccctgaccaagctgcaccaggaggccagagccgccctgacccaggccagcagcagcgtgcaggccgccaccgtgaccgtgatgggcgccagaaccctgctggccgacctggagggcatgaagctgcagttccccagacccaaggaccaggccgccctgcagagaaaggccgacagcgtgagcgacagactgctggccgacaccagaaagaagaccaagcaggccgagagaatgctgggcaacgccgcccccctgagcagcagcgccaagaagaagggcagagaggccgaggtgctggccaaggacagcgccaagctggccaaggccctgctgagagagagaaagcaggcccacagaagagccagcagactgaccagccagacccaggccaccctgcagcaggccagccagcaggtgctggccagcgaggccagaagacaggagctggaggaggccgagagagtgggcgccggcctgagcgagatggagcagcagatcagagagagcagaatcagcctggagaaggacatcgagaccctgagcgagctgctggccagactgggcagcctggacacccaccaggcccccgcccaggccctgaacgagacccagtgggccctggagagactgagactgcagctgggcagccccggcagcctgcagagaaagctgagcctgctggagcaggagagccagcagcaggagctgcagatccagggcttcgagagcgacctggccgagatcagagccgacaagcagaacctggaggccatcctgcacagcctgcccgagaactgcgccagctggcagtag

SEQ ID NO: 161468 - DNA, 1560 bp, Artificial Sequence
  derived and/or modified sequence
atggatgctgacgaaggccaggatatgtctcaggtgagtggaaaggaatccccaccagtctccgatacaccagacgaaggcgacgaaccgatgcccattcccgaggacctgagcaccacttccggcggccaacagtctagcaaatctgatagagtggtggcatccaacgttaaggtggagactcaatccgacgaagagaacggtcgcgcctgtgaaatgaatggtgaggagtgcgccgaagacctcaggatgctggacgcatctggcgaaaagatgaacggctcccacagagaccagggtagttctgcccttagcggtgtcggggggattcgcttgcccaacggaaagttgaagtgtgacatctgtgggataatatgcattggccctaacgtattgatggtgcataagaggagtcatacaggagagaggccctttcaatgtaaccaatgtggggcatctttcactcagaagggaaacctgctgaggcacatcaaattacactccggagagaagccatttaaatgccacctgtgtaactatgcttgtcgaagacgggacgcattaacaggacatctcagaacgcattctgtcgggaagccacacaagtgtggatattgtggccgatcgtacaagcaacggtcatccctcgaggagcacaaagagcgttgtcacaattatctcgagtctatgggcctgccagggaccctgtatcctgtaataaaagaggaaaccaaccacagcgaaatggcggaggatctatgtaaaatcggctctgagaggtcactggttttagataggctcgcctcaaacgtcgccaaacgaaagagcagcatgccacagaaatttctcggggataaggggctttctgacacaccctacgatagctctgcgtcttatgaaaaggagaatgaaatgatgaagtcacatgtcatggatcaggcgatcaacaatgctatcaattatctaggcgccgagtcactgaggccacttgtgcaaactcctcctggcggctccgaagtggttccagtgatttctcccatgtaccagcttcacaaacccctcgcagagggaacaccacggtctaaccactcagctcaggacagcgctgtggagaatctccttctgctgtcaaaagccaagctggtgccttctgagagggaagcctcaccctctaactcatgtcaagactcgacagatacagagagtaataatgaggagcagagatcaggtcttatctacctgacaaaccacattgcgccgcatgcccggaacggactatctctcaaagaagaacatagggcgtatgacctccttcgcgctgcttctgagaacagccaggatgccctgcgcgtagtatctactagcggcgagcaaatgaaggtgtacaagtgcgaacactgccgggtgctctttctggaccacgtgatgtacaccattcacatgggttgtcacggatttagggacccttttgagtgtaacatgtgtggttatcactcgcaagaccggtatgagttctcttcacacatcaccagaggcgagcaccgatttcatatgagttag

SEQ ID NO: 161469 - DNA, 1560 bp, Artificial Sequence
  derived and/or modified sequence
atggatgctgatgagggccaggacatgagccaggtgtctgggaaggagagcccccctgtgtctgacaccccagatgaaggagatgagcccatgcccatccctgaggacctgagcaccaccagcggcggccagcagagcagcaagagtgacagagtggtggccagcaatgtgaaggtggagacccagagtgatgaggagaatggccgggcctgtgagatgaatggagaagaatgtgccgaggacctgaggatgctggatgccagcggggagaagatgaatggcagccaccgggaccagggcagcagcgccctgtctggagtgggcggcatccggctgcccaacgggaagctgaagtgtgacatctgtggcatcatctgcatcggccccaacgtgctgatggtgcacaagaggagccacactggagagcggcccttccagtgcaaccagtgtggggccagcttcacccagaagggcaacctgctgcggcacatcaagctgcacagcggggagaagcccttcaagtgccacctgtgcaactatgcctgcagaagaagagatgccctgaccggccacctgcggacccacagcgtgggcaagccccacaagtgtggctactgcggccgcagctacaagcagaggagcagcctggaggagcacaaggagcgctgccacaactacctggagagcatgggcctgcccggcaccctgtaccctgtgatcaaggaggagaccaaccacagcgagatggccgaggacctgtgcaagattggcagcgagaggagcctggtgctggaccggctggccagcaatgtggccaagaggaagagctccatgccccagaagttcctgggggacaagggcctgagtgacaccccctatgacagcagcgccagctatgagaaggaaaatgagatgatgaagagccacgtgatggaccaggccatcaacaatgccatcaactacctgggcgctgagagcctgcggcccctggtgcagaccccacctgggggcagcgaggtggtgcctgtgatcagccccatgtaccagctgcacaagcccctggccgagggcacccccaggagcaaccacagcgcccaggacagcgctgtggagaacctgctgctgctgagcaaggccaagctggtgcccagcgagcgggaggccagccccagcaacagctgccaggacagcacagacacagagagcaacaatgaggagcagaggagcggcctcatctacctgaccaaccacatcgcccctcatgccagaaatggcctgagcctgaaggaggagcaccgggcctatgacctgctgcgggccgccagcgagaacagccaggatgccctgcgggtggtgtccaccagcggggagcagatgaaggtgtacaagtgtgagcactgccgggtgctcttcctggaccacgtgatgtacaccatccacatgggctgccacggcttccgggacccctttgagtgcaacatgtgtggctaccacagccaggacagatatgagttcagcagccacatcaccagaggagagcaccgcttccacatgtcctag

SEQ ID NO: 161470 - DNA, 1560 bp, Artificial Sequence
  derived and/or modified sequence
atggacgccgacgagggccaggacatgagccaggtgagcggcaaggaatctccacccgtaagcgacactcccgacgagggagacgagccgatgcctattcccgaggacctaagcactacatcaggagggcagcagtccagtaagagcgacagggtcgtggcatccaacgtgaaggtagagacccaatctgacgaagagaatggtcgggcttgcgaaatgaacggtgaggagtgtgctgaagatcttcggatgctcgacgcctccggggagaaaatgaacggtagccacagagaccaggggtcttcagctctgtccggggtaggaggaatccggctgcccaacggaaaactgaaatgtgatatttgcgggatcatttgtataggccctaacgtgttgatggtacacaagcggagccatactggggagagacctttccagtgcaatcagtgtggcgcaagttttacccagaagggtaacttgctgagacacatcaaactgcattccggtgaaaaaccatttaagtgccatctgtgtaattacgcttgtcgccgcagggacgcgctaacaggtcatcttagaacacattcagtcggcaagcctcacaagtgtggatattgcggacgctcgtataaacagagaagctccctggaggagcacaaggagcggtgccataactaccttgagagtatgggcctgcccgggaccctgtacccagtgatcaaggaggagaccaaccacagcgagatggccgaggatctgtgtaagattggctccgagagaagtctggttctggaccgactggcttcgaacgtcgccaaaaggaagagcagcatgccacaaaagttcctgggggataagggacttagcgacacaccatatgatagcagtgcatcttacgagaaggagaacgaaatgatgaagagccatgtcatggaccaggccattaataacgccataaattacctgggcgctgagtcgctcagacctctggtccaaacccccccaggaggctccgaagtggtccccgtgatcagcccaatgtaccagcttcacaaacctcttgctgagggtaccccacgtagcaatcatagcgcgcaagacagcgctgtcgagaacctgcttcttctaagcaaggccaagctcgtgccaagcgagagagaagcctctccttccaattcatgtcaggactccactgacacagagtccaataacgaggagcagagatctggactgatatatcttacaaatcatatcgccccccatgccagaaatggcttgtctctgaaggaagagcaccgggcctacgatctgctacgagccgcaagcgagaacagccaggatgccctacgggtagtctcaacatcaggcgagcagatgaaagtgtataaatgcgagcattgtagagtgctcttcctagaccatgttatgtacactattcacatgggctgccatgggtttagagatccttttgagtgtaatatgtgcggatatcatagccaggatagatacgaattcagctcacacatcacacgaggagaacatcgattccatatgtcttag

SEQ ID NO: 161471 - DNA, 1560 bp, Artificial Sequence
  derived and/or modified sequence
atggatgctgatgagggtcaggatatgagtcaggtcagcggcaaggaaagcccaccagtctccgatacgccagatgaaggagacgagccaatgcctattcctgaagatctttccaccacaagcggcggacaacagtcttcgaaatctgatcgagtggtggcctcaaacgtcaaagtcgaaactcagtcagacgaagagaatggtcgcgcttgtgagatgaacggcgaggaatgtgccgaagatctgcgcatgctcgacgcatctggtgaaaaaatgaatgggagccacagagatcagggctcttccgcactctccggcgtcggtgggattaggctccctaacggaaagctgaaatgcgacatctgcggcatcatctgtatcgggccaaatgttctgatggttcataagcgttctcacaccggagagagacctttccagtgtaaccaatgcggcgcatccttcactcagaaagggaatcttctgcggcacatcaagctgcatagcggcgagaagccgttcaagtgtcatctgtgcaattacgcctgtcgcagacgggacgccctgaccggtcacctccggacgcatagcgtcggtaagcctcacaagtgcggttactgtgggcgtagctacaaacagcggtcaagcctagaagagcacaaagagcgatgccataattacctcgagtccatgggtttgccagggacactttacccagtcattaaggaggaaactaatcacagcgaaatggccgaggatctgtgcaagatcggttccgagagatctctcgtcctggatcgactcgctagtaacgttgctaaaaggaagtcctcaatgccccagaagttcctgggagataagggcctctctgatacaccttacgattcttctgctagctacgagaaggagaatgagatgatgaaatctcatgtaatggatcaggccataaacaacgccatcaattatctcggcgctgaaagtctgcggccactggtgcagaccccaccgggagggagcgaagttgtcccagtgatttctccaatgtaccaattacacaagcctctagccgaagggacacccagatctaatcactctgcccaagacagcgccgtggagaatttattattgctgtccaaggctaagttggttccctcggagcgggaggcatctccttcaaactcatgccaggattcgaccgacaccgaatccaataatgaggaacagcgcagtgggctcatctacctgactaaccacatcgcgcctcatgctagaaacggactgtctctgaaggaagagcaccgtgcttacgatctcttgagggccgctagcgagaattcacaggatgcccttcgggtagtgagtacatcaggagaacagatgaaggtctacaaatgtgaacactgcagggtgctgttcttagatcatgttatgtacaccatccacatgggctgtcacggctttcgggatccttttgagtgcaacatgtgtgggtaccatagccaggatcgctacgaattcagtagtcacatcacccgaggtgaacatcgatttcatatgtcatag

SEQ ID NO: 161472 - DNA, 1560 bp, Artificial Sequence
  derived and/or modified sequence
atggacgccgacgagggccaggacatgagccaggtgagcggcaaggagagcccccccgtgagcgacacccccgacgagggcgacgagcccatgcccatccccgaggacctgagcaccaccagcggcggccagcagagcagcaagagcgacagagtggtggccagcaacgtgaaggtggagacccagagcgacgaggagaacggcagagcctgcgagatgaacggcgaggagtgcgccgaggacctgagaatgctggacgccagcggcgagaagatgaacggcagccacagagaccagggcagcagcgccctgagcggcgtgggcggcatcagactgcccaacggcaagctgaagtgcgacatctgcggcatcatctgcatcggccccaacgtgctgatggtgcacaagagaagccacaccggcgagagacccttccagtgcaaccagtgcggcgccagcttcacccagaagggcaacctgctgagacacatcaagctgcacagcggcgagaagcccttcaagtgccacctgtgcaactacgcctgcagaagaagagacgccctgaccggccacctgagaacccacagcgtgggcaagccccacaagtgcggctactgcggcagaagctacaagcagagaagcagcctggaggagcacaaggagagatgccacaactacctggagagcatgggcctgcccggcaccctgtaccccgtgatcaaggaggagaccaaccacagcgagatggccgaggacctgtgcaagatcggcagcgagagaagcctggtgctggacagactggccagcaacgtggccaagagaaagagcagcatgccccagaagttcctgggcgacaagggcctgagcgacaccccctacgacagcagcgccagctacgagaaggagaacgagatgatgaagagccacgtgatggaccaggccatcaacaacgccatcaactacctgggcgccgagagcctgagacccctggtgcagaccccccccggcggcagcgaggtggtgcccgtgatcagccccatgtaccagctgcacaagcccctggccgagggcacccccagaagcaaccacagcgcccaggacagcgccgtggagaacctgctgctgctgagcaaggccaagctggtgcccagcgagagagaggccagccccagcaacagctgccaggacagcaccgacaccgagagcaacaacgaggagcagagaagcggcctgatctacctgaccaaccacatcgccccccacgccagaaacggcctgagcctgaaggaggagcacagagcctacgacctgctgagagccgccagcgagaacagccaggacgccctgagagtggtgagcaccagcggcgagcagatgaaggtgtacaagtgcgagcactgcagagtgctgttcctggaccacgtgatgtacaccatccacatgggctgccacggcttcagagaccccttcgagtgcaacatgtgcggctaccacagccaggacagatacgagttcagcagccacatcaccagaggcgagcacagattccacatgagctag

SEQ ID NO: 161473 - protein, 258 aa, Artificial Sequence
  derived and/or modified sequence
MKQILHPALETTAMTLFPVLLFLVAGLLPSFPANEDKDPAFTALLTTQTQVQREIVNKHNELRRAVSPPARNMLKMEWNKEAAANAQKWANQCNYRHSNPKDRMTSLKCGENLYMSSASSSWSQAIQSWFDEYNDFDFGVGPKTPNAVVGHYTQVVWYSSYLVGCGNAYCPNQKVLKYYYVCQYCPAGNWANRLYVPYEQGAPCASCPDNCDDGLCTNGCKYEDLYSNCKSLKLTLTCKHQLVRDSCKASCNCSNSIY

SEQ ID NO: 161474 - protein, 245 aa, Artificial Sequence
  derived and/or modified sequence
MTLFPVLLFLVAGLLPSFPANEDKDPAFTALLTTQTQVQREIVNKHNELRRAVSPPARNMLKMEWNKEAAANAQKWANQCNYRHSNPKDRMTSLKCGENLYMSSASSSWSQAIQSWFDEYNDFDFGVGPKTPNAVVGHYTQVVWYSSYLVGCGNAYCPNQKVLKYYYVCQYCPAGNWANRLYVPYEQGAPCASCPDNCDDGLCTNGCKYEDLYSNCKSLKLTLTCKHQLVRDSCKASCNCSNSIY

SEQ ID NO: 161475 - protein, 155 aa, Artificial Sequence
  derived and/or modified sequence
MTSLKCGENLYMSSASSSWSQAIQSWFDEYNDFDFGVGPKTPNAVVGHYTQVVWYSSYLVGCGNAYCPNQKVLKYYYVCQYCPAGNWANRLYVPYEQGAPCASCPDNCDDGLCTNGCKYEDLYSNCKSLKLTLTCKHQLVRDSCKASCNCSNSIY

SEQ ID NO: 161476 - DNA, 777 bp, Artificial Sequence
  derived and/or modified sequence
atgaagcagattctgcatcccgctcttgagaccactgctatgacactgtttcccgtgctactcttcctggtcgcaggcctgctcccgagcttccccgcaaatgaagacaaggaccctgccttcactgcgctgctcactacccaaacacaggtgcagagggagattgttaataaacacaacgaactcagaagagctgtttctccacccgcacggaatatgctcaagatggaatggaacaaagaggcagcagcgaacgcccagaagtgggcgaaccaatgtaattatcgtcactcaaaccccaaagacaggatgaccagcctaaagtgtggggaaaatttgtacatgtcttccgcatcgtccagttggtcacaggctattcagtcgtggttcgacgagtataacgattttgattttggcgtagggcctaagacacctaacgctgtggtcgggcactacacgcaggttgtgtggtacagttcttatctggttggatgcggcaacgcctactgtccaaaccagaaagtgctgaaatactattatgtgtgccagtactgcccagcaggaaactgggcgaacaggctatatgttccatatgagcagggcgcaccttgtgcgtcctgcccagacaactgcgacgacggcctgtgtacgaacggctgcaagtacgaagacctctacagtaactgtaagtccctgaagttaacattgacttgtaaacatcagctggttagggactcctgcaaggcatcctgtaactgcagtaacagcatctactag

SEQ ID NO: 161477 - DNA, 738 bp, Artificial Sequence
  derived and/or modified sequence
atgacgctcttcccagtgctgttgtttcttgtggccggtctgctccccagtttccccgcaaatgaagacaaggacccagcatttaccgccctcctaacaactcaaacgcaggtccagcgcgaaattgtgaataaacacaacgaactgcgaagagccgtgtctcctcctgcccgtaacatgctgaaaatggagtggaacaaggaggcagcggcaaatgcccagaaatgggccaaccaatgtaactacagacactccaacccgaaagatcggatgacatcactcaaatgtggagagaacctgtatatgtccagtgctagcagctcatggagtcaggctatccagtcttggtttgatgaatacaacgatttcgactttggcgttggcccaaagacccccaacgcagttgtcggacactacacccaggtcgtgtggtactcgtcgtacctcgtcggatgtggtaacgcctactgcccaaatcagaaagttctgaaatattactacgtttgtcagtactgcccggcagggaactgggccaaccggctttatgtgccctacgagcagggggcaccttgcgcgagctgtccagataattgtgacgacggtctgtgcaccaatggctgcaaatacgaggacctgtactcgaactgcaagtccttaaagctgaccctgacctgtaaacaccagttggtgcgagatagttgtaaagctagctgcaactgctcaaacagtatctactag

SEQ ID NO: 161478 - DNA, 468 bp, Artificial Sequence
  derived and/or modified sequence
atgactagtctcaagtgcggagaaaatttgtacatgtcatcagcctcctctagctggtctcaggccatccagtcctggttcgatgagtacaatgactttgactttggagtggggcctaagaccccaaacgccgtcgttggacactacacgcaagtggtgtggtacagcagctaccttgtggggtgtggcaatgcctattgcccaaatcagaaggtgttgaagtactactatgtgtgccagtattgtcctgctggcaattgggccaacagactgtatgtgccttacgaacagggcgctccctgtgccagctgccccgataattgcgatgatgggctgtgcacaaacgggtgtaagtatgaagatctgtactctaattgcaaatcgctcaagttgactcttacctgtaagcaccagcttgtacgggactcatgcaaggccagctgcaactgttctaacagcatatactag

SEQ ID NO: 161479 - DNA, 777 bp, Artificial Sequence
  derived and/or modified sequence
atgaaacagatcctccatcccgcgctggagactaccgccatgaccctttttcccgtgctactcttccttgttgcaggcctcctcccatcgtttccagcaaatgaagacaaagatccagctttcacggcattgttgactactcagacacaggtacagagggagatagtcaataaacataatgagctgcggcgcgctgtgagcccaccagctagaaacatgctaaaaatggaatggaataaagaggctgctgctaatgcacagaaatgggctaaccagtgtaactacaggcacagcaatccaaaggaccgcatgacttcactcaagtgtggagaaaacctttacatgagttctgcaagttcctcctggagccaggctattcagagctggttcgatgagtacaacgattttgatttcggcgtgggaccgaaaaccccaaatgctgtcgtcgggcactacacccaagtggtctggtacagctcctacctcgtggggtgtggcaatgcttattgccccaatcagaaagtgttaaagtattactacgtttgtcaatactgtcccgctggtaattgggctaacaggctttacgtgccttacgagcagggagccccatgcgcctcatgtcctgacaactgcgacgacgggctgtgtacaaatggatgcaagtacgaagacctgtatagtaactgcaaaagcttaaaactgactctaacatgtaagcatcagctggttcgagattcatgcaaggccagttgtaattgcagcaattccatttattag

SEQ ID NO: 161480 - DNA, 1033 bp, Artificial Sequence
  derived and/or modified sequence
gtcaatagatgaaacaaatacttcatcctgctctggaaaccactggaatggaacaaagaggctgcagcaaatgcccaaaagtgggcaaaccagtgcaattacagacacagtaacccaaaggatcgaatgacaagtctaaaatgtggtgagaatctctacatgtcaagtgcctccagctcatggtcacaagcaatccaaagctggtttgatgagtacaatgattttgactttggtgtagggccaaagactcccaacgcagtggttggacattatacacaggttgtttggtactcttcatacctcgttggatgtggaaatgcctactgtcccaatcaaaaagttctaaaatactactatgtttgccaatattgtcctgctggtaattgggctaatagactatatgtcccttatgaacaaggagcaccttgtgccagttgcccagataactgtgacgatggactatgcaccaatggttgcaagtacgaagatctctatagtaactgtaaaagtttgaagctcacattaacctgtaaacatcagttggtcagggacagttgcaaggcctcctgcaattgttcaaacagcatttattaaatacgcattacacaccgagtagggctatgtagagaggagtcagattatctacttagatttggcatctacttagatttaacatatactagctgagaaattgtaggcatgtttgatacacatttgatttcaaatgtttttcttctggatctgctttttattttacaaaaatatttttcatacaaatggttaaaaagaaacaaaatctataacaacaactttggatttttatatataaactttgtgatttaaatttactgaatttaattagggtgaaaattttgaaagttgtattctcatatgactaagttcactaaaaccctggattgaaagtgaaaattatgttcctagaacaaaatgtacaaaaagaacaatataattttcacatgaacccttggctgtagttgcctttcctagctccactctaaggctaagcatcttc

SEQ ID NO: 161481 - DNA, 738 bp, Artificial Sequence
  derived and/or modified sequence
atgacgctgttcccagtcctgctattcctggtggctggacttctccctagctttcccgccaacgaagacaaagatccagcttttaccgcactcctgacgacccagacccaggtccagagggaaatagtcaataagcacaacgagctccgccgcgctgtttctcctcccgctcggaacatgttgaaaatggagtggaacaaagaggcagccgccaacgcacagaagtgggcaaatcagtgtaactatagacactcgaaccctaaggaccggatgacctctctgaaatgcggcgagaacctgtatatgagcagcgccagctcaagctggtctcaggccattcagtcttggtttgacgagtacaatgatttcgacttcggagttggcccaaaaacgccgaatgcggtcgttggtcattacacacaagttgtttggtactccagctaccttgtaggttgtggcaatgcctattgtcctaaccaaaaagtgctaaaatactactatgtctgtcaatattgccctgcgggtaactgggccaacagattgtacgttccttatgaacagggcgccccatgtgcgtcctgccctgacaactgcgacgacgggctgtgcaccaacggctgtaagtacgaggacctttattccaactgtaaatcgctgaagctgactctcacatgtaaacaccaactggtaagagattcctgtaaagcatcctgcaattgctctaattctatctattag

SEQ ID NO: 161482 - DNA, 468 bp, Artificial Sequence
  derived and/or modified sequence
atgactagtctcaaatgtggtgagaacctgtacatgtcatccgcttccagttcatggtcacaagcaattcagtcctggttcgatgaatataacgactttgacttcggtgtcggtcctaagactcccaacgccgttgtgggccactatacacaggtcgtgtggtatagcagttaccttgtaggctgcggcaacgcctattgtccaaatcaaaaggtgctgaagtattattatgtatgtcaatattgtcccgcggggaattgggccaacaggctgtacgtcccatatgagcagggagctccttgtgcaagctgtcccgacaattgtgacgacggactgtgcactaatggttgcaagtacgaggacctctattctaactgcaagagcctaaagttaacactgacttgcaagcaccagctcgtgcgtgattcttgcaaagcctcatgcaactgttccaattctatctactag

SEQ ID NO: 161483 - DNA, 777 bp, Artificial Sequence
  derived and/or modified sequence
atgaagcagatacttcatcctgctctcgagactacagccatgacactattcccagtattgctgtttctagtggccggcctcttgccgtctttccccgccaatgaagataaggaccccgcattcacagccctcttgacaacccaaactcaggtgcaacgcgagatcgtaaacaaacacaacgagcttcgcagagccgtttccccccccgcacgcaacatgttgaagatggagtggaataaggaagccgctgctaatgctcagaaatgggctaaccaatgcaattatcgccactccaaccctaaagatcgcatgacttccctgaagtgcggcgaaaacctgtatatgtcaagcgcctcctcaagctggagccaggccattcaaagttggtttgatgagtataacgactttgacttcggcgtaggccctaaaactccgaatgccgttgtcggtcattatacccaggttgtgtggtattcctcatatctcgtgggctgcggcaacgcatactgcccaaaccaaaaggttttaaagtattactatgtctgccaatactgtcccgctggcaattgggccaatcgtctgtatgtaccttacgagcaaggagctccctgtgcctcctgccctgataactgcgacgatggcctgtgcactaatggatgtaaatacgaggacctctattccaactgcaaatctctcaagttaactctcacttgcaaacaccaattggtacgcgattcctgtaaagcaagctgtaattgctcgaacagtatctactag

SEQ ID NO: 161484 - DNA, 738 bp, Artificial Sequence
  derived and/or modified sequence
atgacattgttcccagtattgctgtttctcgttgcaggactgcttccctcttttcccgcgaatgaagataaggacccagcctttaccgccctattgaccacacagactcaggtacaacgcgaaatcgttaataaacacaacgagttgagaagggccgtctcaccacctgcccgcaatatgctgaagatggagtggaacaaagaggctgcggcaaacgcacagaagtgggctaaccagtgtaactatagacacagcaacccaaaagacagaatgacgtccctcaaatgtggcgaaaacctgtacatgagctctgcctcttcctcttggtcccaggctattcagtcctggttcgatgagtacaatgattttgacttcggagtggggcctaagacccctaacgctgtggttggccattacacacaggttgtatggtactcttcctatctggtaggatgcgggaacgcatattgtccaaaccagaaagtacttaagtattactatgtctgtcagtactgcccagcaggcaattgggccaatcgtctgtatgtcccctacgagcaaggagccccttgtgctagctgcccagataactgcgacgatgggctgtgcaccaacggctgtaagtacgaggacctttattccaactgtaaatcgctgaagctgactctcacatgtaaacaccaactggtaagagattcctgtaaagcatcctgcaattgctctaattctatctattag

SEQ ID NO: 161485 - DNA, 468 bp, Artificial Sequence
  derived and/or modified sequence
atgactagtctcaaatgtggtgagaacctgtacatgtcatccgcttccagttcatggtcacaagcaattcagtcctggttcgatgaatataacgactttgacttcggtgtcggtcctaagactcccaacgccgttgtgggccactatacacaggtcgtgtggtatagcagttaccttgtaggctgcggcaacgcctattgtccaaatcaaaaggtgctgaagtattattatgtatgtcaatattgtcccgcggggaattgggccaacaggctgtacgtcccatatgagcagggagctccttgtgcctcctgccccgataactgtgatgatggtctttgtacaaacgggtgcaaatatgaagatctgtactccaattgtaagtcactaaagttgaccttgacatgtaagcaccagctagtgagggacagctgcaaagcatcatgcaactgctctaactccatctactag

SEQ ID NO: 161486 - DNA, 2170 bp, Artificial Sequence
  derived and/or modified sequence
atatacggctctaaccttctctctctgcaccttccttctgtcaatagatgaaacaaatacttcatcctgctctggaaaccactgcaatgacattattcccagtgctgttgttcctggttgctgggctgcttccatcttttccagcaaatgaagataaggatcccgcttttactgctttgttaaccacccaaacacaagtgcaaagggagattgtgaataagcacaatgaactgaggagagcagtatctccccctgccagaaacatgctgaagatggaatggaacaaagaggctgcagcaaatgcccaaaagtgggcaaaccagtgcaattacagacacagtaacccaaaggatcgaatgacaagtctaaaatgtggtgagaatctctacatgtcaagtgcctccagctcatggtcacaagcaatccaaagctggtttgatgagtacaatgattttgactttggtgtagggccaaagactcccaacgcagtggttggacattatacacaggttgtttggtactcttcatacctcgttggatgtggaaatgcctactgtcccaatcaaaaagttctaaaatactactatgtttgccaatattgtcctgctggtaattgggctaatagactatatgtcccttatgaacaaggagcaccttgtgccagttgcccagataactgtgacgatggactatgcaccaatggttgcaagtacgaagatctctatagtaactgtaaaagtttgaagctcacattaacctgtaaacatcagttggtcagggacagttgcaaggcctcctgcaattgttcaaacagcatttattaaatacgcattacacaccgagtagggctatgtagagaggagtcagattatctacttagatttggcatctacttagatttaacatatactagctgagaaattgtaggcatgtttgatacacatttgatttcaaatgtttttcttctggatctgctttttattttacaaaaatatttttcatacaaatggttaaaaagaaacaaaatctataacaacaactttggatttttatatataaactttgtgatttaaatttactgaatttaattagggtgaaaattttgaaagttgtattctcatatgactaagttcactaaaaccctggattgaaagtgaaaattatgttcctagaacaaaatgtacaaaaagaacaatataattttcacatgaacccttggctgtagttgcctttcctagctccactctaaggctaagcatcttcaaagacgttttcccatatgctgtcttaattcttttcactcattcacccttcttcccaatcatctggctggcatcctcacaattgagttgaagctgttcctcctaaaacaatcctgacttttattttgccaaaatcaatacaatcctttgaattttttatctgcataaattttacagtagaatatgatcaaaccttcatttttaaacctctcttctctttgacaaaacttccttaaaaaagaatacaagataatataggtaaataccctccactcaaggaggtagaactcagtcctctcccttgtgagtcttcactaaaatcagtgactcacttccaaagagtggagtatggaaagggaaacatagtaactttacaggggagaaaaatgacaaatgacgtcttcaccaagtgatcaaaattaacgtcaccagtgataagtcattcagatttgttctagataatctttctaaaaattcataatcccaatctaattatgagctaaaacatccagcaaactcaagttgaaggacattctacaaaatatccctggggtattttagagtattcctcaaaactgtaaaaatcatggaaaataagggaatcctgagaaacaatcacagaccacatgagactaaggagacatgtgagccaaatgcaatgtgcttcttggatcagatcctggaacagaaaaagatcagtaatgaaaaaactgatgaagtctgaatagaatctggagtatttttaacagtagtgttgatttcttaatcttgataaatatagcagggtaatgtaagatgataacgttagagaaactgaaactgggtgagggctatctaggaattctctgtactatcttaccaaattttcggtaagtctaagaaagcaatgcaaaataaaaagtgtcttg

SEQ ID NO: 161487 - DNA, 777 bp, Artificial Sequence
  derived and/or modified sequence
atgaagcagatcctgcaccccgccctggagaccaccgccatgaccctgttccccgtgctgctgttcctggtggccggcctgctgcccagcttccccgccaacgaggacaaggaccccgccttcaccgccctgctgaccacccagacccaggtgcagagagagatcgtgaacaagcacaacgagctgagaagagccgtgagcccccccgccagaaacatgctgaagatggagtggaacaaggaggccgccgccaacgcccagaagtgggccaaccagtgcaactacagacacagcaaccccaaggacagaatgaccagcctgaagtgcggcgagaacctgtacatgagcagcgccagcagcagctggagccaggccatccagagctggttcgacgagtacaacgacttcgacttcggcgtgggccccaagacccccaacgccgtggtgggccactacacccaggtggtgtggtacagcagctacctggtgggctgcggcaacgcctactgccccaaccagaaggtgctgaagtactactacgtgtgccagtactgccccgccggcaactgggccaacagactgtacgtgccctacgagcagggcgccccctgcgccagctgccccgacaactgcgacgacggcctgtgcaccaacggctgcaagtacgaggacctgtacagcaactgcaagagcctgaagctgaccctgacctgcaagcaccagctggtgagagacagctgcaaggccagctgcaactgcagcaacagcatctactag

SEQ ID NO: 161488 - DNA, 738 bp, Artificial Sequence
  derived and/or modified sequence
atgaccctgttccccgtgctgctgttcctggtggccggcctgctgcccagcttccccgccaacgaggacaaggaccccgccttcaccgccctgctgaccacccagacccaggtgcagagagagatcgtgaacaagcacaacgagctgagaagagccgtgagcccccccgccagaaacatgctgaagatggagtggaacaaggaggccgccgccaacgcccagaagtgggccaaccagtgcaactacagacacagcaaccccaaggacagaatgaccagcctgaagtgcggcgagaacctgtacatgagcagcgccagcagcagctggagccaggccatccagagctggttcgacgagtacaacgacttcgacttcggcgtgggccccaagacccccaacgccgtggtgggccactacacccaggtggtgtggtacagcagctacctggtgggctgcggcaacgcctactgccccaaccagaaggtgctgaagtactactacgtgtgccagtactgccccgccggcaactgggccaacagactgtacgtgccctacgagcagggcgccccctgcgccagctgccccgacaactgcgacgacggcctgtgcaccaacggctgcaagtacgaggacctgtacagcaactgcaagagcctgaagctgaccctgacctgcaagcaccagctggtgagagacagctgcaaggccagctgcaactgcagcaacagcatctactag

SEQ ID NO: 161489 - DNA, 468 bp, Artificial Sequence
  derived and/or modified sequence
atgaccagcctgaagtgcggcgagaacctgtacatgagcagcgccagcagcagctggagccaggccatccagagctggttcgacgagtacaacgacttcgacttcggcgtgggccccaagacccccaacgccgtggtgggccactacacccaggtggtgtggtacagcagctacctggtgggctgcggcaacgcctactgccccaaccagaaggtgctgaagtactactacgtgtgccagtactgccccgccggcaactgggccaacagactgtacgtgccctacgagcagggcgccccctgcgccagctgccccgacaactgcgacgacggcctgtgcaccaacggctgcaagtacgaggacctgtacagcaactgcaagagcctgaagctgaccctgacctgcaagcaccagctggtgagagacagctgcaaggccagctgcaactgcagcaacagcatctactag

SEQ ID NO: 161490 - DNA, 777 bp, Artificial Sequence
  derived and/or modified sequence
atgaaacaaattctgcaccccgctttggagacgacggccatgacactcttcccggtgctccttttcctggttgcgggattgcttcctagtttccccgcaaatgaagacaaagaccctgcattcactgccctcttgactacccaaactcaggtccagagagagatcgtcaacaagcataacgagttacgtcgagcagtgtcccccccggctaggaatatgctcaaaatggaatggaataaggaagcggcagccaatgcccagaagtgggccaaccagtgtaattaccgacacagtaaccccaaggatcgcatgacgtcacttaaatgcggggagaatctgtacatgtcatcagcatcatcatcctggtcacaggcaatccagagttggtttgacgaatataatgatttcgacttcggggtcggccctaagacaccgaacgccgttgtgggccactatactcaggttgtgtggtactcctcttacctggtgggatgcggaaacgcctactgccctaaccagaaagtgcttaagtattactacgtgtgtcagtactgtcccgcagggaactgggccaatcgactgtatgtgccatatgaacaaggagctccatgtgctagttgccctgataactgtgatgatggtctgtgcacaaacggctgtaagtacgaagatttgtattcaaattgcaagagtctcaaacttacactgacttgcaagcatcagctggtgcgagattcttgcaaggctagctgtaactgctccaactccatttactag

SEQ ID NO: 161491 - DNA, 738 bp, Artificial Sequence
  derived and/or modified sequence
atgacgctattccccgtattactcttcctcgtagccgggttgctgccatctttccccgccaatgaagacaaagaccctgctttcacagcactactgactacccagactcaggtccagcgcgagatagttaacaagcataacgagctgcgtagggctgtcagcccacccgcaaggaacatgcttaagatggaatggaacaaagaagccgctgctaatgcccagaaatgggcaaaccagtgcaactataggcattcaaatcccaaagataggatgacgagtctgaaatgcggcgaaaatttgtatatgtcctcagcaagctcctcctggtcccaggccatccagtcatggttcgacgaatacaacgattttgatttcggtgtcggacccaagactcctaatgctgtggtgggccactatacccaggtagtctggtattcgagctatttagtggggtgtggcaatgcctactgtcccaatcaaaaagtgctgaaatactactacgtgtgccagtattgccccgcggggaactgggcaaatcggttgtatgtcccttatgagcagggagccccatgcgcaagttgcccggacaactgtgatgatggcctgtgtacaaatggatgcaaatatgaggacctctatagcaattgcaagtccctgaagctgaccctgacatgtaagcatcagctggttcgagactcctgtaaggcatcctgcaactgcagcaatagcatctactag

SEQ ID NO: 161492 - DNA, 468 bp, Artificial Sequence
  derived and/or modified sequence
atgacatcacttaagtgtggcgagaatctctatatgagtagcgcatctagctcatggtctcaagcaattcaatcctggttcgacgaatacaacgattttgatttcggagtgggccctaaaactccgaacgccgtagtgggtcattatactcaggtagtgtggtactcctcatatctggttgggtgcgggaacgcttactgccctaatcagaaagttctgaaatactattatgtttgtcagtattgtccagcggggaactgggcgaacaggttgtatgtgccctatgaacaaggtgctccgtgtgcctcctgcccagacaattgtgatgacggactgtgtaccaatggatgtaagtacgaagacctgtactccaactgtaaaagccttaagctgacattaacttgcaaacatcagttggtgcgcgattcttgtaaggccagttgcaattgctcgaacagcatatattag

SEQ ID NO: 161493 - DNA, 777 bp, Artificial Sequence
  derived and/or modified sequence
atgaagcagatcctgcacccagccctggagaccacagccatgaccctcttccctgtgctgctcttcctggtggccggcctgctgcccagcttccctgccaatgaagacaaggaccctgccttcaccgccctgctgaccacccagacccaggtgcagcgggagatcgtgaacaagcacaatgagctgcggcgggctgtgagccccccagccaggaacatgctgaagatggagtggaacaaggaggccgccgccaatgcccagaagtgggccaaccagtgcaactaccgccacagcaaccccaaggacaggatgaccagcctgaagtgtggagaaaatctctacatgagcagcgccagcagctcctggagccaggccatccagagctggtttgatgagtacaatgactttgattttggagtgggccccaagaccccaaatgctgtggtgggccactacacccaggtggtgtggtacagcagctacctggtgggctgtggaaatgcctactgccccaaccagaaggtgctgaagtactactacgtgtgccagtactgcccagctggcaactgggccaaccggctgtatgtgccctatgagcagggcgccccctgtgccagctgcccagacaactgtgatgatggcctgtgcaccaacggctgcaagtatgaagatctctacagcaactgcaagagcctgaagctgaccctgacctgcaagcaccagctggtgcgggacagctgcaaggccagctgcaactgcagcaacagcatctactag

SEQ ID NO: 161494 - DNA, 738 bp, Artificial Sequence
  derived and/or modified sequence
atgaccctcttccctgtgctgctcttcctggtggccggcctgctgcccagcttccctgccaatgaagacaaggaccctgccttcaccgccctgctgaccacccagacccaggtgcagcgggagatcgtgaacaagcacaatgagctgcggcgggctgtgtccccaccagccaggaacatgctgaagatggagtggaacaaggaggccgccgccaatgcccagaagtgggccaaccagtgcaactaccgccacagcaaccccaaggacaggatgaccagcctgaagtgtggggagaacctgtacatgagcagcgccagcagctcctggagccaggccatccagagctggtttgatgagtacaatgactttgattttggagtgggccccaagaccccaaatgctgtggtgggccactacacccaggtggtgtggtacagcagctacctggtgggctgtggaaatgcctactgccccaaccagaaggtgctgaagtactactacgtgtgccagtactgcccagctggcaactgggccaaccggctgtatgtgccctatgagcagggcgccccctgtgccagctgcccagacaactgtgatgatggcctgtgcaccaacggctgcaagtatgaggacctgtacagcaactgcaagagcctgaagctgaccctgacctgcaagcaccagctggtgcgggacagctgcaaggccagctgcaactgcagcaacagcatctactag

SEQ ID NO: 161495 - DNA, 468 bp, Artificial Sequence
  derived and/or modified sequence
atgaccagcctgaagtgtggggagaacctgtacatgagcagcgccagcagctcctggagccaggccatccagagctggtttgatgagtacaatgactttgattttggagtgggccccaagaccccaaatgctgtggtgggccactacacccaggtggtgtggtacagcagctacctggtgggctgtggaaatgcctactgccccaaccagaaggtgctgaagtactactacgtgtgccagtactgcccagctggcaactgggccaaccggctgtatgtgccctatgagcagggcgccccctgtgccagctgcccagacaactgtgatgatggcctgtgcaccaacggctgcaagtatgaggacctgtacagcaactgcaagagcctgaagctgaccctgacctgcaagcaccagctggtgcgggacagctgcaaggccagctgcaactgcagcaacagcatctactag

SEQ ID NO: 161496 - DNA, 777 bp, Artificial Sequence
  derived and/or modified sequence
atgaagcagatcctgcaccccgccctggagaccaccgccatgaccctgtttcccgtactactgttcctggtagctggccttttgccatcatttcctgcgaatgaagataaggatccagcattcacagcacttcttaccacgcagacacaggtccagagggaaattgttaacaaacacaatgagctgagaagagctgtgtctccccccgcccgtaatatgctgaagatggagtggaacaaggaggccgccgccaacgctcagaaatgggcgaatcagtgtaactataggcactcgaatcccaaagaccgaatgacgtccttaaagtgcggcgaaaatttgtacatgtcttcagcctcctcgagctggtcgcaggcaatccagagctggtttgatgagtataacgacttcgatttcggagtaggtcccaaaacccccaacgccgtcgtcggccattacacacaagtggtttggtactccagttacctcgtcggctgcggcaacgcctattgcccgaaccagaaagttctcaagtactactacgtctgccaatactgtccagccggcaactgggccaatagactttacgtcccctatgagcaaggagctccttgcgcttcctgtccagacaactgtgatgatggcctgtgcaccaatggctgtaaatatgaggatctgtacagcaactgtaagtcccttaagctgacccttacgtgcaagcatcagttagtcagagattcctgcaaggccagctgcaactgctccaattccatttactag

SEQ ID NO: 161497 - DNA, 738 bp, Artificial Sequence
  derived and/or modified sequence
atgaccctgttccccgtgctgctgttcctggtggccggcctgctgcctagcttccccgccaacgaagacaaggacccagctttcacagctctattgacgacacagacacaagtgcaacgtgaaatcgtcaataagcacaatgaactgcgcagagcagtctcgcccccagctagaaacatgctgaaaatggaatggaataaggaggccgctgccaatgctcagaaatgggctaatcagtgtaactatagacactctaaccctaaggacaggatgacctcgctgaagtgtggggaaaacctttacatgagcagtgcttcctcatcttggtcccaggccatccagtcctggttcgacgagtacaacgacttcgattttggcgttggcccaaaaacccctaacgccgtggtaggccactacactcaggtggtttggtattcatcatacctggtggggtgtggaaatgcctactgtcctaatcagaaagtattaaaatactactacgtctgccagtactgccctgcaggcaattgggctaaccggctgtacgtaccttacgagcaaggggccccttgcgcatcttgcccagataactgtgacgatggcctctgtaccaacggctgtaagtacgaggacctgtactccaactgtaaaagcctgaagctgacactgacatgcaagcatcagctcgtacgtgactcatgtaaggcatcgtgcaactgctctaattccatatattag

SEQ ID NO: 161498 - DNA, 468 bp, Artificial Sequence
  derived and/or modified sequence
atgaccagcctgaagtgcggcgagaacctgtacatgagcagcgcctccagcagctggtcgcaggctatacagtcttggtttgatgagtacaacgacttcgacttcggcgtgggcccaaaaacacccaatgctgtcgttgggcattacacacaggtcgtttggtactcctcctatctggtgggttgcgggaacgcctactgccccaaccagaaagtgcttaaatattactacgtgtgccagtactgcccggctgggaattgggccaatcggctgtatgtgccctacgagcagggagcaccttgcgctagttgcccagacaactgtgatgacggtctgtgtacgaacggttgcaaatatgaagatttgtattccaattgcaagtccctgaaactgactctgacttgcaaacaccaattagtgcgggactcttgcaaggctagctgtaactgttctaactcaatatattag

SEQ ID NO: 161499 - RNA, 777 nt, Artificial Sequence
  derived and/or modified sequence
augaaacagauccuccaucccgcgcuggagacuaccgccaugacccuuuuucccgugcuacucuuccuuguugcaggccuccucccaucguuuccagcaaaugaagacaaagauccagcuuucacggcauuguugacuacucagacacagguacagagggagauagucaauaaacauaaugagcugcggcgcgcugugagcccaccagcuagaaacaugcuaaaaauggaauggaauaaagaggcugcugcuaaugcacagaaaugggcuaaccaguguaacuacaggcacagcaauccaaaggaccgcaugacuucacucaaguguggagaaaaccuuuacaugaguucugcaaguuccuccuggagccaggcuauucagagcugguucgaugaguacaacgauuuugauuucggcgugggaccgaaaaccccaaaugcugucgucgggcacuacacccaaguggucugguacagcuccuaccucgugggguguggcaaugcuuauugccccaaucagaaaguguuaaaguauuacuacguuugucaauacugucccgcugguaauugggcuaacaggcuuuacgugccuuacgagcagggagccccaugcgccucauguccugacaacugcgacgacgggcuguguacaaauggaugcaaguacgaagaccuguauaguaacugcaaaagcuuaaaacugacucuaacauguaagcaucagcugguucgagauucaugcaaggccaguuguaauugcagcaauuccauuuauuag

SEQ ID NO: 161500 - RNA, 738 nt, Artificial Sequence
  derived and/or modified sequence
augacgcuguucccaguccugcuauuccugguggcuggacuucucccuagcuuucccgccaacgaagacaaagauccagcuuuuaccgcacuccugacgacccagacccagguccagagggaaauagucaauaagcacaacgagcuccgccgcgcuguuucuccucccgcucggaacauguugaaaauggaguggaacaaagaggcagccgccaacgcacagaagugggcaaaucaguguaacuauagacacucgaacccuaaggaccggaugaccucucugaaaugcggcgagaaccuguauaugagcagcgccagcucaagcuggucucaggccauucagucuugguuugacgaguacaaugauuucgacuucggaguuggcccaaaaacgccgaaugcggucguuggucauuacacacaaguuguuugguacuccagcuaccuuguagguuguggcaaugccuauuguccuaaccaaaaagugcuaaaauacuacuaugucugucaauauugcccugcggguaacugggccaacagauuguacguuccuuaugaacagggcgccccaugugcguccugcccugacaacugcgacgacgggcugugcaccaacggcuguaaguacgaggaccuuuauuccaacuguaaaucgcugaagcugacucucacauguaaacaccaacugguaagagauuccuguaaagcauccugcaauugcucuaauucuaucuauuag

SEQ ID NO: 161501 - RNA, 468 nt, Artificial Sequence
  derived and/or modified sequence
augacuagucucaaauguggugagaaccuguacaugucauccgcuuccaguucauggucacaagcaauucaguccugguucgaugaauauaacgacuuugacuucggugucgguccuaagacucccaacgccguugugggccacuauacacaggucgugugguauagcaguuaccuuguaggcugcggcaacgccuauuguccaaaucaaaaggugcugaaguauuauuauguaugucaauauugucccgcggggaauugggccaacaggcuguacgucccauaugagcagggagcuccuugugcaagcugucccgacaauugugacgacggacugugcacuaaugguugcaaguacgaggaccucuauucuaacugcaagagccuaaaguuaacacugacuugcaagcaccagcucgugcgugauucuugcaaagccucaugcaacuguuccaauucuaucuacuag

SEQ ID NO: 161502 - RNA, 777 nt, Artificial Sequence
  derived and/or modified sequence
augaagcagauacuucauccugcucucgagacuacagccaugacacuauucccaguauugcuguuucuaguggccggccucuugccgucuuuccccgccaaugaagauaaggaccccgcauucacagcccucuugacaacccaaacucaggugcaacgcgagaucguaaacaaacacaacgagcuucgcagagccguuuccccccccgcacgcaacauguugaagauggaguggaauaaggaagccgcugcuaaugcucagaaaugggcuaaccaaugcaauuaucgccacuccaacccuaaagaucgcaugacuucccugaagugcggcgaaaaccuguauaugucaagcgccuccucaagcuggagccaggccauucaaaguugguuugaugaguauaacgacuuugacuucggcguaggcccuaaaacuccgaaugccguugucggucauuauacccagguugugugguauuccucauaucucgugggcugcggcaacgcauacugcccaaaccaaaagguuuuaaaguauuacuaugucugccaauacugucccgcuggcaauugggccaaucgucuguauguaccuuacgagcaaggagcucccugugccuccugcccugauaacugcgacgauggccugugcacuaauggauguaaauacgaggaccucuauuccaacugcaaaucucucaaguuaacucucacuugcaaacaccaauugguacgcgauuccuguaaagcaagcuguaauugcucgaacaguaucuacuag

SEQ ID NO: 161503 - RNA, 738 nt, Artificial Sequence
  derived and/or modified sequence
augacauuguucccaguauugcuguuucucguugcaggacugcuucccucuuuucccgcgaaugaagauaaggacccagccuuuaccgcccuauugaccacacagacucagguacaacgcgaaaucguuaauaaacacaacgaguugagaagggccgucucaccaccugcccgcaauaugcugaagauggaguggaacaaagaggcugcggcaaacgcacagaagugggcuaaccaguguaacuauagacacagcaacccaaaagacagaaugacgucccucaaauguggcgaaaaccuguacaugagcucugccucuuccucuuggucccaggcuauucaguccugguucgaugaguacaaugauuuugacuucggaguggggccuaagaccccuaacgcugugguuggccauuacacacagguuguaugguacucuuccuaucugguaggaugcgggaacgcauauuguccaaaccagaaaguacuuaaguauuacuaugucugucaguacugcccagcaggcaauugggccaaucgucuguauguccccuacgagcaaggagccccuugugcuagcugcccagauaacugcgacgaugggcugugcaccaacggcuguaaguacgaggaccuuuauuccaacuguaaaucgcugaagcugacucucacauguaaacaccaacugguaagagauuccuguaaagcauccugcaauugcucuaauucuaucuauuag

SEQ ID NO: 161504 - RNA, 468 nt, Artificial Sequence
  derived and/or modified sequence
augacuagucucaaauguggugagaaccuguacaugucauccgcuuccaguucauggucacaagcaauucaguccugguucgaugaauauaacgacuuugacuucggugucgguccuaagacucccaacgccguugugggccacuauacacaggucgugugguauagcaguuaccuuguaggcugcggcaacgccuauuguccaaaucaaaaggugcugaaguauuauuauguaugucaauauugucccgcggggaauugggccaacaggcuguacgucccauaugagcagggagcuccuugugccuccugccccgauaacugugaugauggucuuuguacaaacgggugcaaauaugaagaucuguacuccaauuguaagucacuaaaguugaccuugacauguaagcaccagcuagugagggacagcugcaaagcaucaugcaacugcucuaacuccaucuacuag

SEQ ID NO: 161505 - protein, 418 aa, Artificial Sequence
  derived and/or modified sequence
MAASMCDVFSFCVGVAGRARVSVEVRFVSSAKGKGLFATQLIRKGETIFVERPLVAAQFLWNALYRYRACDHCLRALEKAEENAQRLTGKPGQVLPHPELCTVRKDLHQNCPHCQVMYCSAECRLAATEQYHQVLCPGPSQDDPLHPLNKLQEAWRSIHYPPETASIMLMARMVATVKQAKDKDRWIRLFSQFCNKTANEEEEIVHKLLGDKFKGQLELLRRLFTEALYEEAVSQWFTPDGFRSLFALVGTNGQGIGTSSLSQWVHACDTLELKPQDREQLDAFIDQLYKDIEAATGEFLNCEGSGLFVLQSCCNHSCVPNAETSFPENNFLLHVTALEDIKPGEEICISYLDCCQRERSRHSRHKILRENYLFVCSCPKCLAEADEPNVTSEEEEEEEEEEEGEPEDAELGDEMTDV

SEQ ID NO: 161506 - DNA, 2520 bp, Artificial Sequence
  derived and/or modified sequence
gccgtgttctccttctgcgtgggcgtggcgggccgcgcgcgggtctccgtggaagtccgtttcgtgagcagcgccaagggaaaggggctgtttgccacacagctcatccggaagggggagaccatcttcgtagaacggcccctggtggctgcacagtttctctggaatgcactttatcgctaccgagcctgtgaccactgccttagggcactagagaaggcagaggagaatgcccagaggctgaccgggaaaccaggccaggttctgcctcacccagagctgtgcactgtgcgcaaagacctccaccagaactgtccccattgccaagtgatgtactgcagtgcagaatgtcggttggcagccactgagcaataccaccaggtcctgtgcccaggcccctcccaggatgaccccttgcatcctctcaataagcttcaggaggcatggaggagtattcactacccacctgagactgcaagcatcatgttgatggctaggatggtggccacagtgaagcaggcgaaggacaaggaccgttggatcagactcttttcccagttttgtaacaaaacagccaatgaagaggaggaaattgtccataaacttctgggagacaaattcaagggccaactggaacttctgcggagactcttcacagaggccctctatgaggaagcagtcagccagtggttcactccagatggattccggtctctctttgctcttgttgggaccaatggccaaggaatcgggaccagctccctaagccagtgggtccatgcctgtgacactctggagttgaagcctcaggaccgtgagcacgttgacgccttcattgaccagctatacaaggacatcgaggcagcaactggagagtttcttaactgtgaaggatctggcctctttgtgcttcagagctgctgcaaccacagttgtgtgcccaatgcagagacctcctttccagaaaacaacttccttttgcatgtcactgctctggaggatattaagccaggagaggaaatttgtatcagctacttggactgctgtcagcgggagcgcagccgccacagccgccacaagatcctcagggagaactatctatttgtctgttcctgtcccaaatgcctggcagaggctgatgaacccaatgtgacctcagaagaggaagaggaagaggaggaggaggaggaaggagagccagaagatgcagagctgggggatgagatgactgatgtgtgatgttgccctgcccagaaagggccctgccctagaccctgccagaaaagggggctcttcccccagagaagtggcttggagggaacttcccactcccattgcctgctttccccattccagccctctctgctagagggtaggagagagcctggatctctggccccaacccccaccagacctcatgccctggacactgctgctgagttggctcagactctgcactggcactgagcctttcacaactggcctccccttgaggttcctccactctagggtttgaggggctggaatcagggccagggcctaacagtgtttcttcccctcggccccacggcccatactcaccccttcacctgaggcttctcccctctcaacttgctgttgatttcttttgaggggtaaaagaaagaccgagttcattgaagcagagatgggaggtggtgaggcgtcctcacctccccccaccacagctgtggctggtaaggcaactgcttgaccactggcccagcaagcagaggcgggcaggaggatctgggcatcctgagccccttccctgaggctgtctcctgggaatgctggaccagggggattacttcccccacccacacccccatttggacatctggggaagtggagattaaccctcccccagactcgtgccttgcctctcaggacctggcacagtggctggccttatggagtatggaaaaggcctctgccttcctcaggagggacacatagtgggtcatcaccctttctcacacctgcttcccaatgagcactcagcagcatggctgagacctggggcttgacaggcctgcgctccttagattaggatgctctggtattcctggggccagttaaaatgggtcagtgaggggctctcctggcctcaatctccatctttagggtctccacagactaacattgaagtcttccagaaacctcgaggagctgggctagatacttcgagagtagccctgtcttgtcccctcctacccccagattagcaccacccctctcactcttgggttggatgctatgggaattacaacccatcactcccaatgcctccctttcctggaggagcctgctgcattctcctgctgagggatcccagagagggcaggtgcccaccccacaggccctttcctggaccatggagccaggtgaaacctgtctggccccttacccattgggttcttactccttcacaacggtcagcactcctctcccagcccccctgcccactgttctcaataaaatgtgagtggtgaaaaaaaa

SEQ ID NO: 161507 - DNA, 1257 bp, Artificial Sequence
  derived and/or modified sequence
atggccgccagcatgtgcgacgtgttcagcttctgcgtgggcgtggccggcagagccagagtgagcgtggaggtgagattcgtgagcagcgccaagggcaagggcctgttcgccacccagctgatcagaaagggcgagaccatcttcgtggagagacccctggtggccgcccagttcctgtggaacgccctgtacagatacagagcctgcgaccactgcctgagagccctggagaaggccgaggagaacgcccagagactgaccggcaagcccggccaggtgctgccccaccccgagctgtgcaccgtgagaaaggacctgcaccagaactgcccccactgccaggtgatgtactgcagcgccgagtgcagactggccgccaccgagcagtaccaccaggtgctgtgccccggccccagccaggacgaccccctgcaccccctgaacaagctgcaggaggcctggagaagcatccactacccccccgagaccgccagcatcatgctgatggccagaatggtggccaccgtgaagcaggccaaggacaaggacagatggatcagactgttcagccagttctgcaacaagaccgccaacgaggaggaggagatcgtgcacaagctgctgggcgacaagttcaagggccagctggagctgctgagaagactgttcaccgaggccctgtacgaggaggccgtgagccagtggttcacccccgacggcttcagaagcctgttcgccctggtgggcaccaacggccagggcatcggcaccagcagcctgagccagtgggtgcacgcctgcgacaccctggagctgaagccccaggacagagagcagctggacgccttcatcgaccagctgtacaaggacatcgaggccgccaccggcgagttcctgaactgcgagggcagcggcctgttcgtgctgcagagctgctgcaaccacagctgcgtgcccaacgccgagaccagcttccccgagaacaacttcctgctgcacgtgaccgccctggaggacatcaagcccggcgaggagatctgcatcagctacctggactgctgccagagagagagaagcagacacagcagacacaagatcctgagagagaactacctgttcgtgtgcagctgccccaagtgcctggccgaggccgacgagcccaacgtgaccagcgaggaggaggaggaggaggaggaggaggaggagggcgagcccgaggacgccgagctgggcgacgagatgaccgacgtgtag

SEQ ID NO: 161508 - DNA, 1257 bp, Artificial Sequence
  derived and/or modified sequence
atggctgcaagtatgtgcgatgtgttctctttctgtgtgggggtggccggaagggcgcgggtgagtgtagaagttcgatttgtttcaagcgccaaaggcaaaggcttgtttgcaacccagctgatcagaaagggcgaaacaatttttgtggagagaccgttagtggcagcccagttcctctggaatgctctgtaccggtaccgggcctgtgaccactgtctaagggccttagaaaaggccgaagagaatgcgcagagactaaccggcaagcctggtcaggtgctgccccaccctgaactgtgcaccgtgcgtaaagacctgcatcagaattgcccccactgccaggtcatgtactgctccgctgaatgcaggctagctgctacagagcaataccatcaggttctttgtccaggtccgagccaggatgaccctttgcaccctctgaataagcttcaggaagcctggaggtcaattcattatccacccgagactgcctctatcatgctgatggctcgaatggtggctacagtgaagcaagcaaaagataaggatcgctggataagacttttctcccagttctgtaataaaactgcaaacgaggaagaagaaatcgttcacaagctgctgggagacaaatttaagggtcaattggaactgctgcgcagactgttcacggaagcactgtacgaagaggcggtcagtcaatggtttacacctgacggattcagatctctgtttgcgctggtgggcactaacggccaggggataggcacgtcgtctctgagccagtgggtacacgcctgcgacactttagagctcaaacctcaagacagagagcagctggacgccttcatcgaccagttatacaaggacattgaagcggcgactggtgagttcctgaattgcgagggctctggcttatttgttcttcaatcatgctgcaaccatagctgtgtaccaaatgccgaaacgagtttccccgaaaataattttttgctccacgttacagctctggaagatatcaagccaggggaagagatttgcatttcttatttagattgttgccagcgcgaacgcagtcgccactctagacataagatcctcagagagaactatctctttgtgtgctcctgtcctaagtgcctagccgaggccgacgagcctaatgttacctccgaggaggaggaggaagaagaagaggaagaggaaggagagcccgaagacgcagaattgggagatgagatgacggatgtgtag

SEQ ID NO: 161509 - DNA, 1257 bp, Artificial Sequence
  derived and/or modified sequence
atggccgcctccatgtgtgatgtgttctccttctgtgtgggcgtggccggccgggcccgggtgtctgtggaggtgcgctttgtgagcagcgccaagggcaagggcctgtttgccacccagctgatcaggaagggggagaccatctttgtggagcggcccctggtggccgcccagttcctgtggaatgccctgtaccgctaccgggcctgtgaccactgcctgcgggccctggagaaggccgaggagaatgcccagaggctgaccgggaagccaggccaggtgctgccccaccctgagctgtgcaccgtgaggaaggacctgcaccagaactgcccccactgccaggtgatgtactgcagcgctgagtgccgcctggccgccacagagcagtaccaccaggtgctgtgccccggccccagccaggatgaccccctgcaccccctgaacaagctgcaggaggcctggaggagcatccactacccacctgagacagccagcatcatgctgatggccaggatggtggccaccgtgaagcaggccaaggacaaggaccgctggatccgcctcttcagccagttctgcaacaagacagccaatgaggaggaggagatcgtgcacaagctgctgggggacaagttcaagggccagctggagctgctgcggcggctcttcacagaggccctgtatgaggaggccgtgtcccagtggttcaccccagatggcttccgcagcctgtttgccctggtgggcaccaacggccagggcatcggcaccagcagcctgagccagtgggtgcacgcctgtgacaccctggagctgaagccccaggaccgggagcagctggatgccttcatcgaccagctgtacaaggacatcgaggccgccaccggggagttcctgaactgtgagggcagcggcctgtttgtgctgcagagctgctgcaaccacagctgtgtgcccaatgctgagaccagcttccctgagaacaacttcctgctgcacgtgacagccctggaggacatcaagccaggagaggagatctgcatctcctacctggactgctgccagcgggagaggagccgccacagccgccacaagatcctgcgggagaactacctgtttgtgtgcagctgccccaagtgcctggccgaggctgatgagcccaacgtgaccagcgaggaggaggaggaggaggaggaggaggaggagggggagccagaagatgctgagctgggagatgagatgacagatgtgtag

SEQ ID NO: 161510 - DNA, 1257 bp, Artificial Sequence
  derived and/or modified sequence
atggccgccagcatgtgcgacgtgttcagcttctgcgtgggcgtggccggccgcgctagggtaagcgtcgaggtgcgcttcgtgagctctgccaaggggaagggtctattcgctactcagctgattagaaagggagaaacgatcttcgtggagaggcctctggtggcagctcaatttctctggaatgctttatacagatatcgggcatgcgaccactgcctgcgggctcttgaaaaagccgaggagaatgcgcagcgacttactggaaaacccggtcaggtcctccctcatccggaattatgcaccgtccggaaggatctccatcagaactgcccacattgccaggtgatgtactgtagtgccgagtgtagactagccgctacagagcagtatcaccaggtgctgtgccctggcccaagccaggacgatcccctccacccactgaacaaactacaagaggcgtggcggagcattcactatcccccagaaacagctagcatcatgctgatggcacgcatggttgctaccgtcaaacaagcaaaagacaaagacagatggatccgattgtttagccagttctgcaataagactgcgaatgaagaggaggagattgtgcacaaactcctgggggataagtttaaaggacaacttgaactattacggagactgtttacggaagccctttatgaggaggcagtatcccagtggtttactcccgatggttttcgctctctcttcgctttggttggtaccaacggacagggcatcgggacgtcttcactatcccagtgggtgcatgcctgtgatacccttgagctcaagcctcaggaccgggaacagctggacgccttcatcgaccagctctataaggatatcgaagcggcaaccggcgagttcctgaattgcgaggggagtggactatttgtactccaaagttgttgtaatcactcatgcgtgccaaacgccgagacctcctttccagagaataactttctgttgcacgtgaccgccctggaagacataaaacccggcgaagagatatgtattagttacctggactgctgccaacgtgagagatctagacatagccgccataagatacttcgcgagaattacctgttcgtgtgttcttgcccaaaatgtctggccgaagctgacgagcctaatgtcacttccgaggaagaggaagaggaagaagaggaggaggagggcgagcccgaagacgctgagcttggagatgagatgacggatgtgtag

SEQ ID NO: 161511 - DNA, 1257 bp, Artificial Sequence
  derived and/or modified sequence
atggccgctagcatgtgtgacgtattcagcttttgtgtgggcgtggccggaagggctagggtgagtgtcgaagttcggtttgtgtcaagcgcgaagggcaagggcctttttgctacacagctcattagaaagggagaaacgatcttcgtggagcgacccctcgtcgctgcccaattcctctggaatgcgctatacagatatcgtgcatgtgaccactgcctgcgcgcactggaaaaggctgaggagaacgcccagagactcacaggtaagcccggtcaagtcttaccccatccagaactgtgtacagtgagaaaggatctgcaccagaattgcccccactgtcaggtaatgtactgttctgcggagtgtcgtctggcagccaccgaacaataccaccaggtgttgtgccctgggccatctcaggatgatcccctccaccccttaaacaaattgcaggaagcgtggcgaagtatccactatccccctgagaccgcatcaatcatgctgatggctagaatggttgctactgtcaagcaggctaaggacaaagacagatggattcggttatttagtcagttctgtaataaaaccgcaaatgaggaggaagaaattgtgcataagctcctgggggataaatttaagggccaacttgaattgctcagacgactgttcaccgaagccctgtacgaggaggctgtcagtcagtggttcacacccgacggcttcaggtccctgtttgcactcgtcggtaccaatggccaggggatcggtacttcaagtctttctcagtgggtccatgcctgcgatacattagagctgaaaccccaagaccgagaacagctggatgcttttatagaccagctgtacaaggacattgaagccgcaacaggcgagttcctcaactgtgagggaagcggactattcgtgctgcagagctgctgcaaccacagctgcgttcccaacgcagagacatccttcccagagaacaattttcttctccacgtgacggccctagaggacattaagcccggagaagaaatctgcataagctatctcgactgctgtcagcgagagagaagcagacattccaggcacaagattctgagggaaaattacctattcgtgtgttcttgtcctaagtgtctggccgaggccgacgagccaaacgttaccagtgaggaagaggaggaggaagaagaggaggaagaaggagaacccgaagacgcagagctgggtgacgaaatgacagacgtgtag

SEQ ID NO: 161512 - DNA, 2593 bp, Artificial Sequence
  derived and/or modified sequence
aggtcgaggcggggttaagggtcataaggcggaggcgcgcccaagatggcggcctccatgtgcgacgtgttctccttctgcgtgggcgtggcgggccgcgcgcgggtctccgtggaagtccgtttcgtgagcagcgccaagggaaaggggctgtttgccacacagctcatccggaagggggagaccatcttcgtagaacggcccctggtggctgcacagtttctctggaatgcactttatcgctaccgagcctgtgaccactgccttagggcactagagaaggcagaggagaatgcccagaggctgaccgggaaaccaggccaggttctgcctcacccagagctgtgcactgtgcgcaaagacctccaccagaactgtccccattgccaagtgatgtactgcagtgcagaatgtcggttggcagccactgagcaataccaccaggtcctgtgcccaggcccctcccaggatgaccccttgcatcctctcaataagcttcaggaggcatggaggagtattcactacccacctgagactgcaagcatcatgttgatggctaggatggtggccacagtgaagcaggcgaaggacaaggaccgttggatcagactcttttcccagttttgtaacaaaacagccaatgaagaggaggaaattgtccataaacttctgggagacaaattcaagggccaactggaacttctgcggagactcttcacagaggccctctatgaggaagcagtcagccagtggttcactccagatggattccggtctctctttgctcttgttgggaccaatggccaaggaatcgggaccagctccctaagccagtgggtccatgcctgtgacactctggagttgaagcctcaggaccgtgagcagcttgacgccttcattgaccagctatacaaggacatcgaggcagcaactggagagtttcttaactgtgaaggatctggcctctttgtgcttcagagctgctgcaaccacagttgtgtgcccaatgcagagacctcctttccagaaaacaacttccttttgcatgtcactgctctggaggatattaagccaggagaggaaatttgtatcagctacttggactgctgtcagcgggagcgcagccgccacagccgccacaagatcctcagggagaactatctatttgtctgttcctgtcccaaatgcctggcagaggctgatgaacccaatgtgacctcagaagaggaagaggaagaggaggaggaggaggaaggagagccagaagatgcagagctgggggatgagatgactgatgtgtgatgttgccctgcccagaaagggccctgccctagaccctgccagaaaagggggctcttcccccagagaagtggcttggagggaacttcccactcccattgcctgctttccccattccagccctctctgctagagggtaggagagagcctggatctctggccccaacccccaccagacctcatgccctggacactgctgctgagttggctcagactctgcactggcactgagcctttcacaactggcctccccttgaggttcctccactctagggtttgaggggctggaatcagggccagggcctaacagtgtttcttcccctcggccccacggcccatactcaccccttcacctgaggcttctcccctctcaacttgctgttgatttcttttgaggggtaaaagaaagaccgagttcattgaagcagagatgggaggtggtgaggcgtcctcacctccccccaccacagctgtggctggtaaggcaactgcttgaccactggcccagcaagcagaggcgggcaggaggatctgggcatcctgagccccttccctgaggctgtctcctgggaatgctggaccagggggattacttcccccacccacacccccatttggacatctggggaagtggagattaacccctcccccagactcgtgccttgcctctcaggacctggcacagtggctggccttatggagtatggaaaaggcctctgccttcctcaggagggacacatagtgggtcatcaccctttctcacacctgcttcccaatgagcactcagcagcatggctgagacctggggcttgacaggcctgcgctccttagattaggatgctctggtattcctggggccagttaaaatgggtcagtgaggggctctcctggcctcaatctccatctttagggtctccacagactaacattgaagtcttccagaaacctcgaggagctgggctagatacttcgagagtagccctgtcttgtcccctcctacccccagattagcaccacccctctcactcttgggttggatgctatgggaattacaacccatcactcccaatgcctccctttcctggaggagcctgctgcattctcctgctgagggatcccagagagggcaggtgcccaccccacaggccctttcctggaccatggagccaggtgaaacctgtctggccccttacccattgggttcttactccttcacaacggtcagcactcctctcccagcccccctgcccactgttctcaataaaatgtgagtggtgagaggcctctgcaggaa

SEQ ID NO: 161513 - protein, 606 aa, Artificial Sequence
  derived and/or modified sequence
MDSQRELAEELRLYQSTLLQDGLKDLLDEKKFIDCTLKAGDKSLPCHRLILSACSPYFREYFLSEIDEAKKKEVVLDNVDPAILDLIIKYLYSASIDLNDGNVQDIFALASRFQIPSVFTVCVSYLQKRLAPGNCLAILRLGLLLDCPRLAISAREFVSDRFVQICKEEDFMQLSPQELISVISNDSLNVEKEEAVFEAVMKWVRTDKENRVKNLSEVFDCIRFRLMTEKYFKDHVEKDDIIKSNPDLQKKIKVLKDAFAGKLPEPSKNAAKTGAGEVNGDVGDEDLLPGYLNDIPRHGMFVKDLILLVNDTAAVAYDPTENECYLTALAEQIPRNHSSIVTQQNQIYVVGGLYVDEENKDQPLQSYFFQLDSIASEWVGLPPLPSARCLFGLGEVDDKIYVVAGKDLQTEASLDSVLCYDPVAAKWNEVKKLPIKVYGHNVISHKGMIYCLGGKTDDKKCTNRVFIFNPKKGDWKDLAPMKIPRSMFGVAVHKGKIVIAGGVTEDGLSASVEAFDLTTNKWDVMTEFPQERSSISLVSLAGSLYAIGGFAMIQLESKEFAPTEVNDIWKYEDDKKEWAGMLKEIRYASGASCLATRLNLFKLSKL

SEQ ID NO: 161514 - DNA, 2472 bp, Artificial Sequence
  derived and/or modified sequence
ctttttacagctagacctgtgtgctgcaaggagctaaggccttcagtgtccccttccttacccaggtttctcacagaatggattcccagcgggaacttgcagaggaactgcggctttaccaatccacccttcttcaggatggtctaaaagatctcctggatgagaaaaaattcatcgattgcaccctaaaagcaggtgacaaaagtcttccttgccacagattgattttgtcagcttgtagtccttacttccgtgagtactttttatctgaaattgatgaggcgaaaaaaaaggaggtagtgctagacaatgtggatcctgctatacttgatttaatcatcaaatacctgtactctgccagtattgatctcaatgacggaaatgtgcaagatatttttgcattggccagccgctttcagatcccctcagtgtttactgtctgcgtttcttatcttcagaaaagacttgctcctggtaactgtctagccatcctaagattaggacttcttcttgactgcccgagactcgccatttctgcccgtgaatttgtgtctgatcgctttgtacagatttgtaaggaagaggactttatgcaactgtctccacaggaactgatctcagtcatttcaaatgacagcctaaatgtagaaaaagaagaagcagtatttgaggcagtgatgaaatgggtgcgaacagacaaggaaaacagggttaaaaaccttagtgaagtgtttgattgtatccgttttcgccttatgacagaaaaatattttaaggatcatgttgagaaagatgatataattaaaagcaacccagacctccagaaaaaaatcaaagttctaaaagatgctttcgcaggcaaactcccagaacctagcaaaaatgccgcgaagactggggctggtgaggtgaatggtgatgttggtgatgaagatttacttcctggttacctgaatgacattcccaggcatggaatgtttgtaaaagacctcatcctcttggttaatgacacagcagcagtggcttatgaccccacggaaaatgaatgctaccttactgcactggctgagcagattcccagaaatcattccagcattgttacccagcaaaatcagatatatgtggtaggaggactatatgtggatgaagaaaataaggatcaacctctacagtcatacttcttccagctcgatagcatagcatctgaatgggttggacttccacctctgccttcagccaggtgtctcttcggtctgggagaggtggatgataaaatctatgtagttgcaggcaaagaccttcaaacagaggcttcgctggattcagtattatgctatgatcctgtggctgcaaaatggaacgaagtaaaaaaactccctatcaaagtctatggccataatgtgatttcacataaagggatgatatattgtctaggaggaaagacagatgacaaaaaatgtacaaacagggtgtttatcttcaaccccaaaaaaggagattggaaagatctggctccaatgaaaattcctcgttccatgtttggagtagcagtccataaaggcaaaattgtgattgcaggaggtgtcactgaagatggtctttcagcttcagttgaagcttttgaccttacaacaaataaatgggatgtaatgaccgaatttccccaagaaagaagctccatcagtttggtcagcctggctggatctctgtatgcaattggtggttttgctatgattcaactggagtctaaagaatttgcacccactgaagtcaatgacatatggaagtatgaagatgataaaaaagaatgggctgggatgttgaaggaaatacgttatgcttcaggagctagttgcctagcaacacgtttaaatctcttcaaactgtctaaactgtgaacaaggtgacaaaacataatagattgggaggtggtttgtttggtgaatggggctttaatttattctgttttttaaaagcttgtacagacactcatgtagaaattattcaagaagttattgtctaagagatgagcagtaggtaagaaaacctcagtcattgactcttcaatgtaatgatcagagtttaaaaccattttctaataataaattaaatcttcagttgaacaaattattttgtgaatctgtttcactcaatggattgtaaagaaggctcctaaatttgagttgtttgctaatcatttcatttgcatcattagggtatccttaaactgattttctattacaattggaagtggagaatatgtgcatctacactaaaaaaatgtttaagatatcaaaaacctctcctcgtgcttcaaaatgacaggaatcctgtgcattatactaagaattacatgccataagatgacttcagaaatcctacttcagaagtgtaataaatggatggggaaatcgtttgatggggaaaagtctcttgtaagtaaaagtagtcaaattcaaatggcaaaaaaaa

SEQ ID NO: 161515 - DNA, 1821 bp, Artificial Sequence
  derived and/or modified sequence
atggattcccagagggaattggcggaggagttgcgcctttatcagtctaccttgcttcaggacggattgaaagacctgctcgacgagaagaagtttattgattgcacactgaaggcaggagataaaagccttccatgtcaccggctcattctaagcgcatgctctccatacttccgagagtacttcctgagcgaaatcgatgaggccaagaaaaaagaagttgtgttagacaacgtggatcctgccatcctggatttgataataaaatacctgtatagcgcttcgatcgacctaaatgacggcaacgttcaggacatttttgccctcgcttcaaggttccagattccttctgttttcactgtatgtgtgagctacctgcagaagcgactggcccccggcaattgtctggctatacttcgcctggggttactactcgattgcccccgactcgctatctccgcaagggagttcgtcagtgatcgattcgttcaaatttgcaaagaagaagactttatgcagctgagtccacaggagctcatcagtgtaatcagtaacgactcgctcaacgttgaaaaagaggaggcagttttcgaagccgttatgaagtgggtccgaaccgacaaagaaaacagagtcaagaacctgagtgaagtgtttgactgtatccggttccgcctgatgactgaaaaatacttcaaggatcacgtggagaaggacgacatcataaagagtaatcctgatctgcagaaaaagatcaaagtccttaaggacgccttcgcggggaagctgccggagccgtccaaaaacgctgccaagaccggggccggcgaagtcaatggagatgtgggggacgaggacttgctgcccggatatctgaatgacattcccagacatggaatgttcgtaaaagatctgatcttactcgtgaatgacacggctgctgtggcctacgatccaaccgaaaatgagtgttatcttacagcccttgctgaacagatccctcgaaatcattcctctatagtgacacagcagaatcagatctatgtggtgggcggtctatacgtggacgaagagaataaagatcaaccactccagagctacttcttccagttggattccattgcatccgagtgggtgggactgcccccactgccttccgctcggtgtctctttggtctgggggaggtcgatgataagatatatgttgtcgccggaaaggacttgcagactgaagcctccctggatagcgtgttgtgttatgacccagttgccgccaaatggaatgaggtgaaaaagcttccaatcaaggtgtatggccacaatgttatcagtcataaaggaatgatttattgccttggagggaaaacagacgacaagaagtgcaccaatcgagttttcatcttcaaccctaagaaaggggactggaaggatctcgccccaatgaagatcccacgcagcatgtttggcgtggctgttcacaagggaaagatcgtcatagcaggcggcgtgacagaagatggcctgtccgcgtctgtcgaggcattcgatctcacaactaacaagtgggacgtgatgactgaatttccccaggagcggtcatctattagtctggtaagtctcgctggatctttgtacgctatcggcggattcgcaatgatacagctcgaaagtaaggagtttgctccaacagaagtcaacgatatctggaagtatgaggatgacaagaaggagtgggccggtatgctcaaggagatccgatatgcatccggtgcttcatgtcttgcaacccgactcaacttattcaagctctcaaagctgtag

SEQ ID NO: 161516 - DNA, 2464 bp, Artificial Sequence
  derived and/or modified sequence
ctttttacagctagacctgtgtgctgcaaggagctaaggccttcagtgtccccttccttacccaggtttctcacagaatggattcccagcgggaacttgcagaggaactgcggctttaccaatccacccttcttcaggatggtctaaaagatctcctggatgagaaaaaattcatcgattgcaccctaaaagcaggtgacaaaagtcttccttgccacagattgattttgtcagcttgtagtccttacttccgtgagtactttttatctgaaattgatgaggcgaaaaaaaaggaggtagtgctagacaatgtggatcctgctatacttgatttaatcatcaaatacctgtactctgccagtattgatctcaatgacggaaatgtgcaagatatttttgcattggccagccgctttcagatcccctcagtgtttactgtctgcgtttcttatcttcagaaaagacttgctcctggtaactgtctagccatcctaagattaggacttcttcttgactgcccgagactcgccatttctgcccgtgaatttgtgtctgatcgctttgtacagatttgtaaggaagaggactttatgcaactgtctccacaggaactgatctcagtcatttcaaatgacagcctaaatgtagaaaaagaagaagcagtatttgaggcagtgatgaaatgggtgcgaacagacaaggaaaacagggttaaaaaccttagtgaagtgtttgattgtatccgttttcgccttatgacagaaaaatattttaaggatcatgttgagaaagatgatataattaaaagcaacccagacctccagaaaaaaatcaaagttctaaaagatgctttcgcaggcaaactcccagaacctagcaaaaatgccgcgaagactggggctggtgaggtgaatggtgatgttggtgatgaagatttacttcctggttacctgaatgacattcccaggcatggaatgtttgtaaaagacctcatcctcttggttaatgacacagcagcagtggcttatgaccccacggaaaatgaatgctaccttactgcactggctgagcagattcccagaaatcattccagcattgttacccagcaaaatcagatatatgtggtaggaggactatatgtggatgaagaaaataaggatcaacctctacagtcatacttcttccagctcgatagcatagcatctgaatgggttggacttccacctctgccttcagccaggtgtctcttcggtctgggagaggtggatgataaaatctatgtagttgcaggcaaagaccttcaaacagaggcttcgctggattcagtattatgctatgatcctgtggctgcaaaatggaacgaagtaaaaaaactccctatcaaagtctatggccataatgtgatttcacataaagggatgatatattgtctaggaggaaagacagatgacaaaaaatgtacaaacagggtgtttatcttcaaccccaaaaaaggagattggaaagatctggctccaatgaaaattcctcgttccatgtttggagtagcagtccataaaggcaaaattgtgattgcaggaggtgtcactgaagatggtctttcagcttcagttgaagcttttgaccttacaacaaataaatgggatgtaatgaccgaatttccccaagaaagaagctccatcagtttggtcagcctggctggatctctgtatgcaattggtggttttgctatgattcaactggagtctaaagaatttgcacccactgaagtcaatgacatatggaagtatgaagatgataaaaaagaatgggctgggatgttgaaggaaatacgttatgcttcaggagctagttgcctagcaacacgtttaaatctcttcaaactgtctaaactgtgaacaaggtgacaaaacataatagattgggaggtggtttgtttggtgaatggggctttaatttattctgttttttaaaagcttgtacagacactcatgtagaaattattcaagaagttattgtctaagagatgagcagtaggtaagaaaacctcagtcattgactcttcaatgtaatgatcagagtttaaaaccattttctaataataaattaaatcttcagttgaacaaattattttgtgaatctgtttcactcaatggattgtaaagaaggctcctaaatttgagttgtttgctaatcatttcatttgcatcattagggtatccttaaactgattttctattacaattggaagtggagaatatgtgcatctacactaaaaaaatgtttaagatatcaaaaacctctcctcgtgcttcaaaatgacaggaatcctgtgcattatactaagaattacatgccataagatgacttcagaaatcctacttcagaagtgtaataaatggatggggaaatcgtttgatggggaaaagtctcttgtaagtaaaagtagtcaaattcaaatggc

SEQ ID NO: 161517 - DNA, 1821 bp, Artificial Sequence
  derived and/or modified sequence
atggacagccagcgggagctggccgaggagctgcggctgtaccagagcaccctgctgcaggacggcctgaaggacctgctggatgagaagaagttcatcgactgcaccctgaaggccggggacaagagcctgccctgccacaggctcatcctgagcgcctgcagcccctacttccgggagtacttcctgtctgaaattgatgaggccaagaagaaggaggtggtgctggacaacgtggaccctgccatcctggacctgatcatcaagtacctgtacagcgccagcattgacctgaatgatggaaatgtgcaggacatctttgccctggccagccgcttccagatccccagcgtcttcaccgtgtgtgtgtcctacctgcagaagaggctggcccctggcaactgcctggccatcctgcggctgggcctgctgctggactgcccccggctggccatcagcgcccgggagtttgtgtctgacagatttgtgcagatctgcaaggaggaggacttcatgcagctgagcccccaggagctgatcagcgtcatcagcaatgacagcctgaatgtggagaaggaggaggccgtgtttgaagctgtgatgaagtgggtgaggacagacaaggaaaatagagtgaagaacctgtctgaggtgtttgactgcatccgcttccggctgatgacagagaagtacttcaaggaccacgtggagaaggatgacatcatcaagagcaacccagacctgcagaagaagatcaaggtgctgaaggatgcctttgctgggaagctgcctgagcccagcaagaatgctgccaagacaggagctggggaggtgaatggagatgtgggagatgaggacctgctgcccggctacctgaatgacatccccaggcatggcatgtttgtgaaggacctgatcctgctggtgaatgacacagctgctgtggcctatgaccccacagaaaatgaatgctacctgacagccctggccgagcagatccccaggaaccacagcagcatcgtgacccagcagaaccagatctacgtggtgggcggcctgtatgtggatgaggagaacaaggaccagcccctgcagagctacttcttccagctggacagcatcgccagcgagtgggtgggcctgccccccctgcccagcgcccgctgcctgtttggcctgggggaggtggatgacaagatctacgtggtggccggcaaggacctgcagacagaggccagcctggacagcgtgctgtgctatgaccctgtggccgccaagtggaatgaggtgaagaagctgcccatcaaggtgtatggccacaacgtcatcagccacaagggcatgatctactgcctgggcggcaagacagatgacaagaagtgcaccaacagagtcttcatcttcaaccccaagaagggggactggaaggacctggcccccatgaagatccccaggtccatgtttggagtggccgtgcacaagggcaagatcgtgattgctgggggcgtgacagaagatggcctgagcgcctctgtggaggcctttgacctgaccaccaacaagtgggatgtgatgacagagttcccccaggagaggagcagcatcagcctggtgtccctggccggcagcctgtatgccatcggcggctttgccatgatccagctggagagcaaggagtttgcccccacagaggtgaatgacatctggaagtatgaagatgacaagaaggagtgggccggcatgctgaaggagatccgctatgccagcggggccagctgcctggccacccggctgaacctcttcaagctgagcaagctgtag

SEQ ID NO: 161518 - DNA, 1821 bp, Artificial Sequence
  derived and/or modified sequence
atggacagccagcgggagctggccgaggagctgcggctgtaccagtccactttgctgcaggacggcctcaaggatctcctagatgaaaagaaatttatcgattgcaccctcaaagccggtgataaaagtctcccttgtcacagactgatcctgagcgcatgctccccttacttccgcgaatacttcctgagtgaaatagatgaggctaagaaaaaagaggtggtgttggacaatgtcgacccggccatccttgatctgattattaaatatctatacagcgcctctatcgacttgaatgacggcaacgtgcaggacatcttcgcattggcttcccggtttcagatcccctcagtattcactgtatgcgtctcctacctccaaaagcggctggcccccggtaactgtctcgcaatcctgcgactgggtcttctgctggactgtccaaggctcgcaatatcggcccgggaattcgtgtcagatcggttcgtgcaaatctgcaaggaggaggacttcatgcagttatctccgcaagagctcatttctgtgatcagcaatgatagcctgaacgttgaaaaagaggaagccgtgttcgaggcagtgatgaagtgggtgcgcaccgataaggagaatcgcgtcaaaaacctttcagaagtgttcgactgcattagattccggttaatgactgaaaagtatttcaaagaccacgtggaaaaggacgacattataaagagcaatcccgacctgcagaaaaagattaaagtactgaaagacgcctttgcgggaaaacttcctgagcctagtaagaacgctgcaaaaaccggggcaggggaggtcaatggcgatgtgggagacgaagatttactgcccgggtacctgaacgacatccctcgccatgggatgttcgtgaaagacctgatattgctggtgaatgacacagctgccgtggcttacgatccgacggagaacgaatgctatctcacagccctcgcagagcagatcccacgtaaccactctagtatcgtgacacagcagaaccagatttacgtcgtgggcgggctgtatgttgacgaggaaaataaagaccagccactgcaatcctacttcttccagttggatagcatagcctcggagtgggtgggtctgccaccgcttccatctgcacggtgcctgttcgggctcggcgaggtggatgacaagatctatgtggtggccggcaaagatctgcaaaccgaagcttcactggattccgtgctgtgttacgacccagtcgccgccaaatggaacgaggtgaagaaacttcctatcaaagtgtacggacacaacgtgatctcgcacaagggcatgatttattgcctcggagggaagacagatgacaaaaagtgcacaaaccgcgtgttcattttcaatccaaagaaaggcgactggaaggacctggcaccaatgaagataccccgcagcatgtttggggtcgccgtccataaaggtaagatcgttatcgccgggggtgttaccgaggacggattaagcgccagtgtcgaagccttcgatctgaccactaacaagtgggacgtgatgaccgagttcccccaggaacgatcttctatctcgttagttagtcttgcaggctccctgtatgccattgggggctttgccatgattcagctagagtcaaaagagtttgctccaaccgaagtgaacgatatttggaagtacgaggatgataagaaggagtgggcaggaatgctgaaagaaattaggtatgcctccggggcctcctgtctggctacccgcctgaatttgttcaaactgtctaagctgtag

SEQ ID NO: 161519 - DNA, 1821 bp, Artificial Sequence
  derived and/or modified sequence
atggactctcagagagagctggctgaggagctgcggctgtaccaaagcactctccttcaggacggtctgaaagatctacttgacgaaaagaagttcatcgattgcactctaaaggcaggagacaaatccctcccatgtcatcggcttatactgtccgcttgctccccttactttagagaatatttcttatccgagattgatgaagcaaagaagaaggaggtggtcttggataatgtcgatcccgctatactagatttgattatcaagtatctctatagcgcctctatcgatcttaatgatgggaatgtgcaggacatttttgcattagcttcgaggttccagattccgagcgtgttcactgtctgcgtgagttacctgcagaaacggctggcacccggaaattgcttggccattctgcgacttggcctactgctcgactgcccccgactggcaatctctgcgagagaattcgtatccgataggttcgtacaaatatgcaaggaagaggactttatgcagctgtctccacaggaactcatttccgtcatatccaacgacagcctaaatgtcgaaaaagaagaggccgtgttcgaagccgtcatgaagtgggttagaaccgacaaggagaatcgagtgaaaaacctgagcgaggtcttcgactgtattcggttccgcctgatgaccgaaaaatatttcaaggaccacgtcgagaaggacgacatcatcaagagtaatccggacttgcaaaagaaaattaaagtgctcaaagacgcttttgccggaaaactgcccgaaccctccaaaaatgcagccaaaacaggcgcaggcgaagtcaacggtgatgttggagacgaagatctgctccctggctacctgaacgacatcccccgacacggaatgttcgttaaagacctgattctcttagtaaacgatactgccgctgtggcctacgacccgactgagaatgagtgctacctgaccgcgctggcagagcagatacctcgtaaccacagctcgattgttacacagcagaatcagatctacgtggtcgggggattgtatgtggacgaggagaataaggatcagcctctgcagagttacttctttcaactcgattctattgcttctgagtgggtaggattacctcccctgccgtcggcaaggtgcttgttcggattgggcgaggttgatgacaagatctacgtcgtggctggcaaggatctgcagaccgaagccagtctggacagcgtgctttgttacgaccctgtcgcagccaaatggaatgaagtcaaaaagctgcccattaaggtttatggtcataacgttatctcccacaagggaatgatctactgcttgggtggaaagactgacgacaagaaatgtaccaaccgtgtttttatatttaatcctaaaaaaggcgattggaaagacctggctccaatgaaaataccaagatcaatgttcggagtagccgtccataagggcaaaattgtcatcgcgggtggcgtcaccgaggatggactcagcgcatcagtcgaagccttcgacctgactacgaataagtgggacgtaatgacagagttccctcaagagaggtcgtccatcagccttgtatccctagcaggttcactgtacgctatcggaggattcgcaatgattcagttggagagtaaagaattcgcaccgactgaggtcaacgatatctggaaatatgaggacgacaagaaagaatgggcaggaatgctgaaagagatacgttacgctagtggtgcctcctgcctcgccactaggttaaatcttttcaagctgagtaaactctag

SEQ ID NO: 161520 - DNA, 1821 bp, Artificial Sequence
  derived and/or modified sequence
atggacagccagagagagctggccgaggagctgagactgtaccagagcaccctgctgcaggacggcctgaaggacctgctggacgagaagaagttcatcgactgcaccctgaaggccggcgacaagagcctgccctgccacagactgatcctgagcgcctgcagcccctacttcagagagtacttcctgagcgagatcgacgaggccaagaagaaggaggtggtgctggacaacgtggaccccgccatcctggacctgatcatcaagtacctgtacagcgccagcatcgacctgaacgacggcaacgtgcaggacatcttcgccctggccagcagattccagatccccagcgtgttcaccgtgtgcgtgagctacctgcagaagagactggcccccggcaactgcctggccatcctgagactgggcctgctgctggactgccccagactggccatcagcgccagagagttcgtgagcgacagattcgtgcagatctgcaaggaggaggacttcatgcagctgagcccccaggagctgatcagcgtgatcagcaacgacagcctgaacgtggagaaggaggaggccgtgttcgaggccgtgatgaagtgggtgagaaccgacaaggagaacagagtgaagaacctgagcgaggtgttcgactgcatcagattcagactgatgaccgagaagtacttcaaggaccacgtggagaaggacgacatcatcaagagcaaccccgacctgcagaagaagatcaaggtgctgaaggacgccttcgccggcaagctgcccgagcccagcaagaacgccgccaagaccggcgccggcgaggtgaacggcgacgtgggcgacgaggacctgctgcccggctacctgaacgacatccccagacacggcatgttcgtgaaggacctgatcctgctggtgaacgacaccgccgccgtggcctacgaccccaccgagaacgagtgctacctgaccgccctggccgagcagatccccagaaaccacagcagcatcgtgacccagcagaaccagatctacgtggtgggcggcctgtacgtggacgaggagaacaaggaccagcccctgcagagctacttcttccagctggacagcatcgccagcgagtgggtgggcctgccccccctgcccagcgccagatgcctgttcggcctgggcgaggtggacgacaagatctacgtggtggccggcaaggacctgcagaccgaggccagcctggacagcgtgctgtgctacgaccccgtggccgccaagtggaacgaggtgaagaagctgcccatcaaggtgtacggccacaacgtgatcagccacaagggcatgatctactgcctgggcggcaagaccgacgacaagaagtgcaccaacagagtgttcatcttcaaccccaagaagggcgactggaaggacctggcccccatgaagatccccagaagcatgttcggcgtggccgtgcacaagggcaagatcgtgatcgccggcggcgtgaccgaggacggcctgagcgccagcgtggaggccttcgacctgaccaccaacaagtgggacgtgatgaccgagttcccccaggagagaagcagcatcagcctggtgagcctggccggcagcctgtacgccatcggcggcttcgccatgatccagctggagagcaaggagttcgcccccaccgaggtgaacgacatctggaagtacgaggacgacaagaaggagtgggccggcatgctgaaggagatcagatacgccagcggcgccagctgcctggccaccagactgaacctgttcaagctgagcaagctgtag

SEQ ID NO: 161521 - protein, 210 aa, Artificial Sequence
  derived and/or modified sequence
MPGVKLTTQAYCKMVLHGAKYPHCAVNGLLVAEKQKPRKEHLPLGGPGAHHTLFVDCIPLFHGTLALAPMLEVALTLIDSWCKDHSYVIAGYYQANERVKDASPNQVAEKVASRIAEGFSDTALIMVDNTKFTMDCVAPTIHVYEHHENRWRCRDPHHDYCEDWPEAQRISASLLDSRSYETLVDFDNHLDDIRNDWTNPEINKAVLHLC

SEQ ID NO: 161522 - DNA, 633 bp, Artificial Sequence
  derived and/or modified sequence
atgccaggagtgaaactcacgacacaggcctactgtaagatggtcctccatggggctaaatatccgcattgcgccgtcaatgggctactcgttgccgagaaacagaagccccgcaaggagcacctgcccctggggggcccaggcgcccaccacaccctcttcgtggactgtatccccctgttccacggtaccctcgccctggcccctatgttggaggtagctctgaccctcattgacagttggtgcaaggatcactcttatgtgattgctggatattatcaagcgaatgagcgcgtcaaagatgcatcaccaaatcaggtcgccgaaaaggtcgcttcaagaatcgccgagggcttttctgatacggcattgataatggtggacaacacaaagttcacgatggactgtgtggcgcctactatccacgtctacgagcatcacgagaaccggtggcggtgtcgcgatccgcaccatgattattgtgaggactggcctgaggcccaacggatttccgccagcctgttggactcaaggtcctacgagaccctcgtggattttgataatcacctggacgatatacgtaatgactggacaaaccctgaaataaataaagcagtcctgcatctttgttag

SEQ ID NO: 161523 - DNA, 633 bp, Artificial Sequence
  derived and/or modified sequence
atgcctggggtgaagctgaccacccaggcctactgcaagatggtgctgcatggagccaagtacccccactgtgctgtgaatggcctgctggtggccgagaagcagaagcccaggaaggagcacctgcccctgggcggccctggggcccaccacaccctgtttgtggactgcatccccctcttccacggcaccctggccctggcccccatgctggaggtggccctgaccctgattgacagctggtgcaaggaccacagctatgtgattgctggctactaccaggccaatgaaagagtgaaggatgccagccccaaccaggtggccgagaaggtggccagcagaattgctgagggcttcagtgacacagccctgatcatggtggacaacaccaagttcaccatggactgtgtggcccccaccatccacgtgtatgagcaccacgagaaccgctggcgctgccgggacccccaccacgactactgtgaggactggccagaggcccagaggatcagcgccagcctgctggacagccgctcctatgagaccctggtggactttgacaaccacctggatgacatcagaaatgactggaccaaccctgagatcaacaaggctgtgctgcacctgtgctag

SEQ ID NO: 161524 - DNA, 633 bp, Artificial Sequence
  derived and/or modified sequence
atgcccggcgtgaagctgaccacccaggcctactgcaagatggtgctccacggcgcaaagtatccccactgtgccgtgaacggactcctggtcgctgaaaaacaaaagcccaggaaagagcacctgccactcgggggcccaggagctcaccacaccctcttcgtggactgtatacctctctttcacggcacccttgctttggcccccatgctggaggtggcactcacactgatagactcctggtgtaaagatcactcatacgtcattgccggatattatcaagctaacgaacgcgttaaggatgccagccctaatcaggttgcagaaaaagtggctagtcgaatagcagagggattctcggatacagccctgatcatggtggataacactaagttcactatggactgcgtggcgccaactatccacgtctatgagcatcatgagaacaggtggagatgtcgagatccacatcatgattactgtgaggattggcctgaagcccagagaataagcgcgtcccttctggatagcaggtcctatgaaacccttgtcgatttcgataaccatctcgatgacatccgtaatgattggaccaatcccgagatcaacaaagctgtgctgcatctgtgttag

SEQ ID NO: 161525 - DNA, 633 bp, Artificial Sequence
  derived and/or modified sequence
atgcctggggtcaagttgacgactcaagcatactgtaaaatggtattacatggggcaaaataccctcactgcgccgtgaatggcttattggttgccgagaaacagaaacccaggaaagagcatttgcctctcggcggacctggagctcatcacaccttgttcgtagactgcatccccctcttccacggaacgctggctttagctccgatgctggaggttgccctcacgcttatcgattcttggtgtaaggatcacagttatgtaatagcgggttattaccaggccaatgagagggtcaaagatgcatcacctaatcaggtggctgaaaaggtggcctcacgcatagccgaaggattttcagacactgcactgattatggtagataataccaaattcacaatggattgcgtggccccaacaatccatgtgtacgaacaccatgaaaatcgctggcggtgcagagatccacaccacgactattgcgaagactggccagaagcgcaacggatcagcgcatccctcttggattcacggtcctatgagaccctagtggactttgacaaccatctagatgacatcaggaatgactggacgaaccctgaaatcaacaaagcagtcctccatttgtgctag

SEQ ID NO: 161526 - DNA, 1962 bp, Artificial Sequence
  derived and/or modified sequence
tccggcggcgccgggcgagaagcgcgactggagtctggggctgcggcttcccagaggcgcgagtcgcttttccaggagccgaggcccaaacggggccgggcctgaagggtcccccgccagcccgcggccgcgccatcaatcgccgccgcctcgtcccgcttctcggctgaggcgccgcgcggccaggcagcgggtccaggcctcagccgcgcgcccaggggcctccggggccctcccgggtcagcatgcccggggtgaaactgaccacccaggcctactgcaagatggtgctgcacggcgccaagtacccgcactgcgccgtcaacgggctcctggtggccgagaagcagaagccgcgtaaggagcacctccccctgggcggccccggcgcccaccacaccctcttcgtggactgcatccccctcttccacggcaccctggccctcgcccccatgctggaggtggctctcaccctgattgattcatggtgcaaagatcatagctacgtgattgctggttattatcaagctaatgagcgagtaaaggatgccagtccaaaccaggttgcagagaaggtggcctccagaatcgccgagggcttcagcgacactgcgctcatcatggtagacaacaccaagtttacgatggactgcgtagcgcctacgatccacgtgtacgagcaccatgagaacagatggcggtgcagagacccacaccatgactactgtgaagactggccagaggcacagaggatctcagcctcgctcctggacagccggtcctacgagacgctcgtggatttcgataaccacctggatgacattcggaatgactggacaaacccagagatcaataaagctgtcctacacttgtgctaggcaggcaccgctgtgactgggctccgggcctttccactacgttgaagaagaaaacctatttttaaatgtaaataaaatatcttgtagcctgtgtggaaagctgaccgttttaagaagtggcatgtgccttgaaagggggcagaatgttcagtcggtcgtgtttttaacacagagtctctagaagaggtgcagacatcccgtctgactgtccctgtggactctctcagttgtatgttgctataatcctccaaatcaaagctctttctgcttgtgcaagattgttcctattaaacagttttaactaaccttttataatctggagagaatactttttaaggcttttgaactatctttttttaaaaaaaaaaaaaaaagcccacatcttatactccaatgagtgtgtttgtgagtttttatcctgtttgaattttgatgtcgtccaggcgtcctgggatcagggtagacacgtggagtgctggtgctgagctgtttgagaagctctgtgtgggtgtttctgtggtcaggtaggctgggctgtgaacagcactgctccacatggtgtcggctcacagagccaccgcaactctgcccagcgggagtgacaccactgatgccacagaagcctttatcgttaggggcaaaagcagacatctctggtagcaggagctcagtgtggtgctcttcagccacgcagaaagctcacgtgcctgcagggccaggaaagggaaatgatcgtttcttttgtattaggaaaaacaagacttagacttcccgagttgtgcagagtgacgtctgtactttttatacttagaacatttggtcaagttttgtaaccaaaccttagggaattgagagggaaactttatggtacgtttaccttttttcctttttatatgaattattttgtacaaagttcagagagcggtacctttcctactgtcttttctttgactccatggaggaatttgtaacgatcggtgtgacctgaaagggtttgtgatacagcggtcactattttctcttaacacataggaaaaaagttcagacatcgctacaataaatgtgctttatttgatccaccaaa

SEQ ID NO: 161527 - DNA, 1869 bp, Artificial Sequence
  derived and/or modified sequence
tttccggcggcgccgggcgagaagcgcgactggagtctggggctgcggcttcccagaggcgcgagtcgcttttccaggagccgaggcccaaacggggccgggcctgaagggtcccccgccagcccgcggccgcgccatcaatcgccgccgcctcgtcccgcttctcggctgaggcgccgcgcggccaggcagcgggtccaggcctcagccgcgcgcccaggggcctccggggccctcccgggtcagcatgcccggggtgaaactgaccacccaggcctactgcaagatggtgctgcacggcgccaagtacccgcactgcgccgtcaacgggctcctggtggccgagaagcagaagccgcgtaaggagcacctccccctgggcggccccggcgcccaccacaccctcttcgtggactgcatccccctcttccacggcaccctggccctcgcccccatgctggaggtggctctcaccctgattgattcatggtgcaaagatcatagctacgtgattgctggttattatcaagctaatgagcgagtaaaggatgccagtccaaaccaggttgcagagaaggtggcctccagaatcgccgagggcttcagcgacactgcgctcatcatgtgactactgtgaagactggccagaggcacagaggatctcagcctcgctcctggacagccggtcctacgagacgctcgtggatttcgataaccacctggatgacattcggaatgactggacaaacccagagatcaataaagctgtcctacacttgtgctaggcaggcaccgctgtgactgggctccgggcctttccactacgttgaagaagaaaacctatttttaaatgtaaataaaatatcttgtagcctgtgtggaaagctgaccgttttaagaagtggcatgtgccttgaaagggggcagaatgttcagtcggtcgtgtttttaacacagagtctctagaagaggtgcagacatcccgtctgactgtccctgtggactctctcagttgtatgttgctataatcctccaaatcaaagctctttctgcttgtgcaagattgttcctattaaacagttttaactaaccttttataatctggagagaatactttttaaggcttttgaactatctttttttaaaaaaaaaaaaaaaagcccacatcttatactccaatgagtgtgtttgtgagtttttatcctgtttgaattttgatgtcgtccaggcgtcctgggatcagggtagacacgtggagtgctggtgctgagctgtttgagaagctctgtgtgggtgtttctgtggtcaggtaggctgggctgtgaacagcactgctccacatggtgtcggctcacagagccaccgcaactctgcccagcgggagtgacaccactgatgccacagaagcctttatcgttaggggcaaaagcagacatctctggtagcaggagctcagtgtggtgctcttcagccacgcagaaagctcacgtgcctgcagggccaggaaagggaaatgatcgtttcttttgtattaggaaaaacaagacttagacttcccgagttgtgcagagtgacgtctgtactttttatacttagaacatttggtcaagttttgtaaccaaaccttagggaattgagagggaaactttatggtacgtttaccttttttcctttttatatgaattattttgtacaaagttcagagagcggtacctttcctactgtcttttctttgactccatggaggaatttgtaacgatcggtgtgacctgaaagggtttgtgatacagcggtcactattttctcttaacacataggaaaaaagttcagacatcgctacaataaatgtgctttatttgatccaccaaa

SEQ ID NO: 161528 - DNA, 633 bp, Artificial Sequence
  derived and/or modified sequence
atgcccggcgtgaagctgaccacccaggcctactgcaagatggtgctgcacggcgccaagtacccccactgcgccgtgaacggcctgctggtggccgagaagcagaagcccagaaaggagcacctgcccctgggcggccccggcgcccaccacaccctgttcgtggactgcatccccctgttccacggcaccctggccctggcccccatgctggaggtggccctgaccctgatcgacagctggtgcaaggaccacagctacgtgatcgccggctactaccaggccaacgagagagtgaaggacgccagccccaaccaggtggccgagaaggtggccagcagaatcgccgagggcttcagcgacaccgccctgatcatggtggacaacaccaagttcaccatggactgcgtggcccccaccatccacgtgtacgagcaccacgagaacagatggagatgcagagacccccaccacgactactgcgaggactggcccgaggcccagagaatcagcgccagcctgctggacagcagaagctacgagaccctggtggacttcgacaaccacctggacgacatcagaaacgactggaccaaccccgagatcaacaaggccgtgctgcacctgtgctag

SEQ ID NO: 161529 - protein, 796 aa, Artificial Sequence
  derived and/or modified sequence
MTKDKEPIVKSFHFVCLMIIIVGTRIQFSDGNEFAVDKSKRGLIHVPKDLPLKTKVLDMSQNYIAELQVSDMSFLSELTVLRLSHNRIQLLDLSVFKFNQDLEYLDLSHNQLQKISCHPIVSFRHLDLSFNDFKALPICKEFGNLSQLNFLGLSAMKLQKLDLLPIAHLHLSYILLDLRNYYIKENETESLQILNAKTLHLVFHPTSLFAIQVNISVNTLGCLQLTNIKLNDDNCQVFIKFLSELTRGSTLLNFTLNHIETTWKCLVRVFQFLWPKPVEYLNIYNLTIIESIREEDFTYSKTTLKALTIEHITNQVFLFSQTALYTVFSEMNIMMLTISDTPFIHMLCPHAPSTFKFLNFTQNVFTDSIFEKCSTLVKLETLILQKNGLKDLFKVGLMTKDMPSLEILDVSWNSLESGRHKENCTWVESIVVLNLSSNMLTDSVFRCLPPRIKVLDLHSNKIKSVPKQVVKLEALQELNVAFNSLTDLPGCGSFSSLSVLIIDHNSVSHPSADFFQSCQKMRSIKAGDNPFQCTCELREFVKNIDQVSSEVLEGWPDSYKCDYPESYRGSPLKDFHMSELSCNITLLIVTIGATMLVLAVTVTSLCIYLDLPWYLRMVCQWTQTRRRARNIPLEELQRNLQFHAFISYSEHDSAWVKSELVPYLEKEDIQICLHERNFVPGKSIVENIINCIEKSYKSIFVLSPNFVQSEWCHYELYFAHHNLFHEGSNNLILILLEPIPQNSIPNKYHKLKALMTQRTYLQWPKEKSKRGLFWANIRAAFNMKLTLVTENNDVKS

SEQ ID NO: 161530 - protein, 150 aa, Artificial Sequence
  derived and/or modified sequence
MTKDKEPIVKSFHFVCLMIIIVGTRIQFSDGNEFAVDKSKRGLIHVPKDLPLKTKVLDMSQNYIAELQVSDMSFLSELTVLRLSHNRIQLLDLSVFKFNQDLEYLDLSHNQLQKISCHPIVSFRHLDLSFNDFKALPICKEFGNLSQLNF

SEQ ID NO: 161531 - protein, 480 aa, Artificial Sequence
  derived and/or modified sequence
MTKDKEPIVKSFHFVCLMIIIVGTRIQFSDGNEFAVDKSKRGLIHVPKDLPLKTKVLDMSQNYIAELQVSDMSFLSELTVLRLSHNRIQLLDLSVFKFNQDLEYLDLSHNQLQKISCHPIVSFRHLDLSFNDFKALPICKEFGNLSQLNFLGLSAMKLQKLDLLPIAHLHLSYILLDLRNYYIKENETESLQILNAKTLHLVFHPTSLFAIQVNISVNTLGCLQLTNIKLNDDNCQVFIKFLSELTRGSTLLNFTLNHIETTWKCLVRVFQFLWPKPVEYLNIYNLTIIESIREEDFTYSKTTLKALTIEHITNQVFLFSQTALYTVFSEMNIMMLTISDTPFIHMLCPHAPSTFKFLNFTQNVFTDSIFEKCSTLVKLETLIFVLSPNFVQSEWCHYELYFAHHNLFHEGSNNLILILLEPIPQNSIPNKYHKLKALMTQRTYLQWPKEKSKRGLFWANIRAAFNMKLTLVTENNDVKS

SEQ ID NO: 161532 - protein, 91 aa, Artificial Sequence
  derived and/or modified sequence
MTKDKEPIVKSFHFVCLMIIIVGTRIQFSDGNEFAVDKSKRGLIHVPKDLPLKTKVLDMSQNYIAELQVSDMSFLSELTVLRLSHNRIQLL

SEQ ID NO: 161533 - DNA, 2391 bp, Artificial Sequence
  derived and/or modified sequence
atgaccaaggacaaggagcccatcgtgaagagcttccacttcgtgtgcctgatgatcatcatcgtgggcaccagaatccagttcagcgacggcaacgagttcgccgtggacaagagcaagagaggcctgatccacgtgcccaaggacctgcccctgaagaccaaggtgctggacatgagccagaactacatcgccgagctgcaggtgagcgacatgagcttcctgagcgagctgaccgtgctgagactgagccacaacagaatccagctgctggacctgagcgtgttcaagttcaaccaggacctggagtacctggacctgagccacaaccagctgcagaagatcagctgccaccccatcgtgagcttcagacacctggacctgagcttcaacgacttcaaggccctgcccatctgcaaggagttcggcaacctgagccagctgaacttcctgggcctgagcgccatgaagctgcagaagctggacctgctgcccatcgcccacctgcacctgagctacatcctgctggacctgagaaactactacatcaaggagaacgagaccgagagcctgcagatcctgaacgccaagaccctgcacctggtgttccaccccaccagcctgttcgccatccaggtgaacatcagcgtgaacaccctgggctgcctgcagctgaccaacatcaagctgaacgacgacaactgccaggtgttcatcaagttcctgagcgagctgaccagaggcagcaccctgctgaacttcaccctgaaccacatcgagaccacctggaagtgcctggtgagagtgttccagttcctgtggcccaagcccgtggagtacctgaacatctacaacctgaccatcatcgagagcatcagagaggaggacttcacctacagcaagaccaccctgaaggccctgaccatcgagcacatcaccaaccaggtgttcctgttcagccagaccgccctgtacaccgtgttcagcgagatgaacatcatgatgctgaccatcagcgacacccccttcatccacatgctgtgcccccacgcccccagcaccttcaagttcctgaacttcacccagaacgtgttcaccgacagcatcttcgagaagtgcagcaccctggtgaagctggagaccctgatcctgcagaagaacggcctgaaggacctgttcaaggtgggcctgatgaccaaggacatgcccagcctggagatcctggacgtgagctggaacagcctggagagcggcagacacaaggagaactgcacctgggtggagagcatcgtggtgctgaacctgagcagcaacatgctgaccgacagcgtgttcagatgcctgccccccagaatcaaggtgctggacctgcacagcaacaagatcaagagcgtgcccaagcaggtggtgaagctggaggccctgcaggagctgaacgtggccttcaacagcctgaccgacctgcccggctgcggcagcttcagcagcctgagcgtgctgatcatcgaccacaacagcgtgagccaccccagcgccgacttcttccagagctgccagaagatgagaagcatcaaggccggcgacaaccccttccagtgcacctgcgagctgagagagttcgtgaagaacatcgaccaggtgagcagcgaggtgctggagggctggcccgacagctacaagtgcgactaccccgagagctacagaggcagccccctgaaggacttccacatgagcgagctgagctgcaacatcaccctgctgatcgtgaccatcggcgccaccatgctggtgctggccgtgaccgtgaccagcctgtgcatctacctggacctgccctggtacctgagaatggtgtgccagtggacccagaccagaagaagagccagaaacatccccctggaggagctgcagagaaacctgcagttccacgccttcatcagctacagcgagcacgacagcgcctgggtgaagagcgagctggtgccctacctggagaaggaggacatccagatctgcctgcacgagagaaacttcgtgcccggcaagagcatcgtggagaacatcatcaactgcatcgagaagagctacaagagcatcttcgtgctgagccccaacttcgtgcagagcgagtggtgccactacgagctgtacttcgcccaccacaacctgttccacgagggcagcaacaacctgatcctgatcctgctggagcccatcccccagaacagcatccccaacaagtaccacaagctgaaggccctgatgacccagagaacctacctgcagtggcccaaggagaagagcaagagaggcctgttctgggccaacatcagagccgccttcaacatgaagctgaccctggtgaccgagaacaacgacgtgaagagctag

SEQ ID NO: 161534 - DNA, 453 bp, Artificial Sequence
  derived and/or modified sequence
atgaccaaggacaaggagcccatcgtgaagagcttccacttcgtgtgcctgatgatcatcatcgtgggcaccagaatccagttcagcgacggcaacgagttcgccgtggacaagagcaagagaggcctgatccacgtgcccaaggacctgcccctgaagaccaaggtgctggacatgagccagaactacatcgccgagctgcaggtgagcgacatgagcttcctgagcgagctgaccgtgctgagactgagccacaacagaatccagctgctggacctgagcgtgttcaagttcaaccaggacctggagtacctggacctgagccacaaccagctgcagaagatcagctgccaccccatcgtgagcttcagacacctggacctgagcttcaacgacttcaaggccctgcccatctgcaaggagttcggcaacctgagccagctgaacttctag

SEQ ID NO: 161535 - DNA, 1443 bp, Artificial Sequence
  derived and/or modified sequence
atgaccaaggacaaggagcccatcgtgaagagcttccacttcgtgtgcctgatgatcatcatcgtgggcaccagaatccagttcagcgacggcaacgagttcgccgtggacaagagcaagagaggcctgatccacgtgcccaaggacctgcccctgaagaccaaggtgctggacatgagccagaactacatcgccgagctgcaggtgagcgacatgagcttcctgagcgagctgaccgtgctgagactgagccacaacagaatccagctgctggacctgagcgtgttcaagttcaaccaggacctggagtacctggacctgagccacaaccagctgcagaagatcagctgccaccccatcgtgagcttcagacacctggacctgagcttcaacgacttcaaggccctgcccatctgcaaggagttcggcaacctgagccagctgaacttcctgggcctgagcgccatgaagctgcagaagctggacctgctgcccatcgcccacctgcacctgagctacatcctgctggacctgagaaactactacatcaaggagaacgagaccgagagcctgcagatcctgaacgccaagaccctgcacctggtgttccaccccaccagcctgttcgccatccaggtgaacatcagcgtgaacaccctgggctgcctgcagctgaccaacatcaagctgaacgacgacaactgccaggtgttcatcaagttcctgagcgagctgaccagaggcagcaccctgctgaacttcaccctgaaccacatcgagaccacctggaagtgcctggtgagagtgttccagttcctgtggcccaagcccgtggagtacctgaacatctacaacctgaccatcatcgagagcatcagagaggaggacttcacctacagcaagaccaccctgaaggccctgaccatcgagcacatcaccaaccaggtgttcctgttcagccagaccgccctgtacaccgtgttcagcgagatgaacatcatgatgctgaccatcagcgacacccccttcatccacatgctgtgcccccacgcccccagcaccttcaagttcctgaacttcacccagaacgtgttcaccgacagcatcttcgagaagtgcagcaccctggtgaagctggagaccctgatcttcgtgctgagccccaacttcgtgcagagcgagtggtgccactacgagctgtacttcgcccaccacaacctgttccacgagggcagcaacaacctgatcctgatcctgctggagcccatcccccagaacagcatccccaacaagtaccacaagctgaaggccctgatgacccagagaacctacctgcagtggcccaaggagaagagcaagagaggcctgttctgggccaacatcagagccgccttcaacatgaagctgaccctggtgaccgagaacaacgacgtgaagagctag

SEQ ID NO: 161536 - DNA, 276 bp, Artificial Sequence
  derived and/or modified sequence
atgaccaaggacaaggagcccatcgtgaagagcttccacttcgtgtgcctgatgatcatcatcgtgggcaccagaatccagttcagcgacggcaacgagttcgccgtggacaagagcaagagaggcctgatccacgtgcccaaggacctgcccctgaagaccaaggtgctggacatgagccagaactacatcgccgagctgcaggtgagcgacatgagcttcctgagcgagctgaccgtgctgagactgagccacaacagaatccagctgctgtag

SEQ ID NO: 161537 - DNA, 2391 bp, Artificial Sequence
  derived and/or modified sequence
atgacaaaagataaggagccaatcgtcaaatcttttcacttcgtctgcttaatgattatcattgttgggaccagaatccagttctccgacggcaatgagtttgcagttgacaagtcgaagcgcggcctgatccacgtgccgaaggatctccccctcaaaacaaaggtgctggacatgagccaaaattacattgcggaactgcaggtgagtgatatgagctttctctcagagctaaccgtcctcagattgtcacataaccgtattcaattattagacctgtcggtgttcaagttcaaccaggaccttgagtacctggacttatcccacaaccaactgcaaaaaatctcctgtcaccccatcgtgtccttcagacacctggatctaagcttcaatgatttcaaggctttacccatctgcaaggagtttggtaatctgtctcaactgaatttccttggtctttccgcaatgaaattacagaagttggaccttctgcctatagctcacctccatttgagttatattttactcgacctgcggaattactacatcaaagagaacgaaaccgagtcactgcaaatcctgaatgccaagaccctgcatctcgtttttcaccctacaagtctgtttgccatccaggttaatatttctgtgaatacgcttggctgtctccagctgaccaatatcaaactcaatgacgacaactgccaggtcttcatcaaattcttaagtgagctgactcgggggtcaacactgctgaatttcaccctgaaccatatcgaaacaacctggaagtgcctggtgcgggtgttccagttcctctggcctaaacctgttgaatatctaaatatttataacctcactatcattgaatccatccgcgaagaagattttacttacagcaagacgaccttaaaggcccttacaatcgaacatatcaccaatcaggtattccttttttcacagaccgcgttatacaccgttttttctgagatgaatattatgatgctgactatatccgacacccctttcatccacatgttgtgccctcacgctcccagtaccttcaaattccttaacttcacacagaacgtttttacagacagcatcttcgaaaagtgtagtacgctcgtaaaactggagacgctcattcttcagaagaacggactgaaggacctcttcaaagtgggtctgatgacaaaggacatgccatcccttgagatcctggacgtctcttggaacagcctcgagagtggcaggcataaagagaattgcacttgggtcgagagcattgtggtgttgaacttgagctctaatatgctcacagatagcgtgttcaggtgcctgccgccccgcatcaaggtgttggacctccactctaataaaatcaagtctgtgccaaagcaggtcgtaaagctggaggcactccaggagctaaacgtcgcctttaattcactcactgacctccccggatgtggatctttttcctctctaagcgtgctgattatcgaccacaactcagtctcacatccctccgctgatttctttcaatcctgccaaaaaatgaggtccatcaaagcaggagacaaccctttccagtgtacatgtgagttgagagagtttgttaagaatattgatcaagtttctagtgaggtgctggaaggatggccggactcctacaaatgtgactatcccgaatcctaccggggatcacccctaaaggactttcacatgtcagaactgagctgtaatataactctactgattgttaccattggggccacgatgctcgtcttggctgtgacagtcaccagtctgtgcatctacttggacctgccatggtacctccggatggtgtgtcaatggacccaaaccagaagacgcgcacgaaatatcccattagaagagctccagcggaatctacagttccacgctttcatctcttactcagaacatgactcagcttgggtcaaatcggaactggtaccctatttagagaaggaggacatacagatttgcctccacgaaaggaacttcgtgccaggcaagagcatcgtagagaatattatcaactgcatcgaaaagtcttacaagagcatttttgtactgtccccaaactttgtccagtcagaatggtgccactacgagctgtacttcgctcaccacaacctgtttcacgagggctccaataacttgattctgatcctactggagcctattccccagaattcaatccccaacaaatatcacaagctcaaggccctcatgacccaaagaacctacctgcaatggcctaaagaaaaaagtaagcgggggctgttttgggccaacattagggcagcgtttaacatgaagctcacactcgttacagagaataacgacgtcaagtcctag

SEQ ID NO: 161538 - DNA, 2391 bp, Artificial Sequence
  derived and/or modified sequence
atgaccaaagataaagagccgattgtgaagtcattccatttcgtgtgcctcatgattattattgtcgggactcggattcagttttctgatgggaacgagtttgcggtggataaatcaaaaagaggcctaatacacgtgcctaaggatctgccactgaaaaccaaagtgctcgatatgagccagaactacattgcagaattgcaggtctccgatatgagctttctgtccgaattgaccgtactgcggctttctcacaaccgaattcaacttttagatctgagcgtgttcaagttcaatcaagacctggagtacctagatctgtcccacaaccaattacagaaaatcagctgccacccaattgtctctttccgccacttggatctcagtttcaatgacttcaaagcactgcccatttgtaaggaattcggcaatttaagtcagctgaattttctcggcctatccgccatgaagctccagaagctcgaccttcttcctatcgctcacctgcatctttcttatatcttgctcgacctgaggaactattacatcaaagagaatgagactgagtccctccagattctgaatgccaaaacactccacctggtgttccatcccaccagcctctttgcgatccaggtgaatatttccgtcaacactctggggtgtcttcaactcacgaatattaagctcaatgatgataactgccaggtctttatcaaattcctgagtgaactgacgagagggtcgaccctcttaaattttaccctcaatcatatagagaccacatggaaatgcctggtccgcgtcttccagtttttgtggccgaaacctgtggagtatctcaacatctataatcttactatcattgagagcatccgggaagaagatttcacctactctaagactaccctaaaggcactgacaattgagcatatcaccaaccaggtctttctatttagccagaccgctctctacactgtcttcagtgagatgaacattatgatgctgaccataagcgatactccattcatccatatgttgtgtccacacgccccatcaacctttaagttcctcaatttcactcagaacgtgttcacagactccatattcgagaagtgtagcaccctggtcaagctggagacactgatcttgcaaaagaacggtctgaaggacttatttaaggtgggcctgatgaccaaggacatgcctagccttgaaatactagatgtctcttggaattcattggagagtggaagacacaaggagaattgcacgtgggtagagagcatcgtggtcctgaatctctcctctaacatgctgactgattcggtttttaggtgcctcccaccacgcattaaagttttggaccttcacagcaataagataaaatccgtcccaaagcaagtagtgaagctcgaggcccttcaggagctgaacgttgcgtttaactccttaaccgatttgcctggttgtggctcattcagctcactgtctgtgctgattatcgatcataacagcgtctctcacccttcagccgacttctttcaaagctgccagaagatgcgctcaattaaggccggtgacaatcctttccagtgcacttgcgagcttagagagttcgtcaagaacattgatcaagtgtcctccgaggtcctggagggctggcccgattcatacaagtgcgactaccccgagtcctatcgtgggtcaccattaaaggattttcacatgtctgagctgagttgtaacatcaccctcttaatcgttacaataggcgctacgatgctggtgcttgccgtgaccgtgacctcattgtgtatttatctcgacctgccttggtatcttcgaatggtgtgccagtggacacaaacaagacggagagcgcgtaatatccctctggaagaattgcagcggaatctacaattccacgcctttatttcctactcagaacacgatagcgcctgggttaaaagcgagctggtcccctacttggaaaaggaggatattcagatttgcttgcacgagcggaacttcgtgccaggcaagtccatcgtggagaatattatcaactgcattgaaaagtcctataaatctatatttgtgctgagccccaatttcgtacagtcggagtggtgccattatgaactgtactttgcacatcataacttgtttcatgagggcagcaacaatctgatactcatccttctcgaaccaattccccagaattccatccccaacaaataccataagctaaaagccctgatgacccaaaggacatacctacagtggccaaaggaaaaatccaaaagagggctattctgggcaaacattcgggccgcctttaatatgaagcttacactagtaactgaaaataacgatgtcaagtcctag

SEQ ID NO: 161539 - DNA, 453 bp, Artificial Sequence
  derived and/or modified sequence
atgaccaaggataaagagcccatcgtgaaatcttttcactttgtgtgccttatgatcattatcgtggggacacgcatccagttcagtgacggcaatgaattcgctgttgacaagagtaagcgtggactgatccatgttcctaaggatttaccccttaaaacaaaagtactcgatatgagtcagaactatatagccgagcttcaggtgtcagacatgagcttcctgtccgaactgacagtactcaggttgtcccataatagaattcagctactggacctctctgtatttaagtttaaccaggatctcgaataccttgatctgtctcacaatcaacttcagaagatctcttgccatcccatcgtctcctttagacacctggacctgtccttcaatgattttaaggccctgcctatctgcaaggagttcgggaatttgtcacaactgaatttttag

SEQ ID NO: 161540 - DNA, 1443 bp, Artificial Sequence
  derived and/or modified sequence
atgaccaaggacaaggagccaattgtgaagtctttccacttcgtgtgcctcatgattattatcgttgggacccgaatacagttctccgacggcaatgagttcgcagtagacaaatcaaaacgcgggcttattcatgtgcccaaagacctcccactgaaaactaaagtcttggatatgtcgcagaactacattgccgaactccaggtctctgacatgtcgttcctctctgaacttacagtcctaagactgtctcacaataggatccagttgctagatctcagcgtttttaagttcaaccaagacctggagtacctcgacctctcccataaccagctgcagaaaatttcatgccaccccatcgttagctttcggcatctcgacctgagctttaacgacttcaaggcgctgcccatttgcaaggagtttggcaatctgtcccaactgaatttcctcgggctgtcagcaatgaagctgcagaagttggacctccttcctatcgcccatctgcacctcagctacattttattggacctgaggaactattacattaaggagaacgagacggagtcgctacagatcctgaatgctaagacgctgcacctggtgtttcacccaacatccctttttgccatccaggtgaacataagcgtcaataccctcggatgtcttcagttaacaaacataaaactgaatgatgataactgccaggtgtttattaagttccttagtgaactgactagaggatcaacacttctgaactttacgcttaatcatatcgagacaacctggaaatgtttggtgcgcgtcttccaatttctctggcccaaacctgtggagtacctgaacatctataacttgactataatcgagtccatccgcgaggaggatttcacttactcgaaaacaactcttaaggctctgactatcgaacatatcactaaccaagtgtttttgttttcccagaccgccttgtataccgttttttcagagatgaatatcatgatgctgaccatctcagatacccccttcattcacatgctgtgtccacacgctccatctaccttcaaattcctcaacttcacccaaaatgtcttcacagacagcattttcgagaagtgtagcaccctagtgaaacttgaaaccctgatctttgttctgtctccaaactttgtgcagtctgagtggtgccactatgaattgtattttgcacaccataacctattccacgaagggagcaataacctgatcctcattctgctggaacctattccccaaaatagcatcccaaacaagtatcacaagttaaaagcgctaatgacccaaaggacttaccttcagtggccgaaggaaaagtctaagcgcggactgttctgggcaaatatcagggctgccttcaacatgaagctgaccctggttacggagaataatgatgtaaagtcttag

SEQ ID NO: 161541 - DNA, 276 bp, Artificial Sequence
  derived and/or modified sequence
atgactaaggataaggaacctattgtgaaatcttttcatttcgtttgtcttatgataattattgtaggcactcgtatacagttcagcgatggcaacgaattcgctgtggacaagtcaaagcggggactgatacatgtgcctaaagatctcccgctgaaaactaaggttcttgatatgtcccagaactacatcgccgagttgcaggtttcggacatgtcctttttgtcagaactgacagttttacggctttcccacaatcgcattcaactgctgtag

SEQ ID NO: 161542 - DNA, 2391 bp, Artificial Sequence
  derived and/or modified sequence
atgaccaaggacaaggagcccatcgtgaagagcttccactttgtgtgcctgatgatcatcatcgtgggcacccgcatccagttcagtgatggaaatgaatttgctgtggacaagagcaagaggggcctcatccacgtgcccaaggacctgcccctgaagaccaaggtgctggacatgagccagaactacatcgccgagctgcaggtgtctgacatgtccttcctgtctgagctgactgtgctgcggctgagccacaaccgcatccagctgctggacctgagcgtcttcaagttcaaccaggacctggagtacctggacctgagccacaaccagctgcagaagatcagctgccaccccatcgtgtccttccgccacctggacctgtccttcaatgacttcaaggccctgcccatctgcaaggagtttggaaacctgagccagctgaacttcctgggcctgagcgccatgaagctgcagaagctggacctgctgcccatcgcccacctgcacctgagctacatcctgctggacctgaggaactactacatcaaggaaaatgaaacagagagcctgcagatcctgaatgccaagaccctgcacctggtgttccaccccaccagcctgtttgccatccaggtgaacatctctgtgaacaccctgggctgcctgcagctgaccaacatcaagctgaatgatgacaactgccaggtgttcatcaagttcctgtctgagctgacccggggcagcaccctgctgaacttcaccctgaaccacatcgagaccacctggaagtgcctggtgcgggtcttccagttcctgtggcccaagcctgtggagtacctgaacatctacaacctgaccatcatcgagagcatccgggaggaggacttcacctacagcaagaccaccctgaaggccctgaccatcgagcacatcaccaaccaggtgttcctgttcagccagacagccctgtacaccgtcttcagcgagatgaacatcatgatgctgaccatcagtgacacccccttcatccacatgctgtgcccccacgcccccagcaccttcaagttcctgaacttcacccagaatgtgttcacagacagcatctttgagaagtgcagcaccctggtgaagctggagaccctcatcctgcagaagaatggcctgaaggacctcttcaaggtgggcctgatgaccaaggacatgcccagcctggagatcctggatgtgtcctggaacagcctggagagcggccgccacaaggagaactgcacctgggtggagagcatcgtggtgctgaacctgagcagcaacatgctgacagattctgtgttccgctgcctgcccccacgcatcaaggtgctggacctgcacagcaacaagatcaagtctgtgcccaagcaggtggtgaagctggaggccctgcaggagctgaatgtggccttcaacagcctgacagacctgcccggctgcggcagcttcagcagcctgtctgtgctgatcatcgaccacaacagcgtgagccaccccagcgctgacttcttccagagctgccagaagatgaggagcatcaaggccggggacaaccccttccagtgcacctgtgagctgcgggagtttgtgaagaacatcgaccaggtgtcctctgaggtgctggagggctggccagacagctacaagtgtgactacccagagagctaccggggcagccccctgaaggacttccacatgtctgagctgagctgcaacatcaccctgctgattgtgaccatcggggccaccatgctggtgctggccgtgacagtgaccagcctgtgcatctacctggacctgccctggtacctgaggatggtgtgccagtggacccagacccggcggcgggccaggaacatccccctggaggagctgcagaggaacctgcagttccacgccttcatctcctacagcgagcatgattctgcctgggtgaagtctgagctggtgccctacctggagaaggaggacatccagatctgcctgcacgagaggaactttgtgcctgggaagagcatcgtggagaacatcatcaactgcatcgagaagagctacaagagcatctttgtgctgagccccaactttgtgcagagcgagtggtgccactatgagctgtactttgcccaccacaacctcttccacgagggcagcaacaacctgatcctgatcctgctggagcccatcccccagaacagcatccccaacaagtaccacaagctgaaggccctgatgacccagaggacctacctgcagtggcccaaggagaagagcaagaggggcctcttctgggccaacatccgggccgccttcaacatgaagctgaccctggtgacagagaacaatgatgtgaagagctag

SEQ ID NO: 161543 - DNA, 453 bp, Artificial Sequence
  derived and/or modified sequence
atgaccaaggacaaggagcccatcgtgaagagcttccactttgtgtgcctgatgatcatcatcgtgggcacccgcatccagttcagtgatggaaatgaatttgctgtggacaagagcaagaggggcctcatccacgtgcccaaggacctgcccctgaagaccaaggtgctggacatgagccagaactacatcgccgagctgcaggtgtctgacatgtccttcctgtctgagctgactgtgctgcggctgagccacaaccgcatccagctgctggacctgagcgtcttcaagttcaaccaggacctggagtacctggacctgagccacaaccagctgcagaagatcagctgccaccccatcgtgtccttccgccacctggacctgtccttcaatgacttcaaggccctgcccatctgcaaggagtttggaaacctgagccagctgaacttctag

SEQ ID NO: 161544 - DNA, 1443 bp, Artificial Sequence
  derived and/or modified sequence
atgaccaaggacaaggagcccatcgtgaagagcttccactttgtgtgcctgatgatcatcatcgtgggcacccgcatccagttcagtgatggaaatgaatttgctgtggacaagagcaagaggggcctcatccacgtgcccaaggacctgcccctgaagaccaaggtgctggacatgagccagaactacatcgccgagctgcaggtgtctgacatgtccttcctgtctgagctgactgtgctgcggctgagccacaaccgcatccagctgctggacctgagcgtcttcaagttcaaccaggacctggagtacctggacctgagccacaaccagctgcagaagatcagctgccaccccatcgtgtccttccgccacctggacctgtccttcaatgacttcaaggccctgcccatctgcaaggagtttggaaacctgagccagctgaacttcctgggcctgagcgccatgaagctgcagaagctggacctgctgcccatcgcccacctgcacctgagctacatcctgctggacctgaggaactactacatcaaggaaaatgaaacagagagcctgcagatcctgaatgccaagaccctgcacctggtgttccaccccaccagcctgtttgccatccaggtgaacatctctgtgaacaccctgggctgcctgcagctgaccaacatcaagctgaatgatgacaactgccaggtgttcatcaagttcctgtctgagctgacccggggcagcaccctgctgaacttcaccctgaaccacatcgagaccacctggaagtgcctggtgcgggtcttccagttcctgtggcccaagcctgtggagtacctgaacatctacaacctgaccatcatcgagagcatccgggaggaggacttcacctacagcaagaccaccctgaaggccctgaccatcgagcacatcaccaaccaggtgttcctgttcagccagacagccctgtacaccgtcttcagcgagatgaacatcatgatgctgaccatcagtgacacccccttcatccacatgctgtgcccccacgcccccagcaccttcaagttcctgaacttcacccagaatgtgttcacagacagcatctttgagaagtgcagcaccctggtgaagctggagaccctcatctttgtgctgagccccaactttgtgcagagcgagtggtgccactatgagctgtactttgcccaccacaacctcttccacgagggcagcaacaacctgatcctgatcctgctggagcccatcccccagaacagcatccccaacaagtaccacaagctgaaggccctgatgacccagaggacctacctgcagtggcccaaggagaagagcaagaggggcctcttctgggccaacatccgggccgccttcaacatgaagctgaccctggtgacagagaacaatgatgtgaagagctag

SEQ ID NO: 161545 - DNA, 276 bp, Artificial Sequence
  derived and/or modified sequence
atgaccaaggacaaggagcccatcgtgaagagcttccactttgtgtgcctgatgatcatcatcgtgggcacccgcatccagttcagtgatggaaatgaatttgctgtggacaagagcaagaggggcctcatccacgtgcccaaggacctgcccctgaagaccaaggtgctggacatgagccagaactacatcgccgagctgcaggtgtctgacatgtccttcctgtctgagctgactgtgctgcggctgagccacaaccgcatccagctgctgtag

SEQ ID NO: 161546 - DNA, 2391 bp, Artificial Sequence
  derived and/or modified sequence
atgaccaaggacaaggagcccatcgtgaagagcttccacttcgtgtgtctaatgattatcatagtgggtacaaggatccagttttcagatgggaatgaatttgccgtcgacaagtctaagcgtgggcttatccacgtccccaaggatctgcctctgaagacaaaagtgctggacatgagtcagaactacatagcagagttgcaggtgtctgacatgtcctttctgtctgagctaactgtgctgaggctcagccataacagaattcagctgctcgacttgagcgtgttcaagtttaatcaggacctcgagtacctggacctgtcccacaaccagctgcagaagatcagctgccacccaatagtctccttccgtcacctggatttgagttttaatgattttaaagcgctaccgatctgtaaggaatttggcaacttgagtcagttgaactttctcggactgtccgcaatgaagctccaaaagctggacctcctccccattgcccacttgcatctgagctatatactgctggatctgaggaattattatatcaaagaaaacgagactgagtcccttcagatcctcaacgcgaaaacgcttcatctggtgtttcaccccacaagcctcttcgctattcaggtgaacatcagtgtcaacacacttgggtgtttacagctgaccaacattaagctcaacgacgataattgtcaagtctttattaaatttctgtctgaactcacaagaggttcaactcttttgaatttcaccctgaatcacattgagaccacgtggaagtgcttagttcgcgttttccaattcctttggcctaagccagtggagtatctgaatatatataacttaactatcatagagagcatacgcgaggaggacttcacctattcgaagactactctgaaggctctcaccatcgagcatatcactaatcaggtgtttctcttttctcaaaccgccttgtacacagtgttctcagaaatgaacatcatgatgcttaccatcagcgacactccgttcattcacatgttgtgcccacacgcaccgtccacgttcaaattccttaacttcacacagaatgttttcactgactccattttcgagaagtgttctactctggtgaaactggagacgctgattttacaaaaaaatggtctgaaagatctgttcaaagtcggccttatgacgaaagacatgccatccctggagatcctggatgtcagttggaactcattggagagcggaaggcataaagaaaactgcacatgggtagaatccattgtggtgcttaacctgtcctcaaatatgttgactgattcagtgttccgatgcctacccccccgaatcaaggtgttagatcttcacagtaacaaaatcaaatcggtgcccaaacaagttgtgaaactggaagccctgcaggagctgaacgtcgcattcaattccctgactgacctgcccggttgtggctctttctcgtcccttagtgtactgattattgaccataactcagtgagccaccccagtgcagattttttccagtcatgccagaaaatgcgttctattaaagctggagacaaccccttccagtgcacttgtgaactgcgagagtttgtgaagaacattgatcaggtgtcaagcgaggtcctggaaggctggcccgattcgtacaaatgtgactatcccgaatcataccgagggtccccacttaaggacttccatatgagcgaattgtcctgcaatatcacactgcttatagtgaccatcggcgccactatgctggtgcttgctgtgacagtcacttccctctgtatttacctggacctgccatggtatttaagaatggtgtgccaatggacgcagaccaggcgaagggcccgaaacatccctttagaagagctacagcgcaacctccagtttcacgcatttatttcatatagcgagcacgactcagcgtgggtcaaaagtgaacttgtgccttatctcgagaaggaggacattcagatttgtttacacgagagaaatttcgtaccagggaagtcgattgttgagaatattattaattgcatcgaaaaatcatacaagtccattttcgtcctatcaccaaacttcgttcaatcagaatggtgccattatgagctctattttgcccaccacaacctgtttcacgaagggtcaaacaacctgattctgattttgctcgagcctattccccagaacagcatccctaataagtaccataagttgaaggccctgatgactcaaagaacgtacctgcaatggcccaaagagaaaagcaaacgggggctcttctgggcaaacattagagctgcctttaacatgaaactcacactcgtgacagagaataatgatgtcaaaagctag

SEQ ID NO: 161547 - DNA, 2391 bp, Artificial Sequence
  derived and/or modified sequence
atgaccaaggacaaggagcccatcgtgaagagcttccacttcgtgtgtctgatgattatcatcgtggggactcgaattcagttctctgacgggaatgaattcgctgtggacaagtcaaaacggggactcattcacgtccccaaagacttacccctgaaaacaaaagtcctcgatatgtcccagaattatatcgctgagcttcaggtgtcagacatgtctttcttatctgaactgactgtgctcagactgtcccacaatcgcatacaactgctcgacctgtccgtgtttaagtttaaccaggaccttgagtatttggacttatcacacaatcagctacagaagataagctgtcatccgatcgtgagcttcaggcatctggacctgtcttttaacgactttaaggccctccctatatgcaaagagttcggaaacctgtctcagctgaattttctgggacttagcgctatgaagcttcagaaactggacctgcttcctatcgcgcacctgcatctttcttacatcttactggacctgcgtaattactacatcaaagagaatgaaacagaaagcctgcagatattgaatgccaagaccctgcacctggtgtttcatccgacttcacttttcgctatccaggtcaatataagcgtaaatactctcgggtgtcttcaactgactaacattaagctgaatgacgataattgccaggtttttataaaattcctgagcgaactgactcggggatccactttgttgaactttacccttaaccatatcgagaccacatggaaatgtcttgtccgggttttccaatttttatggccgaagcccgtggagtacctgaacatctataaccttacaattattgagtccatcagagaggaagacttcacgtattccaagaccaccctgaaagctctaacaattgaacatattacaaaccaggtgtttctgttcagccagactgccctgtacacggtattttcagagatgaatatcatgatgttaactatcagcgacactccattcattcacatgctatgtccccacgcccccagtacatttaagtttctcaactttactcagaacgtatttacggacagcatcttcgagaagtgttcaactctggtgaaattggaaacattgattttacaaaagaacgggttgaaagacctgttcaaagttggcttgatgacaaaggacatgcccagcctggagattttagatgtctcctggaactcactggagagcggcaggcacaaggagaactgcacctgggtggagtctattgtggtgctgaatttgtcatcaaacatgctcaccgactcggtgtttcggtgccttcctcccagaataaaagtcctcgatcttcacagcaacaaaatcaaatcggtccccaagcaagtcgtcaagctcgaggctcttcaggagctgaacgtggcctttaattcattgacagatcttcctggttgtgggtctttttcgagcctttccgtgctgattatcgatcacaacagtgtgagccaccctagtgcagactttttccaatcttgccagaagatgcgaagcatcaaggcgggcgataacccatttcagtgtacatgcgaattgcgggagttcgtgaagaatatagatcaggtcagttcagaggttctggaagggtggcctgattcatataaatgcgactaccctgaatcatatagaggcagtcctctcaaagattttcacatgagcgaactgtcgtgcaatattacgttattgatcgtcaccatcggtgctacaatgttggttttggcggtgacagtcacgtccctgtgcatttaccttgacctgccttggtacttgcgaatggtgtgccaatggacacagacccggcgcagagctagaaatattcccctggaggaactgcagaggaacctccagtttcacgcatttattagttattctgaacatgacagcgcctgggtgaagtccgagttggtcccctaccttgaaaaagaggatattcaaatatgcctgcatgaacgcaacttcgttcccggtaaatcaatcgttgagaatattattaactgtattgaaaaatcttacaagtctatctttgtgctatccccaaacttcgtccagtctgagtggtgccactacgagttatactttgcccaccataatttatttcacgaggggtccaataatttaatcctgatcttgctggagcccatcccccagaatagtatcccaaacaaataccacaagttgaaggcattgatgacacaacgtacataccttcaatggccaaaagaaaagtctaaacgagggctgttctgggctaacattcgagctgcctttaacatgaaattgactcttgtcacggagaacaacgatgttaagagctag

SEQ ID NO: 161548 - DNA, 453 bp, Artificial Sequence
  derived and/or modified sequence
atgaccaaggacaaggagcccatcgtgaagagcttccacttcgtgtgtctcatgattattatcgtgggtaccaggatacaattctcagatgggaacgaatttgctgtggacaaaagcaaaaggggcctgatccacgtgcccaaggaccttccactcaagaccaaggttcttgatatgtctcagaactatattgcagagcttcaggtgagcgatatgtctttcctgagtgaactgacggtcttgagactctctcataacaggattcagcttcttgaccttagtgtgttcaagttcaatcaagatctggaatacctggatctgagccataatcagctccagaaaatcagctgtcaccctattgtcagctttcgccacctggacctctccttcaatgacttcaaggctctgcccatctgtaaggagtttgggaacctgtctcagctcaatttctag

SEQ ID NO: 161549 - DNA, 1443 bp, Artificial Sequence
  derived and/or modified sequence
atgaccaaggacaaggagcccatcgtgaagagcttccacttcgtgtgtctcatgatcatcatcgttggcacccgtattcaattttctgacggcaatgaattcgccgtcgacaagtctaaacgcggccttatccatgtgcccaaagatctgcctctcaaaacgaaagtgctggatatgtcccagaactacatcgccgagctgcaggtgagcgatatgtcattcctgtctgagctcacagtgttgcggcttagccataaccgcattcagctgctcgacctctcagtgttcaaattcaatcaagatttagagtatctcgacctcagccataatcagcttcagaagattagctgccaccctatcgtgtcatttcgtcacctggacctgtcctttaatgacttcaaggcactccccatatgcaaggaatttgggaacctgagccagcttaactttctgggtctgtccgccatgaaacttcagaagctggatctgctgcccatcgctcaccttcatctctcttacattctgctagacctgcgcaattattatattaaagagaatgagaccgaaagtctgcagatcctcaatgctaagacactacatctcgtgttccaccccacgagtctctttgctatccaagtgaacatttccgtcaacaccttgggatgccttcagcttaccaacataaaattgaatgacgataattgccaagtgttcatcaaattcctgtccgaactcacgaggggatcaactctcctgaattttactctgaatcacatcgagaccacctggaagtgcttagtaagggtgtttcaattcctgtggcctaagcctgtcgagtatcttaacatctataatcttacgatcattgaatctattagggaggaagattttacttattccaagacaaccctaaaagcgttgacaatagagcacatcaccaaccaggtgtttttgttctcccagacagctctgtacaccgtgttttccgagatgaacatcatgatgctgactatttctgataccccatttatccacatgctgtgcccccacgctccatctacctttaaattcctgaattttacacagaacgtgtttaccgatagcattttcgagaagtgctctaccctggtgaaactggaaaccctcatcttcgtgctttctcctaatttcgtgcagagcgaatggtgtcactacgagctttattttgcccatcataatctctttcacgaaggatccaacaacctcatcctcatcttattggagcccataccacagaatagcatccctaacaagtaccataaactaaaggcactgatgacacaaagaacttacctgcagtggcccaaggagaagtcgaaaaggggactgttctgggcaaacatccgggccgccttcaatatgaagcttactttagtcacggagaacaacgacgtgaaaagctag

SEQ ID NO: 161550 - DNA, 276 bp, Artificial Sequence
  derived and/or modified sequence
atgaccaaggacaaggagcccatcgtgaagagcttccacttcgtgtgcctcatgatcataattgtaggtaccagaattcagttctcagatgggaatgaattcgctgttgataaatccaaacgcggcctgatccatgttcctaaggatttgccactgaaaaccaaagtgctggacatgtcccaaaactatatagccgagctgcaggtctccgacatgtcttttctgtctgaactcactgtactccggttgagccataatcggattcaattgctgtag

SEQ ID NO: 161551 - DNA, 2391 bp, Artificial Sequence
  derived and/or modified sequence
atgactaaggataaggagcctatcgtcaagtccttccatttcgtgtgcttgatgattatcatcgttggtacccggatacagttcagtgacggaaacgagttcgccgtagataagtcaaagagaggactcatacatgtccccaaggacctaccccttaaaaccaaagttttggatatgtctcagaattacatcgccgagctgcaggtctccgacatgagtttcctgtccgagttaaccgtcctgaggctctcccataacagaatacagttgctggatctttctgtgtttaaattcaaccaggatctggagtatctggatctgtcccacaaccagctgcagaagatatcctgccatccaatcgtcagctttcggcacctggacctctcatttaacgattttaaagccttaccaatctgcaaagagtttggcaatctgtcccagctgaactttctgggtttgtccgccatgaagctgcaaaagcttgacttactccctattgcccatctgcacctttcatatatactactggacctcaggaattattacatcaaggaaaatgagaccgaatccctccaaatcctgaatgccaaaacactgcacctcgtcttccatccaaccagccttttcgcaatccaggttaacatatcggtgaacacgctgggctgtttacaactgacaaacattaagttgaatgacgacaactgccaggtgtttattaaattcctttccgaacttacgcggggatcaaccttgctgaacttcaccttgaaccatatcgaaaccacttggaagtgtctcgtccgtgtgttccagtttctgtggccaaaacccgtggagtacctgaatatttataatttgaccatcatcgagtccatcagggaggaggatttcacgtactcgaaaacaacattgaaggccctgactatcgaacacattacaaatcaggtgtttctgttctcccagactgctctgtataccgtttttagcgaaatgaacattatgatgctgactatctcagataccccgtttatccatatgctttgcccacacgccccatccacctttaaattcctgaacttcacgcaaaacgttttcactgattcgatcttcgaaaagtgttccaccctggtgaaactggagacattgattctgcagaaaaacggactcaaagacctgtttaaggtgggactgatgaccaaggatatgccatccctcgagatcctggatgtcagttggaactctctagagagcggaagacacaaggaaaattgcacatgggtcgagtctatcgtggtcctgaacctgagcagcaacatgctcaccgactccgtattcaggtgtttaccaccaagaattaaggtcctagatctccattctaacaaaattaaaagcgtgcccaaacaggtcgttaagctagaggctcttcaggaattgaatgtggcgtttaattcactcacggatctgcctggctgtggaagcttctcttctctttccgtgctgattatagaccataactccgtgtcacatccaagtgcagactttttccagagctgccaaaaaatgaggagcatcaaggcaggcgataatccttttcagtgcacctgcgaactgcgggagttcgtcaagaatatcgaccaggtgtcatccgaagtgctcgagggctggcccgatagctataagtgcgattaccctgagagttaccgcggaagcccgctaaaggactttcatatgagcgagcttagctgcaatataacactgctcatcgtgacaattggcgctaccatgctagttttggccgtcaccgtgacaagtctgtgcatctacttggatttgccatggtacctgaggatggtatgccagtggactcagacacgcaggcgagcgcgtaatattcccctggaagaactccagcggaacctgcagttccatgcctttatctcttactccgagcacgatagtgcatgggtgaagtctgaactggtgccttacttggagaaggaagacattcagatctgtttgcatgagagaaatttcgtccccggaaaatcaattgttgaaaacatcattaactgcatcgagaaatcatacaaatccatttttgtgttatctccaaacttcgtgcagagtgagtggtgtcattacgaactgtactttgcccatcacaacctgtttcatgagggctctaataacttgattctgattctgctcgagcctatcccccagaactccattcctaacaagtaccacaaactcaaggcacttatgacccagagaacctatctgcagtggcccaaagaaaaaagcaaacggggtctgttctgggccaatatccgcgctgccttcaatatgaaactgaccctcgttacggagaataatgatgttaagagctag

SEQ ID NO: 161552 - DNA, 2391 bp, Artificial Sequence
  derived and/or modified sequence
atgaccaaggataaggagcctatcgtgaagagctttcatttcgtctgcctgatgatcatcatcgttgggacaagaattcagttttctgatgggaacgagttcgcagtagacaaatccaagcgcggattgatccacgtgccaaaggatctgcccctgaaaacaaaagtgctggacatgagtcaaaattacattgccgagcttcaagtgtccgatatgtcattcctctctgagctgacggttctgcgattgtcgcataatcgcattcaactgctcgatctgagcgtgttcaagttcaaccaggatttggagtatcttgacttgtcacataaccaattgcagaaaatctcctgtcatcctattgtgagctttcggcatttagacctgtctttcaacgacttcaaggcgttacccatttgcaaggagtttggcaatctgtcgcagttaaactttctgggactatcagcaatgaaactgcagaagctggacctgcttcctatcgcccatctgcatctctcatacattctactcgatctaaggaattattacatcaaggaaaacgaaacagagtccttacaaatcttgaacgccaaaacactacacctagtattccaccccaccagcctattcgccattcaggtcaacatcagcgtgaatacactggggtgcctgcagctgactaacatcaaactgaatgatgataattgccaggtgttcataaagtttctgtctgaactgacacggggtagcaccctactcaacttcacattgaaccatatagagacaacttggaagtgtttagtcagagtgtttcagtttctgtggccgaagcctgtggagtacctcaacatctacaatctcacgattatagagagtatcagggaggaggactttacctatagtaaaaccacattgaaggccctaaccattgagcatataaccaaccaagtgttcctcttctcacagacagcattgtacaccgtcttttcggaaatgaacattatgatgctgaccatctctgacactccctttatccatatgctgtgtccccatgccccatccacttttaagtttctgaatttcacgcaaaatgtcttcaccgactcaattttcgaaaagtgctctactctggttaagttggaaacactcattctgcagaagaatggactcaaagacctgttcaaggtgggcctgatgaccaaggacatgcccagcctggaaatacttgatgttagctggaacagcctggagtccggtcgacacaaggaaaattgtacttgggtggagagcatcgtggtcttgaatctgtctagcaatatgctgaccgattccgtgttccggtgtttaccccctaggattaaggttctggatcttcatagtaataaaatcaagtcagtgccgaaacaggttgtgaagttagaggcacttcaggagttgaatgtagcctttaactcactgactgacctgcctggatgtggatcattctcctccctcagtgtcctgattattgaccataattctgtttcacatccaagtgcagattttttccagtcttgccagaagatgaggtctattaaggctggagacaatccattccagtgtacttgcgaactgcgtgagtttgtgaaaaatattgatcaagtgtcatctgaagtccttgaaggctggccagatagctacaagtgcgactatcccgagtcttaccgcggatctccattaaaagacttccacatgtctgaactgtcctgcaatattacacttctgatagttacgatcggcgcaactatgctggtgttggctgtgacggtgacaagcctctgtatctatcttgatctgccctggtatctgcggatggtatgccagtggacacagacccggagaagggcacgaaatattcctttggaggagttacaacgaaaccttcagtttcacgcatttatctcatactctgagcacgacagcgcttgggtgaagtcagagttggttccttatctggaaaaggaagatattcagatttgtctgcatgagagaaattttgttccaggtaagtcgatcgttgagaatatcatcaattgcattgagaaatcctacaaatcaattttcgtcctgtccccgaattttgtgcagtccgaatggtgtcactatgaattgtacttcgcccaccataacctatttcacgaaggatcaaacaacctgattctgatcttgctggagccaatccctcagaattccattcccaataaataccacaaactgaaagcactgatgactcagagaacttatctgcagtggccgaaagagaagtctaagcgaggcctgttttgggcaaatatccgagccgcttttaatatgaagctgactctggtcaccgaaaataacgacgtgaagtcctag

SEQ ID NO: 161553 - DNA, 453 bp, Artificial Sequence
  derived and/or modified sequence
atgactaaagacaaggagccgatcgtaaagtctttccattttgtttgtctcatgattattattgtaggaacaagaattcaattttcagacggcaatgaattcgccgtcgacaaaagcaagcggggattgatccacgtgcctaaggaccttccactcaagaccaaggtgttggacatgtcccagaactacatcgctgaacttcaggtttccgatatgagtttcctgtccgagctcacggtgttacggctgtcacataaccggattcagttgctggacctgtctgtattcaaattcaaccaggatctcgagtatctggatctctctcacaaccagctgcagaagatatcttgccacccaatcgtcagtttccgccatctggatctgagcttcaacgacttcaaggctcttcccatttgtaaagagttcggtaatctgagccagcttaacttctag

SEQ ID NO: 161554 - DNA, 1443 bp, Artificial Sequence
  derived and/or modified sequence
atgaccaaagataaggaaccaatcgtgaagtcattccattttgtgtgtttgatgataatcattgtggggacccgcatacagttttcggacggaaacgagttcgctgtggataagagcaagaggggcctgatccatgtgccaaaagacttgccattgaaaaccaaagttttagacatgtcccagaattatattgccgaattgcaggtgagcgacatgtcattcctctctgagctgaccgtactgagactctcacacaataggatccaactattggatctaagtgtgttcaagttcaatcaggacttagaatacctagatctgagtcacaaccagctacaaaagattagttgccacccgatagtcagttttcgacatttagacctttcattcaatgatttcaaagccctgccgatctgtaaggagttcggaaatttgagtcagctgaattttctgggactctctgcaatgaagctacagaaactggaccttcttccaatcgcacatctacacctcagctacatattgttggatctacgcaactattatatcaaggaaaacgaaacagaaagtttgcagattctgaacgcaaaaactttgcacttagttttccacccaacctcattattcgccattcaagtcaatattagcgtcaatactctcgggtgtttgcagctcacaaacatcaagctgaatgacgacaactgccaggtcttcataaaattcctgagtgaactcactagaggcagcacgctgcttaattttaccttaaaccatatcgagactacgtggaagtgcctggttagagtattccaattcctgtggccaaaaccggtggagtatctcaacatctacaacctaacgattatcgagtccatccgagaggaagactttacatatagcaagaccaccctcaaagctctgacaattgagcacatcaccaaccaggtcttcttgttcagccagacggctctgtataccgtcttctcagaaatgaatatcatgatgctcacaataagcgatacaccctttatacacatgctgtgtccccacgctccaagcaccttcaaatttctgaactttacccaaaatgtgtttacagatagcattttcgaaaagtgtagtactcttgtcaagctggagacattaatatttgtcctgagccccaattttgtgcaatccgagtggtgtcattacgagttgtattttgcacatcataatctgtttcacgaagggtcgaacaatcttatcctcattctcttagaacctatccctcagaactctatacccaacaagtatcacaaactgaaagccctgatgacccagaggacttacctgcaatggccaaaggaaaaaagtaaaagaggcctgttctgggccaacatacgggctgctttcaatatgaaacttactctggtaaccgaaaacaatgacgttaaatcatag

SEQ ID NO: 161555 - DNA, 276 bp, Artificial Sequence
  derived and/or modified sequence
atgactaaagataaggagccaatagtcaagtctttccacttcgtgtgcctcatgattattatcgtcggaacaagaatacagtttagcgatggtaatgagttcgcagtggacaagagcaaacgcggtctgatacatgttcccaaagacttgcccctcaaaacaaaagtcctggatatgtcgcagaactatattgccgagttacaggtgtccgatatgtcattcctctccgagctcaccgtgttgcgactgtcccataatcgtatacaactcctttag

SEQ ID NO: 161556 - DNA, 2938 bp, Artificial Sequence
  derived and/or modified sequence
agaatttggactcatatcaagatgctctgaagaagaacaaccctttaggatagccactgcaacatcatgaccaaagacaaagaacctattgttaaaagcttccattttgtttgccttatgatcataatagttggaaccagaatccagttctccgacggaaatgaatttgcagtagacaagtcaaaaagaggtcttattcatgttccaaaagacctaccgctgaaaaccaaagtcttagatatgtctcagaactacatcgctgagcttcaggtctctgacatgagctttctatcagagttgacagttttgagactttcccataacagaatccagctacttgatttaagtgttttcaagttcaaccaggatttagaatatttggatttatctcataatcagttgcaaaagatatcctgccatcctattgtgagtttcaggcatttagatctctcattcaatgatttcaaggccctgcccatctgtaaggaatttggcaacttatcacaactgaatttcttgggattgagtgctatgaagctgcaaaaattagatttgctgccaattgctcacttgcatctaagttatatccttctggatttaagaaattattatataaaagaaaatgagacagaaagtctacaaattctgaatgcaaaaacccttcaccttgtttttcacccaactagtttattcgctatccaagtgaacatatcagttaatactttagggtgcttacaactgactaatattaaattgaatgatgacaactgtcaagttttcattaaatttttatcagaactcaccagaggttcaaccttactgaattttaccctcaaccacatagaaacgacttggaaatgcctggtcagagtctttcaatttctttggcccaaacctgtggaatatctcaatatttacaatttaacaataattgaaagcattcgtgaagaagattttacttattctaaaacgacattgaaagcattgacaatagaacatatcacgaaccaagtttttctgttttcacagacagctttgtacaccgtgttttctgagatgaacattatgatgttaaccatttcagatacaccttttatacacatgctgtgtcctcatgcaccaagcacattcaagtttttgaactttacccagaacgttttcacagatagtatttttgaaaaatgttccacgttagttaaattggagacacttatcttacaaaagaatggattaaaagaccttttcaaagtaggtctcatgacgaaggatatgccttctttggaaatactggatgttagctggaattctttggaatctggtagacataaagaaaactgcacttgggttgagagtatagtggtgttaaatttgtcttcaaatatgcttactgactctgttttcagatgtttacctcccaggatcaaggtacttgatcttcacagcaataaaataaagagcgttcctaaacaagtcgtaaaactggaagctttgcaagaactcaatgttgctttcaattctttaactgaccttcctggatgtggcagctttagcagcctttctgtattgatcattgatcacaattcagtttcccacccatcggctgatttcttccagagctgccagaagatgaggtcaataaaagcaggggacaatccattccaatgtacctgtgagctaagagaatttgtcaaaaatatagaccaagtatcaagtgaagtgttagagggctggcctgattcttataagtgtgactacccagaaagttatagaggaagcccactaaaggactttcacatgtctgaattatcctgcaacataactctgctgatcgtcaccatcggtgccaccatgctggtgttggctgtgactgtgacctccctctgcatctacttggatctgccctggtatctcaggatggtgtgccagtggacccagactcggcgcagggccaggaacatacccttagaagaactccaaagaaacctccagtttcatgcttttatttcatatagtgaacatgattctgcctgggtgaaaagtgaattggtaccttacctagaaaaagaagatatacagatttgtcttcatgagagaaactttgtccctggcaagagcattgtggaaaatatcatcaactgcattgagaagagttacaagtccatctttgttttgtctcccaactttgtccagagtgagtggtgccattacgaactctattttgcccatcacaatctctttcatgaaggatctaataacttaatcctcatcttactggaacccattccacagaacagcattcccaacaagtaccacaagctgaaggctctcatgacgcagcggacttatttgcagtggcccaaggagaaaagcaaacgtgggctcttttgggctaacattagagccgcttttaatatgaaattaacactagtcactgaaaacaatgatgtgaaatcttaaaaaaatttaggaaattcaacttaagaaaccattatttacttggatgatggtgaatagtacagtcgtaagtaactgtctggaggtgcctccattatcctcatgccttcaggaaagacttaacaaaaacaatgtttcatctggggaactgagctaggcggtgaggttagcctgccagttagagacagcccagtctcttctggtttaatcattatgtttcaaattgaaacagtctcttttgagtaaatgctcagtttttcagctcctctccactctgctttcccaaatggattctgttgtgagcaagagtttatatggcttcatggcagcaagggaacagtcaacttcagcatcatatgcaccagtcctcggagtgccctgtgaatcatattggtctttgggtcagtgtcatcattctcttcaagtctggggcttggggaaaaaattagatcagctacggcatataaaaaagtcttttgtttca

SEQ ID NO: 161557 - DNA, 5879 bp, Artificial Sequence
  derived and/or modified sequence
attgtatttccgttcatttacaagttattttctcttcttctgaaaaagagatcttgaatttggactcatatcaagatgctctgaagaagaacaaccctttaggatagccactgcaacatcatgaccaaagacaaagaacctattgttaaaagcttccattttgtttgccttatgatcataatagttggaaccagaatccagttctccgacggaaatgaatttgcagtagacaagtcaaaaagaggtcttattcatgttccaaaagacctaccgctgaaaaccaaagtcttagatatgtctcagaactacatcgctgagcttcaggtctctgacatgagctttctatcagagttgacagttttgagactttcccataacagaatccagctacttgatttaagtgttttcaagttcaaccaggatttagaatatttggatttatctcataatcagttgcaaaagatatcctgccatcctattgtgagtttcaggcatttagatctctcattcaatgatttcaaggccctgcccatctgtaaggaatttggcaacttatcacaactgaatttcttgggattgagtgctatgaagctgcaaaaattagatttgctgccaattgctcacttgcatctaagttatatccttctggatttaagaaattattatataaaagaaaatgagacagaaagtctacaaattctgaatgcaaaaacccttcaccttgtttttcacccaactagtttattcgctatccaagtgaacatatcagttaatactttagggtgcttacaactgactaatattaaattgaatgatgacaactgtcaagttttcattaaatttttatcagaactcaccagaggttcaaccttactgaattttaccctcaaccacatagaaacgacttggaaatgcctggtcagagtctttcaatttctttggcccaaacctgtggaatatctcaatatttacaatttaacaataattgaaagcattcgtgaagaagattttacttattctaaaacgacattgaaagcattgacaatagaacatatcacgaaccaagtttttctgttttcacagacagctttgtacaccgtgttttctgagatgaacattatgatgttaaccatttcagatacaccttttatacacatgctgtgtcctcatgcaccaagcacattcaagtttttgaactttacccagaacgttttcacagatagtatttttgaaaaatgttccacgttagttaaattggagacacttatcttacaaaagaatggattaaaagaccttttcaaagtaggtctcatgacgaaggatatgccttctttggaaatactggatgttagctggaattctttggaatctggtagacataaagaaaactgcacttgggttgagagtatagtggtgttaaatttgtcttcaaatatgcttactgactctgttttcagatgtttacctcccaggatcaaggtacttgatcttcacagcaataaaataaagagcgttcctaaacaagtcgtaaaactggaagctttgcaagaactcaatgttgctttcaattctttaactgaccttcctggatgtggcagctttagcagcctttctgtattgatcattgatcacaattcagtttcccacccatcggctgatttcttccagagctgccagaagatgaggtcaataaaagcaggggacaatccattccaatgtacctgtgagctaagagaatttgtcaaaaatatagaccaagtatcaagtgaagtgttagagggctggcctgattcttataagtgtgactacccagaaagttatagaggaagcccactaaaggactttcacatgtctgaattatcctgcaacataactctgctgatcgtcaccatcggtgccaccatgctggtgttggctgtgactgtgacctccctctgcatctacttggatctgccctggtatctcaggatggtgtgccagtggacccagactcggcgcagggccaggaacatacccttagaagaactccaaagaaacctccagtttcatgcttttatttcatatagtgaacatgattctgcctgggtgaaaagtgaattggtaccttacctagaaaaagaagatatacagatttgtcttcatgagagaaactttgtccctggcaagagcattgtggaaaatatcatcaactgcattgagaagagttacaagtccatctttgttttgtctcccaactttgtccagagtgagtggtgccattacgaactctattttgcccatcacaatctctttcatgaaggatctaataacttaatcctcatcttactggaacccattccacagaacagcattcccaacaagtaccacaagctgaaggctctcatgacgcagcggacttatttgcagtggcccaaggagaaaagcaaacgtgggctcttttgggctaacattagagccgcttttaatatgaaattaacactagtcactgaaaacaatgatgtgaaatcttaaaaaaatttaggaaattcaacttaagaaaccattatttacttggatgatggtgaatagtacagtcgtaagtaactgtctggaggtgcctccattatcctcatgccttcaggaaagacttaacaaaaacaatgtttcatctggggaactgagctaggcggtgaggttagcctgccagttagagacagcccagtctcttctggtttaatcattatgtttcaaattgaaacagtctcttttgagtaaatgctcagtttttcagctcctctccactctgctttcccaaatggattctgttgtgagcaagagtttatatggcttcatggcagcaagggaacagtcaacttcagcatcatatgcaccagtcctcggagtgccctgtgaatcatattggtctttgggtcagtgtcatcattctcttcaagtctggggcttggggaaaaaattagatcagctacggcatataaaaaagtcttttgtttcacatatgtgtaatagcttatttaattttttatcctgctacacaaatatgtaattaaccaatgaggactcatgacttgatagtgtatgtatgtaaagggatatatggacttaatcataagctgttgaggtgaaagacgtggatccacctgctttccaagaaaactcggccaaatttatttgcagctggatattgaatgggacttttctggttgtcttagaattctggctaaaggctcaaagctgacgaaagacagtaactgcaccaacatgatactagacacagccagtctggacttatcaaaagagcagaaagagaccaatgactcccagtccgtattatccatctctagaagactagagtcaaaagcgtgattaaagagtcattaagcggaggttctaggccatagggagattgctttgaatttcttgcagacaagtgtgagggactcagcatggtagaaggtagcctggcatcccactccaagactgaaagcttgcagagtaacaggagcacacaggttcagtgcagcagatgtggtgtggcttgagaattcttggaagagcttgatgagtgtttgctggagtccgagggtgggcactgggaacacagagactggtaaatagtgtttggcaaatacaagtgcttgatgaatatttgttgaatgaatagatgagttcttcccccctggggaattcaggaggtgaaaggttggcttgagcacccaaaatggcaggatgagagaagagaagcactgatagcaacctgccctcccattattgacatggtaaaaggatgtgaatttcttcacatggctttgactatggaagagtagctgggcttgcattgtcatgacgggatatcagccaacagggtagcctgttgtgcaaagaaactatagcagtaagaggacacggggttaggcagaagaggggtttggggtggaggttgctgcaagaggtcagccagataatgtggccctgcatcatggaactgtgcaatgtggggtacactcaaggccctccaataactcacagatgtgccctatgaaaaagccagcatttggactctgccatagcagctggcaggatcatgctggcctgtctgccttattcaatagttaactacaggaagatctgctcctctttgtgtaataccctcttcccttgcaatggcatagggacatctagaatatagagaagacagagacaatggaggaagagtaaagaaactgactatatgccttcgtcatttcactgcaaggaaggccaagcagatttttgaatgaggtgtgagattgctgttaaattggactggcctggacattttaatcccttaaatagaggtgcaatgactaaagtgagatttgtcactaaaatttatggtatctgcccaagattcaggagtgatgatgggaggagatccaacagaactttgttgtaaggcaatggttagagaaaaatgaagccctcgctttctggacttagttcattcaataaaccagtttcggccaggcacgttggctcacatctataatcccagtactgtgggaggctgaggcaggtggatcacttgaggtcaggagttcgagaccagcctggccaacatggtgaaaccctgtctgtactaaaaatacaaaaattagccgggtgtggtggtgtgcacctgtagtcccagctactcgggaggctgaggcaggaaaatcacttgaacctgggagacagaggctgtagtgagctgagacagcgctactgtactccccgctgggcaacagagtgagactccatctcaaaaaagttaaaagaaaaaaaatctggtttcataatagctgtaacgaaataagccttaatgatattttattagcatcatcttctgtctgcattagcccttccttgctcttcaggagaacaacatttgttttcctccctaggctctatcccaaacggcacattcttccacaacccctgttgaacagattttttaaactgttgcctaatctaaaaacaataaaaacaacaaacaaccacagtaacaacaacgacaaaaaaaactgccacagattctaaataatcagatctttttaaatggtatcaatgtttcccacaaaatattgttgacattgaaaatatagaattttagcattaattttgttaaacctacatcccctcggcagaggggcctccctgcatcccagtggaaagtaggttcctcacagtcctctccgtcacattcttcccatttcttttcttcacagaacacatcactgtctaaaattatcttgtttgcttagttgcttactcatcttcttcttctctcctctgaagtctaagctccaggaaaaagggagacttctccacctgttccctgcctctccccagtgccgaggggacactgtgcaccccattgtagatgcgcagtaaaaactcgtgggatgagcaaatgactctgaaacggtcccatgcgggaaatgtccatgaagtcctggattttatctaaaaagcccaggcaggggggggcgggggcggcggggctacagttccacgctgagctgcctcctggccgctcgtccccgccgcagtgcctgggcggcccgggcgcccgaccttggccgtggacaccttcgcggtgggtgctgctcctccccatctgccactggaagatgctggggcgacccggctccaggtttagcaggacactgagaaaagggaatggctgcctttcggaggctgggtgagcccttctctgtgcctcacctgcccgccccacagcggccctgcacctcgtcccacggggcccattgccccggtaggatgcgcgcttttgttttgagggtcaggcatcttccctgccgtcgtttctgggaggttgaaaaattgatccagaaagacct

SEQ ID NO: 161558 - DNA, 572 bp, Artificial Sequence
  derived and/or modified sequence
aattgtatttccgttcatttacaagttattttctcttcttctgaaaaagagatcttgaatttggactcatatcaagatgctctgaagaagaacaaccctttaggatagccactgcaacatcatgaccaaagacaaagaacctattgttaaaagcttccattttgtttgccttatgatcataatagttggaaccagaatccagttctccgacggaaatgaatttgcagtagacaagtcaaaaagaggtcttattcatgttccaaaagacctaccgctgaaaaccaaagtcttagatatgtctcagaactacatcgctgagcttcaggtctctgacatgagctttctatcagagttgacagttttgagactttcccataacagaatccagctacttgatttaagtgttttcaagttcaaccaggatttagaatatttggatttatctcataatcagttgcaaaagatatcctgccatcctattgtgagtttcaggcatttagatctctcattcaatgatttcaaggccctgcccatctgtaaggaatttggcaacttatcacaactgaatttct

SEQ ID NO: 161559 - DNA, 1628 bp, Artificial Sequence
  derived and/or modified sequence
ccctttaggatagccactgcaacatcatgaccaaagacaaagaacctattgttaaaagcttccattttgtttgccttatgatcataatagttggaaccagaatccagttctccgacggaaatgaatttgcagtagacaagtcaaaaagaggtcttattcatgttccaaaagacctaccgctgaaaaccaaagtcttagatatgtctcagaactacatcgctgagcttcaggtctctgacatgagctttctatcagagttgacagttttgagactttcccataacagaatccagctacttgatttaagtgttttcaagttcaaccaggatttagaatatttggatttatctcataatcagttgcaaaagatatcctgccatcctattgtgagtttcaggcatttagatctctcattcaatgatttcaaggccctgcccatctgtaaggaatttggcaacttatcacaactgaatttcttgggattgagtgctatgaagctgcaaaaattagatttgctgccaattgctcacttgcatctaagttatatccttctggatttaagaaattattatataaaagaaaatgagacagaaagtctacaaattctgaatgcaaaaacccttcaccttgtttttcacccaactagtttattcgctatccaagtgaacatatcagttaatactttagggtgcttacaactgactaatattaaattgaatgatgacaactgtcaagttttcattaaatttttatcagaactcaccagaggttcaaccttactgaattttaccctcaaccacatagaaacgacttggaaatgcctggtcagagtctttcaatttctttggcccaaacctgtggaatatctcaatatttacaatttaacaataattgaaagcattcgtgaagaagattttacttattctaaaacgacattgaaagcattgacaatagaacatatcacgaaccaagtttttctgttttcacagacagctttgtacaccgtgttttctgagatgaacattatgatgttaaccatttcagatacaccttttatacacatgctgtgtcctcatgcaccaagcacattcaagtttttgaactttacccagaacgttttcacagatagtatttttgaaaaatgttccacgttagttaaattggagacacttatctttgttttgtctcccaactttgtccagagtgagtggtgccattacgaactctattttgcccatcacaatctctttcatgaaggatctaataacttaatcctcatcttactggaacccattccacagaacagcattcccaacaagtaccacaagctgaaggctctcatgacgcagcggacttatttgcagtggcccaaggagaaaagcaaacgtgggctcttttgggctaacattagagccgcttttaatatgaaattaacactagtcactgaaaacaatgatgtgaaatcttaaaaaaatttaggaaattcaacttaagaaaccattatttacttggatgatggtgaatagtacagtcgtaagtaactgtctggaggtgcctccattatcctcatgccttcaggaaagacttaacaaaaacaatgtttcatctggggaactgagctaggcggt

SEQ ID NO: 161560 - DNA, 548 bp, Artificial Sequence
  derived and/or modified sequence
aattgtatttccgttcatttacaagttattttctcttcttctgaaaaagagatcttgtggccaagtggatttttcaaatgtatgtgtgtctctgtgggtgttctgatgggcagttgggagaagttatatggatcagtgaagagcttttaaccatacgccattcagtaataaaagttccccaactcagagttttcactcttccaaagaaagaatttggactcatatcaagatgctctgaagaagaacaaccctttaggatagccactgcaacatcatgaccaaagacaaagaacctattgttaaaagcttccattttgtttgccttatgatcataatagttggaaccagaatccagttctccgacggaaatgaatttgcagtagacaagtcaaaaagaggtcttattcatgttccaaaagacctaccgctgaaaaccaaagtcttagatatgtctcagaactacatcgctgagcttcaggtctctgacatgagctttctatcagagttgacagttttgagactttcccataacagaatccagctacttg

SEQ ID NO: 161561 - protein, 2253 aa, Artificial Sequence
  derived and/or modified sequence
MRPGPALLLLGVGLSLSVGRLPLPPVPRGAQAAVSGAPGGLLRGAPGLGVRGGRALLSLRPSAVRAGGAVLSGRGSLCFPHGGTGRRWYCLDLRVLLSAQRLPWPAAPALALVDLQLSARGGRLSLTWSVRLPRSPGRLAWAFRLRLLGPGAARPASPAARVSPRSAAPGPRPQQGFVARTECPTDGPARVMLQAVNSSSHRAVESSVSCQINACVIQRVRINTDQKGAPVRLSMQAEATINASVQLDCPAARAIAQYWQVFSVPAVGQAPDWTQPLDLPQLEIRNSPLFIHIPNNSLQWGVYVFNFTVSITTGNPKMPEVKDSDAVYVWIVRSSLQAVMLGDANITANFTEQLILDGSTSSDPDADSPLQGLQFFWYCTTDPRNYGGDRIILGSKEVCHPEQANLKWPWASGPVLTLLPETLKGDHVYFFRMVIRKDSRTAFSDKRVHVLQGPKAIAHITCIENCERNFIVSDRFSLFLNCTNCASRDFYKWSILSSSGGEMLFDWMGETVTGRNGAYLSIKAFAFRHFLEAEFSISLYLACWSGVTSVFRHSFIINHGPQIGECKINPAKGIALITKFVVQCSNFRDKHVPLTYKIIVSDLHSVGEISSVKENTLGTILYLGPQSTVPPSFLPVGMLASQYGLKIYAQVYDSLGAFSQVTLHATAQAPTDKNSSKTVLNQLLSFTVGPSSLLSTLIQKKDFLPAGYLLYIVASVLNNMKTELPLRDDRVNLRKHLIDQSFLLPVSTLVEIGQVVMTITKLTQKPSEFTWDAQKRATMRVWQANQALQEYQQKDKRFRSEQIEIVSTGILMSLSNILKMTSPHQVVKDPFYVIESLSDTILANKVPGNKTTSMRTPNFNMYVKKVEKWGINQLFRNEKHCRNCFYPTLNVSSVPGLSANGPISTMFCDFTNDLFPWLNDQENTSVEVSGFRMTGVADNGSVLEITPDVAEVYLVRKNLTFAAFNLTVGPNSEVDGSLKKTTGGFSFQVDSTVLREVLVHIVTEVMVLFTVLVYTGSQITPTALVATFLVPHDIPPFASQSALFDPACTVKKARVVCLPVSLLQLIAQHSHSPHCTVSIVLQAPRFVMKLNDKLVRISIFSVQCLDMYGIQSEWREGYCILGEKTSWYEVHCICKNVVRARRQLGTIGLTGIHLHTHYVMAKVIVIPNPVDLRLNIIKSLHQNPVTLFTVLFIILLYVGLAFWALYRDEMDQHLRGHVIVLPDNDPYDNLCYLVTIFTGSRWGSGTRANVFVQLRGTVSTSDVHCLSHPHFTTLYRGSINTFLLTTKSDLGDIHSIRVWHNNEGRSPSWYLSRIKVENLFSRHIWLFICQKWLSVDTTLDRTFHVTHPDERLTRKDFFFIDVSSNLRKNHMWFSIFASVVAKTFNRLQRLSCCLAMLLSSLLCNIMFFNLNRQEQTESRERKYMRSMMIGIESVLITIPVQLLITFLFTCSQRKPQADLKEVSPQKHPLMSEASEHWEEYLRKWHAYETAKVHPREVAKPASKGKPRLPKASPKATSKPKHRHRKAQIKTPETLGPNTNSNNNIEDDQDVHSEQHPSQKDLQQLKKKPRIVLPWWCVYVAWFLVFATSSISSFFIVFYGLTYGYDKSIEWLFASFCSFCQSVLLVQPSKIILLSGFRTNKPKYCKNLSWSTKYKYTEIRLDGMRMHPEEMQRIHDQIVRIRGTRMYQPLTEDEIRIFKRKKRIKRRALLFLSYILTHFIFLALLLILIVLLRHTDCFYYNQFIRDRFSMDLATVTKLEDIYRWLNSVLLPLLHNDLNPTFLPESSSKILGLPLMRQVRAKSSEKMCLPAEKFVQNSIRREIHCHPKYGIDPEDTKNYSGFWNEVDKQAIDESTNGFTYKPQGTQWLYYSYGLLHTYGSGGYALYFFPEQQRFNSTLRLKELQESNWLDEKTWAVVLELTTFNPDINLFCSISVIFEVSQLGVVNTSISLHSFSLADFDRKASAEIYLYVAILIFFLAYVVDEGCIIMQERASYVRSVYNLLNFALKCIFTVLIVLFLRKHFLATGIIRFYLSNPEDFIPFHAVSQVDHIMRIILGFLLFLTILKTLRYSRFFYDVRLAQRAIQAALPGICHMAFVVSVYFFVYMAFGYLVFGQHEWNYSNLIHSTQTVFSYCVSAFQNTEFSNNRILGVLFLSSFMLVMICVLINLFQAVILSAYEEMKQPVYEEPSDEVEAMTYLCRKLRTMFSFLTSQSKAKDEPEFFIDMLYGQPEKNSHRYLGLKTRNINGKKMVYLVV

SEQ ID NO: 161562 - DNA, 6762 bp, Artificial Sequence
  derived and/or modified sequence
atgaggcctgggcccgctctcctcttgctgggtgtggggttgtcactaagtgtaggcaggctgcctcttccaccggtgccacggggagcccaggcggccgtctcgggagccccaggggggctgcttaggggagccccagggttgggagtcaggggcggccgggccttgttgagcctccgaccttcagcggtgagagccggcggcgccgtcctctcaggcaggggtagtctctgttttccgcacgggggcaccggaaggcggtggtattgtctagacctccgcgtgctgttgtcagctcaacgccttccatggccggctgccccagccctggccctcgtagaccttcagctttcagctcgaggtggaaggctatccctaacatggtctgtgcggttgcctaggagtcccgggcggctcgcgtgggctttcaggctcaggctgctcgggcccggagctgcccgtcctgcttcacctgcggcacgggtgtccccaagaagtgcagcccctggcccccggcctcaacagggattcgtcgccaggaccgaatgtcccacagatggcccagcaagggtgatgctgcaggccgtgaatagtagtagccacagggcggtcgagagttcagtctcatgtcaaattaacgcctgtgtgatccagcgagttcggatcaatacggaccagaaaggcgctccagttcggctgtcgatgcaggccgaggccaccataaacgcgtccgttcagctggattgtcctgccgcaagggccatcgcccagtattggcaagtatttagtgtcccagctgtcggccaggcacccgactggacacaacccttggatcttcctcaactggagatcagaaactcaccgctctttatccacattccaaacaacagcctgcagtggggtgtgtatgtgttcaattttacagtgtcaatcaccaccggaaacccaaagatgccagaggtgaaagatagcgatgctgtctatgtgtggatcgttagatcttcactgcaagctgtaatgctgggcgatgcaaacataaccgctaacttcacagagcaactcatcctcgacggatcaacttcttccgatcctgacgcagattcccccctccagggtctgcagtttttctggtactgcaccacagaccccagaaactacggtggggacaggatcattctcggttctaaagaggtttgtcacccggagcaggctaacctgaaatggccctgggcctcagggccagtgttgactctgctccctgagactttaaaaggtgatcacgtctacttcttccgaatggtcatcagaaaggactcccgtactgcttttagcgacaagagggtgcatgtgctccaaggccccaaggccatcgcccacatcacatgcatcgaaaactgcgaaaggaacttcatcgtgtccgaccgattctctcttttcttgaattgtaccaactgtgcctcacgagatttctataagtggtccattctcagctcttccggtggggaaatgttatttgattggatgggcgaaactgtgacaggtcgcaacggcgcttatctatctatcaaagctttcgccttccgccattttctagaggcagagttcagcatctctctgtatctggcctgttggtccggcgtgacaagcgtttttcgtcattcctttattattaatcatggccctcagatcggggagtgcaagattaacccggccaagggtattgcactgattacgaagtttgtagttcagtgttctaacttccgggataagcacgttccgctcacttacaagatcattgtgtccgaccttcacagtgtgggtgaaatctctagcgtgaaagagaatactctgggcactattttatacttgggcccccagagcaccgtccccccgtccttcctcccagtggggatgcttgcgtcacagtacgggcttaaaatctatgcccaggtgtacgactcactcggggcttttagccaggtgacgctgcatgcgactgcacaggccccaactgataagaattcgtctaagaccgttctaaaccagctgttgtcgtttaccgttggcccctccagcttactctcgacacttattcaaaagaaggattttctaccggctggatacctgctgtacattgttgcaagcgtcctcaacaacatgaagacagagctacctcttcgtgatgatcgcgtgaacctgcgaaaacacttgattgatcagtccttcctgctaccagtgtccaccctggtcgaaattggccaagttgtgatgactataactaaactcactcagaagcccagcgagttcacatgggacgcacagaagcgggccaccatgcgcgtctggcaggcaaatcaagccctgcaggagtatcagcaaaaagacaaaaggttcagaagcgagcagatagaaatcgtcagcacaggcatactcatgtccctgtccaatatactgaagatgacttccccacatcaggtggtgaaggaccctttttacgtcatagaaagtctgtcggacactattctggctaataaagtgcccggaaacaagacgacctcaatgcgaactcccaattttaatatgtacgtgaaaaaagtggagaagtgggggattaaccagctgtttcgcaacgaaaaacattgccgtaactgcttctaccccacacttaacgtgtcaagcgtgccaggactatctgcaaatggtcccataagcaccatgttttgcgacttcacaaatgatctctttccttggttgaacgatcaggaaaacacatccgttgaagtgtcagggtttaggatgactggagtggcagacaacggtagtgtgctggagatcactcctgacgtggccgaggtctacctcgttcgaaaaaatcttacattcgctgcattcaatctgactgtgggaccaaacagcgaagtggatggcagtctgaaaaaaaccacgggaggctttagcttccaggtggacagtactgttctgcgcgaggttctggtacacattgtaacggaagtgatggtcttgttcaccgtgttagtatatactggcagccagattacacctacagcccttgtcgcaaccttcctggtgccacatgatattcctccttttgccagccagtctgcactgttcgaccctgcctgcactgtcaagaaggcccgggttgtctgtctccctgtgtcccttctgcaattgatagcacagcacagtcactccccccactgcacagtcagcattgtgttgcaggcccccaggttcgtgatgaagctgaatgataagctggttagaatctcaattttctcagtccagtgcttggacatgtacggcatccagagcgagtggcgagaggggtactgtattctaggcgagaagacatcatggtatgaagtccactgtatctgcaagaacgtggtgagagcacgccgacagctcggaactataggcctaacaggtattcatcttcacactcattacgtcatggcaaaagtgatcgttatccctaacccagtggacctacgactgaatatcatcaaatcattgcatcagaaccccgtgactctttttacggtgctgttcattattttgctctatgttggactggcattttgggccctttaccgagacgagatggaccagcacctgcgaggccacgtcatcgtgctaccggataatgacccttacgacaacttgtgctatctcgtgacaatcttcactggctcacggtggggctccggcactcgcgccaatgtgtttgtccaactacgtggcactgtttcaaccagtgacgtccactgcctgagccatccccattttacaacactgtaccgtggatccatcaacactttcctgcttaccacaaaatcagatctaggcgacatacacagcatcagagtttggcataacaatgaaggtcgttcaccatcctggtatctgtctagaataaaggtggagaacctgttctctcgccatatctggctgttcatctgtcagaaatggttatccgtggatactaccctggatcgaacctttcatgtgacccaccccgacgagcgtctcacacggaaagatttcttctttatagatgtttcctctaacctgaggaaaaatcatatgtggttctcaattttcgcctccgtggtggcgaagacctttaatagactacagagactgagctgctgcttggccatgttattgagttccttgctgtgcaacattatgttttttaacctcaacaggcaggagcagaccgaatcccgggagcggaagtacatgaggagtatgatgataggaatagaatccgttctgatcaccatccccgttcaacttctcatcactttcctgttcacgtgttcccagaggaagccacaggctgatttaaaagaggtcagccctcaaaagcatcccctgatgtcagaagcatctgagcactgggaagaatatctgcgcaagtggcatgcttacgagaccgccaaggtgcatccgagagaggtcgccaagccagcatcaaaaggaaagccgcggcttccgaaggcctctcccaaggccacctcgaagccaaagcaccggcacagaaaggcccagattaagactcctgaaaccttaggccccaacaccaatagcaataataacatcgaagacgaccaggacgttcattcggagcagcatccctctcaaaaggacctccagcagctgaagaaaaaacctcggattgtccttccctggtggtgtgtttatgtggcatggtttctggtttttgccaccagttccatttcctccttttttatagtgttctacggattgacttatggatatgataagagtatcgagtggctctttgccagtttttgcagcttttgccagtcagttctgctggtgcagccttcaaagataatactattatccgggtttagaaccaataagcccaagtactgcaagaatctctcctggtcgaccaaatataagtataccgaaatcaggctggacggcatgcgcatgcatcccgaggagatgcagaggatacatgaccagatcgtgcgcatccgcggaaccaggatgtaccagccgctgacagaggacgaaatacgaatcttcaagcgtaaaaagcgaattaagagacgggccttacttttcttatcttacattcttacccatttcatcttcctggccttactcctgattctcatcgtgcttctccggcatactgactgcttttattataaccagttcattagagatcggttttcaatggatctggcaaccgtaaccaaactcgaagacatctaccggtggcttaactccgttttgctgcctcttcttcataacgacctcaatcctacttttttacctgaatcaagctcgaagatactgggccttccactgatgcgccaggtgcgagcgaagagttccgagaagatgtgtttgccagcagaaaaatttgtccagaattcaatccgaagggagatacattgtcaccccaagtatggcatagaccccgaggacaccaaaaattactcagggttctggaatgaagtagataaacaggcgatcgatgagtcaactaacgggtttacttacaagcctcagggcacacagtggctctactacagttacggattactgcatacctacgggagtggtggttatgccctgtacttctttcccgaacagcagagatttaatagcacattgcggctcaaggaactgcaggagtccaattggcttgacgaaaaaacatgggcggtagtgctggagttgaccacatttaaccctgacattaacctcttctgtagcatctcagtgatctttgaagtttcacagcttggggtggtgaacaccagtatatccctccacagcttttctctggcagattttgacaggaaggcaagtgcagaaatctatctatatgtcgcgatactcatcttctttctggcatacgtggtggacgaggggtgtatcattatgcaagaaagagcctcttacgttcgttcagtttacaatctgttgaatttcgcgctgaagtgtattttcacagtcctgatcgttttgtttctgagaaagcactttctagccaccggcattatacgcttttacctgtcaaatccagaagacttcatcccgttccatgccgtgtcacaggtggaccacattatgcggattatactgggattcctcctgttcctcacaatactgaagacccttaggtactctaggttcttctatgatgtgagactggcacagcgggcgatccaggccgccctgcctggaatctgtcatatggccttcgttgtgtccgtctacttttttgtgtacatggctttcggctatttggtgtttgggcagcatgaatggaattatagcaacttgattcattcaacacaaaccgttttcagttactgtgtgagtgcctttcagaacaccgagttcagcaataacagaatcttaggcgtcctattcctgtcttctttcatgctggtgatgatttgcgtgctcattaacctattccaggcagtgattctcagcgcttacgaagagatgaagcaacctgtgtatgaggagcctagcgatgaagtggaggccatgacatacctgtgcagaaaattgcgcactatgtttagcttcctgacaagccaatcaaaagctaaggatgagcctgagttcttcatcgatatgctgtatggccagcctgaaaaaaactcccacaggtatcttggacttaaaacccgtaatattaacggtaagaaaatggtgtatttggtggtgtag

SEQ ID NO: 161563 - DNA, 6762 bp, Artificial Sequence
  derived and/or modified sequence
atgaggcctggccctgccctgctgctgctgggcgtgggcctgagcctgtctgtgggccgcctgcccctgccccctgtgcccaggggggcccaggccgctgtgtctggggcccctgggggcctgctgcggggggcccctggcctgggcgtgcggggcggccgggccctgctgagcctgcggcccagcgctgtgcgggccggcggcgctgtgctgagcggccggggcagcctgtgcttcccccatggaggcaccggccgccgctggtactgcctggacctgcgggtgctgctgagcgcccagaggctgccctggccagctgccccagccctggccctggtggacctgcagctgagcgcccggggcggccgcctgagcctgacctggagcgtgcggctgcccaggagccctggccgcctggcctgggccttccggctgcggctgctgggccctggggccgcccggcctgccagccctgctgcccgggtgagccccaggtctgctgcccctggcccccggccccagcagggctttgtggccaggacagagtgccccacagatggccctgcccgggtgatgctgcaggccgtgaacagcagcagccacagagctgtggagagctctgtgtcctgccagatcaatgcctgtgtgatccagagggtgcgcatcaacacagaccagaagggggcccctgtgcggctgtccatgcaggccgaggccaccatcaatgcctctgtgcagctggactgcccagctgcccgggccatcgcccagtactggcaggtgttttctgtgcctgctgtgggccaggccccagactggacccagcccctggacctgccccagctggagatccggaacagccccctcttcatccacatccccaacaacagcctgcagtggggcgtgtatgtgttcaacttcaccgtgtccatcaccactggaaaccccaagatgcctgaggtgaaggacagtgatgctgtgtatgtgtggatcgtgcgcagcagcctgcaggccgtgatgctgggagatgccaacatcacagccaacttcacagagcagctgatcctggatggcagcaccagcagtgaccctgatgctgacagccccctgcagggcctgcagttcttctggtactgcaccacagaccccaggaactacggcggggaccgcatcatcctgggcagcaaggaggtgtgccaccctgagcaggccaacctgaagtggccctgggccagcggccctgtgctgaccctgctgcctgagaccctgaagggggaccacgtgtacttcttcaggatggtgatcaggaaggacagcaggacagccttcagtgacaagagggtgcacgtgctgcagggccccaaggccatcgcccacatcacctgcatcgagaactgtgagaggaacttcatcgtgtctgaccgcttcagcctcttcctgaactgcaccaactgtgccagccgggacttctacaagtggagcatcctgagcagcagtggaggagagatgctgtttgactggatgggagaaacagtgactggaagaaatggagcctacctgagcatcaaggcctttgccttccgccacttcctggaggccgagttcagcatcagcctgtacctggcctgctggagcggcgtgacctctgtgttccgccacagcttcatcatcaaccacggcccccagattggagagtgcaagatcaacccagccaagggcatcgccctgatcaccaagtttgtggtgcagtgcagcaacttccgggacaagcacgtgcccctgacctacaagatcatcgtgtctgacctgcacagcgtgggggagatcagctctgtgaaggagaacaccctgggcaccatcctgtacctgggcccccagagcacagtgccccccagcttcctgcctgtgggcatgctggccagccagtatggcctgaagatctatgcccaggtgtatgacagcctgggcgccttcagccaggtgaccctgcacgccacagcccaggcccccacagacaagaacagcagcaagacagtgctgaaccagctgctgtccttcaccgtgggccccagcagcctgctgagcaccctcatccagaagaaggacttcctgcctgctggctacctgctgtacatcgtggcctctgtgctgaacaacatgaagacagagctgcccctgagagatgacagagtgaacctgaggaagcacctgattgaccagagcttcctgctgcctgtgtccaccctggtggagatcggccaggtggtgatgaccatcaccaagctgacccagaagcccagcgagttcacctgggatgcccagaagagggccaccatgagggtgtggcaggccaaccaggccctgcaggagtaccagcagaaggacaagcgcttccgctctgagcagattgaaattgtgtccacaggcatcctgatgagcctgagcaacatcctgaagatgaccagcccccaccaggtggtgaaggaccccttctacgtgattgagagcctgagtgacaccatcctggccaacaaggtgcccggcaacaagaccacctccatgaggacccccaacttcaacatgtatgtgaagaaggtggagaagtggggcatcaaccagctgttcagaaatgagaagcactgcaggaactgcttctaccccaccctgaatgtgtcctctgtgcccggcctgagcgccaacggccccatcagcaccatgttctgtgacttcaccaatgacctcttcccctggctgaatgaccaggagaacacctctgtggaggtgtctggcttcaggatgactggagtggccgacaatggatctgtgctggagatcaccccagatgtggccgaggtgtacctggtgaggaagaacctgacctttgctgccttcaacctgactgtgggccccaacagcgaggtggatggcagcctgaagaagaccaccggcggcttctccttccaggtggacagcacagtgctgcgggaggtgctggtgcacatcgtgacagaggtgatggtgctcttcaccgtgctggtgtacacaggcagccagatcacccccacagccctggtggccaccttcctggtgccccatgacatccccccatttgccagccagagcgccctgtttgatcctgcctgcaccgtgaagaaggcccgggtggtgtgcctgcctgtgtccctgctgcagctgattgcccagcacagccacagcccccactgcaccgtgtccatcgtgctgcaggcccccaggtttgtgatgaagctgaatgacaagctggtgcgcatcagcatcttctctgtgcagtgcctggacatgtatggcatccagagcgagtggagggagggctactgcatcctgggggagaagacctcctggtatgaggtgcactgcatctgcaagaatgtggtgcgggcccggcggcagctgggcaccatcggcctgaccggcatccacctgcacacccactacgtgatggccaaggtgattgtcatccccaaccctgtggacctgcggctgaacatcatcaagagcctgcaccagaaccctgtgaccctcttcaccgtgctcttcatcatcctgctgtatgtgggcctggccttctgggccctgtacagagatgagatggaccagcacctgcggggccacgtgattgtgctgcctgacaatgacccctatgacaacctgtgctacctggtgaccatcttcaccggcagccgctggggcagcggcacccgggccaacgtgtttgtgcagctgcggggcaccgtgtccaccagtgatgtgcactgcctgagccacccccacttcaccaccctgtaccggggcagcatcaacaccttcctgctgaccaccaagagtgacctgggggacatccacagcatccgggtgtggcacaacaatgaaggccgcagccccagctggtacctgagccgcatcaaggtggagaacctcttcagccgccacatctggctgttcatctgccagaagtggctgtctgtggacaccaccctggacaggaccttccacgtgacccacccagatgagcggctgaccaggaaggacttcttcttcattgatgtgagcagcaacctgaggaagaaccacatgtggttcagcatctttgcctctgtggtggccaagaccttcaaccggctgcagaggctgagctgctgcctggccatgctgctgagcagcctgctgtgcaacatcatgttcttcaacctgaaccggcaggagcagacagagagccgggagaggaagtacatgaggtccatgatgattggaattgaatctgtgctgatcaccatccctgtgcagctgctgatcaccttcctgttcacctgcagccagaggaagccccaggccgacctgaaggaggtgagcccccagaagcaccccctgatgtctgaggccagcgagcactgggaggagtacctgaggaagtggcacgcctatgaaacagccaaggtgcacccccgggaggtggccaagccagccagcaagggcaagccccggctgcccaaggccagccccaaggccaccagcaagcccaagcaccgccacaggaaggcccagatcaagaccccagagaccctgggccccaacaccaacagcaacaacaacattgaagatgaccaggatgtgcacagcgagcagcaccccagccagaaggacctgcagcagctgaagaagaagccccgcatcgtgctgccctggtggtgtgtgtatgtggcctggttcctggtgtttgccaccagcagcatcagcagcttcttcatcgtgttctacggcctgacctacggctatgacaagagcattgagtggctgtttgccagcttctgcagcttctgccagagcgtgctgctggtgcagcccagcaagatcatcctgctgagcggcttccgcaccaacaagcccaagtactgcaagaacctgtcctggagcaccaagtacaagtacacagagatccggctggatggcatgaggatgcaccctgaggagatgcagagaattcatgaccagatcgtgcgcatccggggcaccaggatgtaccagcccctgacagaagatgagatccgcatcttcaagaggaagaagaggatcaagagaagagccctgctcttcctgagctacatcctgacccacttcatcttcctggccctgctgctgatcctgattgtgctgctgcggcacacagactgcttctactacaaccagttcatccgggaccgcttctccatggacctggccaccgtgaccaagctggaggacatctaccgctggctgaacagcgtgctgctgcccctgctgcacaatgacctgaaccccaccttcctgcctgagagcagcagcaagatcctgggcctgcccctgatgaggcaggtgcgggccaagagcagcgagaagatgtgcctgcctgctgagaagtttgtgcagaacagcatccggcgggagatccactgccaccccaagtatggaattgatcctgaggacaccaagaactacagcggcttctggaatgaggtggacaagcaggccattgatgagagcaccaacggcttcacctacaagccccagggcacccagtggctgtactacagctatggcctgctgcacacctacggcagcggcggctacgccctgtacttcttccctgagcagcagcgcttcaacagcaccctgcggctgaaggagctgcaggagagcaactggctggatgagaagacctgggccgtggtgctggagctgaccaccttcaacccagacatcaacctcttctgcagcatcagcgtcatctttgaggtgtcccagctgggcgtggtgaacaccagcatcagcctgcacagcttcagcctggccgactttgacaggaaggccagcgctgagatctacctgtatgtggccatcctgatcttcttcctggcctacgtggtggatgagggctgcatcatcatgcaggagcgggccagctatgtgcgctctgtgtacaacctgctgaactttgccctgaagtgcatcttcaccgtgctgattgtgctcttcctgaggaagcacttcctggccaccggcatcatccgcttctacctgagcaaccctgaggacttcatccccttccacgctgtgtcccaggtggaccacatcatgaggatcatcctgggcttcctgctcttcctgaccatcctgaagaccctgcgctacagccgcttcttctatgatgtgcggctggcccagagggccatccaggccgccctgcccggcatctgccacatggcctttgtggtgtctgtgtacttctttgtgtacatggccttcggctacctggtgtttggccagcacgagtggaactacagcaacctgatccacagcacccagacagtgttctcctactgtgtgtctgccttccagaacacagagttcagcaacaaccgcatcctgggcgtgctcttcctgagcagcttcatgctggtgatgatctgtgtgctgatcaacctcttccaggccgtcatcctgagcgcctatgaggagatgaagcagcctgtgtatgaggagcccagtgatgaggtggaggccatgacctacctgtgcaggaagctgcggaccatgttctccttcctgaccagccagagcaaggccaaggatgagcctgagttcttcatcgacatgctgtatggccagcctgagaagaacagccaccgctacctgggcctgaagaccaggaacatcaacgggaagaagatggtgtacctggtggtgtag

SEQ ID NO: 161564 - DNA, 6762 bp, Artificial Sequence
  derived and/or modified sequence
atgcggcccggccccgccctgctgctgctgggcgtgggcctgagcctaagcgtgggaagactacctctgcccccagtgccccgcggtgctcaggccgcagtatccggcgctcccggcggcttgttacggggcgcgcccggtcttggggtgaggggaggacgggccctgctgtcgctacggccgtcagccgtcagagctgggggggcagttctaagcggacggggttcactgtgtttcccccacggcgggacaggccggagatggtactgcctcgacttgagagtgcttctgtcagcgcagcggctcccatggccagctgccccagcgctggcccttgtcgacctgcagctatccgcaagaggggggcgcttaagccttacttggagcgttagactccctcggtctccaggacgcctcgcatgggcctttcgcctgaggctactgggtccaggggcggctcggccggcttctccggccgccagggttagtccgcgcagcgccgcccccggaccaagaccacagcaggggtttgtggcccggactgagtgccccaccgatggtcccgcacgggtcatgctccaagctgttaattcaagcagtcatcgagcagtggagagctctgtctcttgccagattaatgcatgcgtgatccagcgcgtgaggatcaacaccgatcagaagggtgcaccagtgcgcttatcaatgcaggctgaggctacaattaacgcttcagtgcagctggactgccccgccgctcgcgctatcgcccagtattggcaagtgttctctgtgccagccgttgggcaggcaccagattggacccagcctctcgatctgccgcagttggagataagaaacagccctctatttatccatatacccaacaattccctacagtggggggtgtatgtcttcaacttcaccgtttccatcacaacaggtaaccctaaaatgccagaagtcaaggacagcgacgccgtatatgtatggatcgtgcggagttctttacaggctgttatgctcggtgacgccaatatcactgccaacttcaccgaacagctgattcttgacggaagcacgagcagtgaccctgacgcggattcaccgctgcaggggttgcaattcttttggtattgcacaaccgacccgcgaaactatggtggagaccgaatcattcttggtagcaaagaagtgtgtcaccctgaacaggctaacctcaaatggccttgggcctccggacccgtactcaccctcctgcccgagactctcaaaggggaccatgtgtacttttttcggatggtgatacggaaagactccaggacagccttctctgataaaagggtgcatgtgctgcaggggcctaaggccatcgcccacatcacgtgtatcgaaaattgcgagcgcaactttatcgttagcgataggttcagtcttttcctgaactgtacaaattgcgcttctcgtgacttttataagtggtccatcctgtctagttcgggcggagagatgttgttcgactggatgggggagacagtcacggggcggaacggtgcctacctgtccattaaggcttttgcctttagacattttctggaggcggagttttccatcagcttgtacctggcctgctggtccggcgtgacaagcgtctttcgtcactctttcattattaatcatggcccacagataggggagtgtaaaataaatccggccaagggcatcgcgctgatcacgaaattcgtcgtgcagtgcagcaattttagggacaagcatgtccctctcacatataaaataatcgtgagtgacctgcactccgtgggagagatcagttccgtgaaggaaaacacactgggcaccattttgtacctggggccgcagagcaccgtgcctcccagtttcctacctgtgggtatgctagcgtcacagtatggcttgaagatttacgcacaagtttatgactcactgggtgccttcagtcaagtgacacttcacgcaactgctcaggcccctaccgacaaaaacagttctaaaacagtcctgaaccaactcctttccttcacggttgggcctagttccctcctatccacgctcatccagaagaaagacttcctccctgcgggctatctgctctacatcgtagctagcgtgctaaacaatatgaagacagaattgccactgagagacgacagggtcaacctgagaaagcacctaatcgaccaatcatttctcctcccagtttccacgctcgtggagattggccaggtagttatgaccatcacaaaactgacacagaagccttcagagttcacctgggacgcccagaagagggcaacaatgcgtgtatggcaggccaaccaggcacttcaagaatatcagcagaaggacaagagatttcgcagcgagcagatcgagatcgtgagcactggaattcttatgagtctttctaacattctcaaaatgaccagcccacaccaagtagtgaaggaccccttctatgtcatcgagtccttatctgataccattctggccaataaggtgccagggaacaagaccacttccatgaggacgcctaatttcaatatgtacgttaaaaaggtggaaaagtggggcattaaccaactgtttagaaatgaaaagcactgccgaaactgtttctaccctaccctgaatgtaagctctgtgcccggcttgtctgcaaacgggcccatcagcactatgttctgtgattttacaaatgatctcttcccctggttaaacgaccaagaaaacacatccgtggaagtttctgggtttagaatgacgggagtggccgataacggctctgtgctggaaattacacctgacgtcgccgaagtgtacctggtaagaaaaaacctcaccttcgccgctttcaatctgaccgtaggccccaatagcgaagttgatgggagtctaaaaaagacaacaggaggtttcagctttcaggtcgacagtacagtgctgcgggaggtgctcgttcacatagttacagaggtgatggtactgttcacagtccttgtgtatacaggaagccaaattactcccacggccctagtggccaccttcctcgtcccacacgacattcctccgtttgcgagtcagtctgctttgttcgaccccgcttgcacagtgaagaaagcccgcgtcgtgtgcttacctgtatccctgctacagctcatcgctcagcactctcattctccccactgcacagtgagcatcgtgctccaggccccacggtttgtgatgaagctgaatgataagcttgttagaatctccatcttctccgtgcaatgcctcgacatgtacggtatacagtccgagtggagggaggggtactgtatccttggggagaaaacttcctggtacgaggtgcattgcatttgtaagaatgtcgttcgagcaagacgccagctggggaccattggtttaacaggaattcacctgcacactcactacgttatggctaaagtaatcgtgattcccaatccggtggacctccgcctcaacattatcaagagcctgcatcagaaccctgtcaccctgtttactgtactgttcataatactgctttacgttggcctcgccttctgggccttgtatagggatgagatggaccagcatcttaggggacacgtgattgtactcccagataacgatccttatgacaatctgtgctatctggttaccatcttcacaggcagccggtgggggagcggaaccagggccaatgtgtttgtacagctccgtggcacagtttccacgagcgatgtccactgtctgtcccatcctcatttcacaactttgtaccgcgggagcatcaataccttcttattaacaactaaatccgaccttggtgacatacattcgatccgggtctggcacaataatgaagggaggtcaccttcttggtatcttagtagaattaaagtggaaaacctgttctcgcgccacatctggctattcatctgccagaaatggttgtcggtggatacgacacttgacagaacgttccacgtaacacatcctgacgagcggcttactaggaaagactttttcttcatagacgtctccagtaacctacggaagaaccacatgtggttctctatctttgctagcgtggtggccaagacattcaaccgtctgcagaggctcagctgttgtctagctatgctcttgagctcactgctttgcaatattatgttctttaaccttaacagacaggagcagactgaatcacgggagaggaaatatatgcggtccatgatgatcggcatcgaaagtgtgcttattactatccccgtacagctgctgatcacgtttctgttcacgtgctctcagagaaaacctcaggctgatcttaaagaggtaagtccacagaagcatccactcatgtctgaggcctccgagcattgggaagagtatctgcgtaagtggcatgcgtacgagaccgcaaaagtgcaccctagggaggtggccaagcccgcttccaaggggaaacctagactgcccaaggcctctccaaaggcgacttccaagcccaagcaccggcaccgaaaggcgcagatcaaaacccccgagacactcggccccaatactaattccaataacaatatcgaggacgatcaagacgttcacagtgaacagcacccatcacagaaggacctccagcagctcaagaagaaacctaggattgtgctaccgtggtggtgcgtgtatgtcgcctggtttctcgtgttcgctacctcgtcgatctccagctttttcatcgtgttctatgggctgacgtacggctacgataagagtatcgaatggctttttgctagcttttgctccttttgccagagcgtgctgttggtgcagccttcaaaaatcatattactgtctggtttcaggacgaataaacctaagtattgcaagaatctgtcatggtcaaccaagtataagtatacagaaatcagactcgacggcatgaggatgcatcctgaggagatgcaacgaatacatgatcagatcgtcaggatacgaggcaccagaatgtaccagcccctaaccgaggacgaaattaggatatttaagaggaagaaacggatcaagagacgggcgctgctgtttctaagctatatactgacccatttcatctttctcgccctcctcctgatcctgatcgtgctactgcgccacacggattgcttttactacaaccaattcattcgtgatcgattcagcatggacctagccacggtaactaagcttgaagatatttatcgctggctaaatagcgtcttgctgcccttgctgcataacgacctgaaccctacctttctaccggaatcttcatctaagatcctgggattgccattaatgagacaggtgagggctaagtcgtccgagaagatgtgcctgcccgccgaaaagttcgttcagaactcaatccgtcgggagatccattgtcaccccaaatatgggattgatcccgaggacaccaaaaattactccgggttctggaacgaggtcgacaagcaggcaattgatgagtcaaccaacggattcacctacaaaccgcagggcacccagtggttgtattactcctacggcctgcttcatacctacgggtcaggcggctacgcactgtatttttttccagagcagcaacggtttaatagtacactacgtctgaaagaactccaggaatctaattggttagatgagaaaacatgggctgtggtgctggagcttaccaccttcaatccagatattaaccttttctgttctatctcagtcattttcgaggtcagtcaactcggagttgtcaatacatcaatatcactgcacagtttttcactcgcagatttcgaccgaaaagcttccgcggaaatctacctgtatgtcgcaatccttatttttttcctggcctatgtggtcgacgagggctgcatcattatgcaggaacgcgcctcctacgtccgaagcgtctataacctgctgaattttgcactgaagtgcatcttcaccgttctgatcgtcctgttcctccgaaaacacttcctcgccacaggcatcattagattctacctgtcgaaccccgaggattttattcccttccatgccgtgagccaggttgaccacattatgagaatcatactgggcttcctgttgttcctgaccatcttgaaaactcttcgatattcacggtttttctacgatgtgcggttggcacaacgggcgatccaggctgccctcccaggtatttgtcatatggccttcgtggtatcagtatattttttcgtatacatggccttcggatacctggtgttcggtcagcacgagtggaactactctaatctgatccactccacgcagaccgtgttttcatactgcgtcagcgcatttcagaacacggaattctccaataacagaatcttaggagtgttgtttctgtccagttttatgttggtgatgatctgtgtgctaataaacctgtttcaggctgttattctaagtgcttatgaggaaatgaagcagcctgtctatgaggagcccagtgatgaggtggaggcgatgacttacctatgtcgcaaactccgcacaatgttttcgtttctgacttctcaatcgaaagccaaggacgagcctgaatttttcatcgatatgctgtacggccagccagagaaaaacagccaccgatatctcgggctgaagacccgcaatattaatggaaaaaaaatggtatacctggtcgtgtag

SEQ ID NO: 161565 - DNA, 7660 bp, Artificial Sequence
  derived and/or modified sequence
atgaggcctgggcccgctctcctccttctgggcgtgggcctgagcctgagcgtcggccgcctcccgctgccgccggttcctcgcggggcacaagccgccgtctccggggcgcccggtggcctcctcaggggcgccccgggcctcggggtgcgcggcggccgcgccctcctcagtctgcggcccagcgcggtgcgggcgggcggcgctgtcctgagcggccgcggcagcctctgcttcccccatggcgggaccgggcggcgctggtactgcctcgacttgcgcgtcctgctcagcgcccaacgcctgccctggccggccgcgcccgcgctcgcgctcgtcgacctgcagctctccgcgcgcggcggccgcctctccctgacgtggtccgtgcggctgccgcgctcgcccgggcgcctggcctgggccttccgcctgcggctgctcggacccggcgccgcccgcccggcctcccccgcggcccgcgtctccccgcgctccgccgcgccaggcccgcggccccagcagggcttcgtggcccgcaccgagtgccccacagacggccccgcgcgcgtgatgttgcaggccgtcaactcgtccagccacagagccgtcgagtcgtccgtgtcctgtcagataaacgcctgcgtcatccagcgcgtgaggatcaacacggaccagaagggcgcccccgtgcgcctgagcatgcaggcggaggccaccatcaacgcctcggtgcagctggactgcccggccgcgcgcgccatcgcccagtactggcaggtgttctccgtgcccgccgtgggtcaggcgcccgactggacgcagcccttggatctgccccagctcgagatcaggaacagccccttgttcattcacatccccaataattcgttacagtggggagtgtatgtgtttaatttcacggtgtccatcaccacagggaaccccaagatgcccgaggtgaaagactcggacgccgtctatgtctggatcgtcaggagttccctgcaggcggtgatgcttggcgatgccaacataacagctaatttcacagagcagctgattctggacgggtccacgtcctcggacccagatgcggacagcccgttacagggactccagttcttttggtactgtaccacagatcccagaaactacggtggggatcgaataatcctggggagcaaggaagtctgtcaccccgagcaggccaatctgaaatggccctgggcctcgggccctgtactgacacttttgccagaaacacttaaaggcgaccacgtgtatttcttcagaatggtgattcggaaggactctaggacagcgttttctgataagagggtccacgtgctccaaggaccaaaagccatagcacacatcacatgtatcgaaaattgtgagagaaacttcattgtctctgatagattttctttgttcctaaattgcacaaattgtgcaagccgtgatttctataaatggtcaattttgtcttcttcaggtggtgagatgctatttgattggatgggggaaactgtaacaggaaggaatggtgcttatctgtctataaaagcttttgcttttcggcattttttggaagctgagttttcgatttctctgtatctagcatgttggagtggagtgacctcggtcttcaggcattcttttattattaaccatggccctcagatcggagaatgcaaaattaatccagctaaaggaattgcacttattactaaatttgttgtccagtgtagtaattttagggataagcacgtccctcttacatataaaataattgtttctgatttgcacagtgttggtgaaatcagttcagtaaaagagaacaccctggggaccatcctgtacttggggcctcagtccacagtacccccttcctttctccctgttggtatgttggctagtcaatatggcttgaagatatatgcccaggtctatgattctctaggagctttttctcaggtgactttgcatgccaccgcacaggctcccactgacaaaaattcatcaaagacagtgttgaatcagttactcagtttcaccgtgggaccaagttcattgctgtctactttgattcaaaagaaggattttttacctgcaggttacttactgtatatagtagcttccgttttgaataacatgaaaactgaattacctctccgagatgacagagtcaatctccgaaaacacctcatcgatcagtctttccttcttcctgtaagcactttggtagaaattggccaggtagtcatgactattaccaaattaacccagaaaccctctgaattcacttgggatgctcagaaacgtgccaccatgagggtatggcaagcaaatcaagccctacaagagtatcagcaaaaagataaacgctttcgatctgaacaaatagaaatcgtgagtactggaatactaatgagtttgtctaatattcttaaaatgacttctcctcaccaagtagttaaagatcctttctatgtaatagaatctctatcagacacaatactggctaataaagtgccagggaacaaaaccacctcaatgagaacccccaatttcaacatgtatgtcaagaaagttgaaaagtggggtatcaaccagctcttcagaaatgagaaacactgcagaaattgtttttatccaacactcaatgtgagcagtgttcctggtctgtctgcaaatggtcccatttctacaatgttttgtgatttcacaaatgacctctttccttggttaaatgatcaggaaaacacttcggtggaggtgtctggattcagaatgacaggagttgcagataacggtagtgtgctagagatcacacctgatgtagcggaagtgtaccttgtcaggaaaaacttgacctttgcagcttttaatctcacagtgggacccaacagcgaggttgatgggtccttgaagaagacgacaggtgggtttagctttcaagtggacagcacagtgcttagggaggttctggtccacatagtaacagaagtgatggtgctgttcacagtgttggtgtacacaggcagtcagatcactcccacagcgctggtcgccaccttcctggtgcctcatgacatccctccatttgccagccagagtgccctgtttgacccagcctgcacagtgaagaaggcccgtgtagtctgcctccctgtgtccctgctgcaactcatagctcagcacagccactctccccactgtactgtatccatagttctgcaggcacctcgttttgtcatgaagctcaatgacaagctagtgagaatttctattttcagcgtccagtgcttggacatgtatgggatccagagtgaatggagagagggttattgcattcttggtgagaagaccagctggtatgaggtgcactgcatctgcaagaatgtagtaagggctaggcggcagctgggcacaatcggactcacgggcattcacctgcatacccactatgtgatggccaaggtgattgtgatccctaatcctgtggatctacggttaaacatcatcaagagccttcaccaaaaccccgtgaccctcttcactgtgcttttcattattctcttatacgtgggcctagctttttgggctttatacagggatgaaatggaccagcatcttcgggggcatgtgatagttctaccagataatgatccttatgataatttatgctacttggtgactatttttacaggaagtcgttgggggtctgggaccagggccaatgtctttgtgcaacttagaggaactgtgagtaccagcgacgtgcattgtttaagccatccacatttcacaactctctaccgaggtagcatcaacactttcctcctaacgacaaaaagtgacttgggggacatccattccatccgtgtgtggcacaacaacgagggtcgatcgcctagctggtatttaagtagaatcaaagtggaaaatctgtttagcaggcacatttggctgttcatatgccagaaatggctttctgttgataccactttggacagaacatttcacgttacccatccagatgagcgtctgactagaaaagactttttctttatagatgtgagtagtaatctccggaaaaaccacatgtggttctctatttttgctagtgttgttgctaaaacattcaataggctccagagattgtcctgttgtttagcaatgttgcttagctctcttctttgtaacattatgttctttaatctaaatagacaagaacaaactgagtcaagagagaggaaatacatgagatcaatgatgataggaattgaaagtgtcttaattacaatccctgtgcaattattaataacttttttgttcacctgttcccagaggaaacctcaagcggatctaaaggaggtatctcctcaaaagcatcctctaatgtcagaagcaagtgagcactgggaagaatacttgagaaagtggcatgcttacgaaactgctaaggtgcaccccagggaggttgcaaaacctgcatctaaaggaaagcccaggcttccaaaggcttctcctaaggcaacctccaaacccaagcacaggcataggaaagcacaaatcaagaccccggagaccctcgggccaaatacaaattccaataacaacatagaagatgatcaggatgtccattccgaacagcacccttcccaaaaggatctccagcagcttaagaaaaagccccggatcgtcctaccttggtggtgtgtttatgttgcatggtttttggtttttgctacttctagcatatcctcattcttcattgtattttatggactgacttacggctatgacaagtcaatagaatggctctttgcatctttttgttcattctgtcagtcagttcttctggtgcagccatctaaaattatactcctgtcaggcttcagaacgaataaacccaagtattgcaaaaacctttcatggtcaaccaagtataaatatactgagatcaggttggatggaatgcgtatgcatccagaagaaatgcagaggatacatgaccagatcgtccgaatccgaggcacgaggatgtaccaaccccttacagaagatgaaatcagaatattcaaaagaaagaagaggatcaagagaagagcactcctgtttctgagttacattctaactcactttatctttctagcccttctgttgatccttatcgtcttactacgtcacactgactgcttttactataaccagtttattcgtgatcggttctctatggatcttgctactgtgactaagctggaagacatctatagatggctaaacagcgtgctgttgcctttgttacacaatgacctgaatccaacatttcttcctgaaagctcgtctaaaatccttggccttccattgatgaggcaagtgagagcaaaatctagtgaaaaaatgtgtctacctgccgaaaagtttgtgcaaaacagcatcagaagagaaattcattgtcaccccaaatatggcattgacccagaagacacaaaaaactattctggcttttggaatgaagttgataagcaggctatagatgagagtaccaatggatttacttataagcctcaaggaacgcaatggctatattattcctatggactactacacacctatggatctggaggatatgcactctatttttttccagaacagcagcggtttaattccacactgaggctcaaagaacttcaagaaagcaattggctggatgagaagacatgggctgtggttttggaattaacaacttttaatccagatataaatctgttctgtagcatttcggtcatatttgaagtctctcagttaggagttgtcaacacaagcatatctctgcactctttttcacttgctgattttgacagaaaagcttcagcagaaatctacttgtatgtggccattctcatttttttcttagcctacgttgttgatgagggttgtatcattatgcaagaaagagcctcctatgtgagaagtgtgtataatttgctcaactttgctttaaagtgcatatttactgtgttgattgtgctctttctcaggaaacatttcctggccactggcataattcggttttacttgtcgaacccagaagacttcattccctttcatgcagtttctcaggtagatcacattatgaggataattttgggtttcctgttatttctgacaattttgaagaccctcaggtattccagattcttctacgatgtgcgcctggctcagagggccatccaggctgccctccctggcatctgccacatggcatttgttgtgtccgtgtatttcttcgtatacatggcttttggttacctggtgtttggtcagcatgaatggaactacagtaacttgattcattccactcagacagtattttcctattgtgtctcagctttccagaacactgaattttccaataacaggattctgggggtcctgttcctctcatctttcatgctggtgatgatctgcgtcttgatcaacttatttcaggctgtaattctgtctgcatatgaggaaatgaagcagcccgtgtatgaggagccatcggatgaagtggaagcaatgacctatttgtgccgtaagctgagaaccatgttcagctttctgacctcgcaatctaaggccaaagatgagcctgagttctttattgacatgctgtatgggcagccagagaagaacagccaccgttatctggggctgaagaccagaaacatcaacgggaagaaaatggtttaccttgttgtttgatgaatgatggtttcatgagtcacaagcaagcgttcccccaactgctgagtctgtgggattaaggggattagggagtgtcagtggcctagtcatgctttctactcatgtccttcacaaggcacatcccctacatttggaagaatccccaatcttgtcctctgctcttgggagtgtaaaagttgggagtgtagtgtagcatctggggagacagcaggatcacagtgtgggattcctggactgatttccctttagaggggagttatgtgactccccgtacaagggcaaccctgtttctttggtgcctgcagtttagagaaggcagagccactggttttgagaaccagatttgagagagggacctggccagggtggagcattgtctgggtgtttctgcgcttgacccatgctggaagctaatggcctgttgctcctgacagagccccaaactcctcggcctcactgggaggcccctttgtagaccagggctcccctcctcttgttccccctgggcttagggcctcgtggggagttccaggacttgcttcatgcttgagaatgcagatgtggtgcttctcatttattcttaaagctactggtagttaaagtaaaattcagtaacattttctgaccaagagacatgttttgttaaacaacaaaaaggtacatatgggttcacattgaaatatgtctatatgctgaatatagcaacatatgcatctaagatttgggcatttggttattaatagcgtgctggactattcaggaataaggaaaatgtggtttatcacttaagagaaacaagggctggtagctgtactattttcactcagaagcatgttcatttatgtagatgccactttaagctttatcagaattaaatgtgagatttcttctttga

SEQ ID NO: 161566 - DNA, 6762 bp, Artificial Sequence
  derived and/or modified sequence
atgagacctgggcctgctttactcctcctgggggtgggactatccttgtccgttggccgtctccctctccctcctgtccccaggggcgctcaggctgccgtctccggggcaccgggagggcttctgcgcggagctcccggactgggcgtgagaggcggaagggctttgctgtctctgagacctagtgccgtccgcgctggtggcgcagtcctgtctggaagaggttctctctgcttcccccatggcggaacagggaggcggtggtattgcctggacttaagggtgttactgtcagcccagcgcttaccttggccagcggctccggcactggccctggttgacctgcagttgtccgctcgcggagggcgtctgtccctaacctggtctgtcaggctgcccagatcacctggacgcctggcctgggcctttagactgcgacttctcgggcctggggctgctcgcccagcgtctcccgcagcaagagtctcacctcgatctgcagcccctggaccaaggccccaacagggtttcgtcgcaaggaccgagtgtccaacagacggtcccgcacgagtgatgctacaggcagtgaacagctccagtcacagagctgtggagagcagtgtgtcctgtcagatcaacgcatgtgttatccagcgtgtgcgcatcaatactgatcagaagggtgctcccgtccggctcagcatgcaggccgaagccaccatcaatgcttcagtgcagctggactgtccggctgccagggcaatagcacaatactggcaggtcttcagtgttcccgctgtaggccaggctcccgattggactcagcccctggacctacctcaattggagattcgaaactcgcctctttttatccatattccaaacaactccttgcaatggggggtgtacgtatttaactttaccgtttccatcaccactgggaaccccaagatgcccgaagtgaaggattctgacgccgtatatgtttggatcgtgaggagttccttgcaggcagtgatgcttggggacgctaacattacagccaactttaccgagcagctgatcctggacggatcaacatccagcgacccagacgccgactcccccctccaaggccttcagttcttctggtactgtacaacagaccctaggaattatggcggagaccgaattatcctgggctcgaaggaagtgtgtcacccagagcaggcaaacttaaagtggccatgggcttccggcccagttctgactctgctgccagaaacactgaagggagatcacgtttactttttcagaatggtgattcgcaaggattcccgcaccgccttcagcgataaacgagtgcatgtgctccaaggcccaaaggccatcgcccatattacttgcatcgagaattgcgagagaaatttcatcgtgtccgatcgattttccctgtttttgaactgcaccaactgcgccagtcgcgatttctacaaatggtctattctgtcctcaagtggcggagaaatgcttttcgactggatgggggaaaccgtcaccgggcgtaacggggcatacctctccattaaggccttcgcattccggcactttctggaggccgagtttagtatatccttgtatttggcttgctggtcaggcgtgacctctgtgttccgccacagcttcataatcaaccatgggcctcaaatcggggagtgcaaaatcaaccctgcaaagggcattgcactgattacaaaattcgttgtgcagtgcagcaatttccgcgacaaacatgtaccgctaacctacaaaatcattgttagcgaccttcactccgtcggcgagatttcctcggtgaaagaaaacaccttggggacaattttgtatttgggccctcagagcaccgtgccaccctccttcttgcctgttgggatgctggcctcccaatacgggcttaagatctatgcacaggtgtacgattccctgggggcattctcccaggtaacactgcacgccaccgctcaagcacccacagacaagaatagctctaagacagtcctgaaccagctgttatcttttacagtcgggccatcgagcctgctgagtacactgatacagaagaaagattttcttccagccggttatctgctgtatatagttgcctctgtgctgaacaacatgaagacagaacttcccctgagagacgaccgtgtgaacctcagaaagcacctcatcgatcagtcctttttgcttccagtgtccacgcttgttgaaatagggcaagtggtcatgacaataactaagctgacacagaaacctagcgagttcacgtgggacgctcagaagagagctacaatgcgagtgtggcaggccaatcaggctctgcaggaatatcagcaaaaggataaaagattcaggagcgagcagatagagatcgtatcaactgggatccttatgtcactgagtaatatccttaaaatgacttctccgcaccaggtcgtcaaggaccctttctatgtcatcgaaagtctctctgacacaatcctggcgaataaagttcctgggaataaaactacgagcatgcgaacaccgaattttaacatgtatgtgaaaaaggtggagaaatgggggattaaccagcttttcagaaacgaaaagcattgtcggaattgcttttacccaaccctcaacgtctcgagcgtcccaggattgtctgcaaatggtcctatttccaccatgttctgcgacttcaccaacgacttgtttccttggctcaatgatcaagaaaacaccagtgttgaagtgtcaggtttccgaatgactggcgtggctgacaacggatctgtcctggagattacacccgacgtggctgaagtgtatctcgtgcggaaaaaccttacattcgccgcattcaaccttacggtgggaccgaatagtgaagtcgatggtagcttaaagaagacaactggtgggttcagcttccaagtggatagcaccgtgctgagagaagttctggtgcacatcgttactgaagtgatggtgctttttaccgtgctggtctacacaggtagtcaaatcacacccactgcccttgttgcgacctttctcgtgccacatgacataccgccattcgctagccaatccgccttgttcgacccggcttgcaccgttaaaaaggccagagtcgtctgcctgccagtatcactccttcagctaattgcgcagcactctcacagcccccactgcactgtgtctatagtgcttcaagccccacgcttcgtgatgaaactcaatgataaactggtccggatctctatcttttccgttcagtgcctcgacatgtatggcatccagagtgagtggagagaaggttactgtatcctgggagaaaaaacctcatggtatgaagtccactgtatatgcaagaatgtagttcgagcgagaagacagctggggaccattggcttaaccgggatccatctacatacgcactacgtcatggctaaagtgattgttatccctaaccctgtcgatcttcggttaaacataattaaaagtcttcatcagaatcccgttactctgtttaccgtcttgtttatcattctactgtacgtgggacttgctttctgggccctgtaccgcgatgagatggaccaacatctgaggggccacgtgatcgtactccctgacaacgacccctatgacaacctttgttatctcgtcaccatattcactgggagcaggtggggctcagggacgcgggcaaatgtttttgttcagcttcgcggtacagtgtccacgagtgacgtgcattgcctgtcccatccccacttcaccaccctctataggggatccatcaatacgttcttgctgaccacaaaatcagacctcggcgacatccactctattcgggtgtggcataataatgaaggtcgctcccctagctggtatctgagcaggattaaagtggagaacttgttctctcggcatatttggctatttatctgtcagaaatggctgagtgtggatacgactttggatcgaacctttcatgtgacccatcctgacgaaaggttgactcgaaaagactttttctttatcgacgtctcgtccaatctcaggaaaaaccacatgtggttcagcatatttgccagtgttgtcgccaaaacctttaatcggctgcaaagacttagttgctgcttggccatgctactctccagcctcctgtgtaacataatgttttttaatttgaacagacaagaacagaccgagtctcgtgaaaggaagtatatgaggagcatgatgatcggtatcgagtccgtgttaattacaataccagtccagctactcatcacatttcttttcacatgctcccagcggaaaccccaggctgacttaaaagaggtctctcctcagaaacaccccttgatgtccgaggcctcggagcactgggaggaatatctccgcaagtggcatgcctacgagactgcgaaagtccaccccagagaggtcgctaagcccgctagcaagggtaaacctagactccccaaggcatcccccaaggccacatcaaagcccaaacaccgtcaccgcaaggctcaaattaagactccggagaccctgggccctaacacaaactctaataataatatcgaagatgaccaggacgtccatagcgaacagcacccatcgcagaaagacctgcagcaacttaagaaaaagccgagaatcgtgcttccatggtggtgtgtttacgtagcctggttcttggtgttcgcaacttcgtcgatctcctccttctttattgtgttctacggactaacttacggctatgataaaagtatcgaatggttgtttgccagcttctgctctttttgtcagagtgtgctactggtacagccttctaaaataatcctgctctctggcttcaggactaacaagcctaaatactgcaaaaacttaagctggagcactaagtataaatataccgaaatacgactggacggaatgcggatgcacccagaagaaatgcaacggatccacgaccagatcgtcagaattcggggtacccggatgtaccagcccctgaccgaggacgagatcagaatctttaagagaaagaagcgcattaaaaggcgcgctctcctttttttatcgtacatcttaacccacttcattttccttgccctcctgttaattctgattgtgctgcttcgtcatacagattgcttctattataatcagttcatccgcgataggttttctatggacctggccacagtgacgaagctggaggatatctaccggtggctgaactcagtgctgctaccgctgctccacaatgacttgaacccgaccttcctgcccgaatcatctagtaaaattctcggactgcctctgatgcggcaagttcgagccaaaagtagcgagaagatgtgcctgcccgctgaaaagttcgttcagaactctattcgacgagagatacactgccatccaaagtatggaatcgacccagaagacactaaaaattacagcggattctggaatgaagtggataaacaggcaattgacgagagcacaaacggtttcacgtataagcctcagggaacacagtggctgtactattcttacgggctgcttcacacttacgggagcggcggttatgcactgtacttcttccctgaacaacagagatttaattccactctgagactaaaagagctacaggaatcaaactggctggatgagaaaacttgggctgtggtgctagagttgaccaccttcaacccagatattaacttattctgttctattagcgttatcttcgaagtgtcacagctcggtgtggtcaatacctctattagcctccacagtttctcattggctgacttcgacagaaaggcgagcgctgagatctacctgtacgttgccattctaatttttttcttggcatacgtcgtggatgagggctgtattataatgcaagagcgcgcttcctacgtgaggtctgtctacaacctcttgaacttcgccctgaaatgtatcttcacggttctgatagtgctcttcctccggaagcacttcttggccaccgggatcatccgtttttacctatccaacccagaggacttcataccttttcatgccgtcagccaggttgatcacatcatgagaataattcttggctttctgctgtttcttactattctcaagaccctgaggtacagccgcttcttctatgacgttcgcctggctcaaagggcgatccaggctgccctcccaggtatttgccatatggccttcgtggtcagtgtttacttctttgtgtacatggcatttggttacctagtgttcggacaacacgaatggaactactctaatctgattcactcaacgcaaaccgtgttttcgtactgtgtgtctgcctttcagaacaccgaattttctaataacaggatactgggcgtactttttctctcgtcgttcatgctggtgatgatctgcgtcttaattaacctgttccaggccgtgatcttaagcgcttacgaggagatgaaacagcctgtctacgaagaaccttccgacgaggtagaggcaatgacatacctgtgtcgtaaacttcggacgatgttctctttcctcacctcacagtctaaagcgaaggacgaaccagagttctttatcgatatgctgtatgggcagcccgagaagaattcgcaccggtacctgggtctaaagacccggaatatcaatggtaagaagatggtctatctcgtcgtgtac

SEQ ID NO: 161567 - DNA, 6762 bp, Artificial Sequence
  derived and/or modified sequence
atgagacccggccccgccctgctgctgctgggcgtgggcctgagcctgagcgtgggcagactgcccctgccccccgtgcccagaggcgcccaggccgccgtgagcggcgcccccggcggcctgctgagaggcgcccccggcctgggcgtgagaggcggcagagccctgctgagcctgagacccagcgccgtgagagccggcggcgccgtgctgagcggcagaggcagcctgtgcttcccccacggcggcaccggcagaagatggtactgcctggacctgagagtgctgctgagcgcccagagactgccctggcccgccgcccccgccctggccctggtggacctgcagctgagcgccagaggcggcagactgagcctgacctggagcgtgagactgcccagaagccccggcagactggcctgggccttcagactgagactgctgggccccggcgccgccagacccgccagccccgccgccagagtgagccccagaagcgccgcccccggccccagaccccagcagggcttcgtggccagaaccgagtgccccaccgacggccccgccagagtgatgctgcaggccgtgaacagcagcagccacagagccgtggagagcagcgtgagctgccagatcaacgcctgcgtgatccagagagtgagaatcaacaccgaccagaagggcgcccccgtgagactgagcatgcaggccgaggccaccatcaacgccagcgtgcagctggactgccccgccgccagagccatcgcccagtactggcaggtgttcagcgtgcccgccgtgggccaggcccccgactggacccagcccctggacctgccccagctggagatcagaaacagccccctgttcatccacatccccaacaacagcctgcagtggggcgtgtacgtgttcaacttcaccgtgagcatcaccaccggcaaccccaagatgcccgaggtgaaggacagcgacgccgtgtacgtgtggatcgtgagaagcagcctgcaggccgtgatgctgggcgacgccaacatcaccgccaacttcaccgagcagctgatcctggacggcagcaccagcagcgaccccgacgccgacagccccctgcagggcctgcagttcttctggtactgcaccaccgaccccagaaactacggcggcgacagaatcatcctgggcagcaaggaggtgtgccaccccgagcaggccaacctgaagtggccctgggccagcggccccgtgctgaccctgctgcccgagaccctgaagggcgaccacgtgtacttcttcagaatggtgatcagaaaggacagcagaaccgccttcagcgacaagagagtgcacgtgctgcagggccccaaggccatcgcccacatcacctgcatcgagaactgcgagagaaacttcatcgtgagcgacagattcagcctgttcctgaactgcaccaactgcgccagcagagacttctacaagtggagcatcctgagcagcagcggcggcgagatgctgttcgactggatgggcgagaccgtgaccggcagaaacggcgcctacctgagcatcaaggccttcgccttcagacacttcctggaggccgagttcagcatcagcctgtacctggcctgctggagcggcgtgaccagcgtgttcagacacagcttcatcatcaaccacggcccccagatcggcgagtgcaagatcaaccccgccaagggcatcgccctgatcaccaagttcgtggtgcagtgcagcaacttcagagacaagcacgtgcccctgacctacaagatcatcgtgagcgacctgcacagcgtgggcgagatcagcagcgtgaaggagaacaccctgggcaccatcctgtacctgggcccccagagcaccgtgccccccagcttcctgcccgtgggcatgctggccagccagtacggcctgaagatctacgcccaggtgtacgacagcctgggcgccttcagccaggtgaccctgcacgccaccgcccaggcccccaccgacaagaacagcagcaagaccgtgctgaaccagctgctgagcttcaccgtgggccccagcagcctgctgagcaccctgatccagaagaaggacttcctgcccgccggctacctgctgtacatcgtggccagcgtgctgaacaacatgaagaccgagctgcccctgagagacgacagagtgaacctgagaaagcacctgatcgaccagagcttcctgctgcccgtgagcaccctggtggagatcggccaggtggtgatgaccatcaccaagctgacccagaagcccagcgagttcacctgggacgcccagaagagagccaccatgagagtgtggcaggccaaccaggccctgcaggagtaccagcagaaggacaagagattcagaagcgagcagatcgagatcgtgagcaccggcatcctgatgagcctgagcaacatcctgaagatgaccagcccccaccaggtggtgaaggaccccttctacgtgatcgagagcctgagcgacaccatcctggccaacaaggtgcccggcaacaagaccaccagcatgagaacccccaacttcaacatgtacgtgaagaaggtggagaagtggggcatcaaccagctgttcagaaacgagaagcactgcagaaactgcttctaccccaccctgaacgtgagcagcgtgcccggcctgagcgccaacggccccatcagcaccatgttctgcgacttcaccaacgacctgttcccctggctgaacgaccaggagaacaccagcgtggaggtgagcggcttcagaatgaccggcgtggccgacaacggcagcgtgctggagatcacccccgacgtggccgaggtgtacctggtgagaaagaacctgaccttcgccgccttcaacctgaccgtgggccccaacagcgaggtggacggcagcctgaagaagaccaccggcggcttcagcttccaggtggacagcaccgtgctgagagaggtgctggtgcacatcgtgaccgaggtgatggtgctgttcaccgtgctggtgtacaccggcagccagatcacccccaccgccctggtggccaccttcctggtgccccacgacatcccccccttcgccagccagagcgccctgttcgaccccgcctgcaccgtgaagaaggccagagtggtgtgcctgcccgtgagcctgctgcagctgatcgcccagcacagccacagcccccactgcaccgtgagcatcgtgctgcaggcccccagattcgtgatgaagctgaacgacaagctggtgagaatcagcatcttcagcgtgcagtgcctggacatgtacggcatccagagcgagtggagagagggctactgcatcctgggcgagaagaccagctggtacgaggtgcactgcatctgcaagaacgtggtgagagccagaagacagctgggcaccatcggcctgaccggcatccacctgcacacccactacgtgatggccaaggtgatcgtgatccccaaccccgtggacctgagactgaacatcatcaagagcctgcaccagaaccccgtgaccctgttcaccgtgctgttcatcatcctgctgtacgtgggcctggccttctgggccctgtacagagacgagatggaccagcacctgagaggccacgtgatcgtgctgcccgacaacgacccctacgacaacctgtgctacctggtgaccatcttcaccggcagcagatggggcagcggcaccagagccaacgtgttcgtgcagctgagaggcaccgtgagcaccagcgacgtgcactgcctgagccacccccacttcaccaccctgtacagaggcagcatcaacaccttcctgctgaccaccaagagcgacctgggcgacatccacagcatcagagtgtggcacaacaacgagggcagaagccccagctggtacctgagcagaatcaaggtggagaacctgttcagcagacacatctggctgttcatctgccagaagtggctgagcgtggacaccaccctggacagaaccttccacgtgacccaccccgacgagagactgaccagaaaggacttcttcttcatcgacgtgagcagcaacctgagaaagaaccacatgtggttcagcatcttcgccagcgtggtggccaagaccttcaacagactgcagagactgagctgctgcctggccatgctgctgagcagcctgctgtgcaacatcatgttcttcaacctgaacagacaggagcagaccgagagcagagagagaaagtacatgagaagcatgatgatcggcatcgagagcgtgctgatcaccatccccgtgcagctgctgatcaccttcctgttcacctgcagccagagaaagccccaggccgacctgaaggaggtgagcccccagaagcaccccctgatgagcgaggccagcgagcactgggaggagtacctgagaaagtggcacgcctacgagaccgccaaggtgcaccccagagaggtggccaagcccgccagcaagggcaagcccagactgcccaaggccagccccaaggccaccagcaagcccaagcacagacacagaaaggcccagatcaagacccccgagaccctgggccccaacaccaacagcaacaacaacatcgaggacgaccaggacgtgcacagcgagcagcaccccagccagaaggacctgcagcagctgaagaagaagcccagaatcgtgctgccctggtggtgcgtgtacgtggcctggttcctggtgttcgccaccagcagcatcagcagcttcttcatcgtgttctacggcctgacctacggctacgacaagagcatcgagtggctgttcgccagcttctgcagcttctgccagagcgtgctgctggtgcagcccagcaagatcatcctgctgagcggcttcagaaccaacaagcccaagtactgcaagaacctgagctggagcaccaagtacaagtacaccgagatcagactggacggcatgagaatgcaccccgaggagatgcagagaatccacgaccagatcgtgagaatcagaggcaccagaatgtaccagcccctgaccgaggacgagatcagaatcttcaagagaaagaagagaatcaagagaagagccctgctgttcctgagctacatcctgacccacttcatcttcctggccctgctgctgatcctgatcgtgctgctgagacacaccgactgcttctactacaaccagttcatcagagacagattcagcatggacctggccaccgtgaccaagctggaggacatctacagatggctgaacagcgtgctgctgcccctgctgcacaacgacctgaaccccaccttcctgcccgagagcagcagcaagatcctgggcctgcccctgatgagacaggtgagagccaagagcagcgagaagatgtgcctgcccgccgagaagttcgtgcagaacagcatcagaagagagatccactgccaccccaagtacggcatcgaccccgaggacaccaagaactacagcggcttctggaacgaggtggacaagcaggccatcgacgagagcaccaacggcttcacctacaagccccagggcacccagtggctgtactacagctacggcctgctgcacacctacggcagcggcggctacgccctgtacttcttccccgagcagcagagattcaacagcaccctgagactgaaggagctgcaggagagcaactggctggacgagaagacctgggccgtggtgctggagctgaccaccttcaaccccgacatcaacctgttctgcagcatcagcgtgatcttcgaggtgagccagctgggcgtggtgaacaccagcatcagcctgcacagcttcagcctggccgacttcgacagaaaggccagcgccgagatctacctgtacgtggccatcctgatcttcttcctggcctacgtggtggacgagggctgcatcatcatgcaggagagagccagctacgtgagaagcgtgtacaacctgctgaacttcgccctgaagtgcatcttcaccgtgctgatcgtgctgttcctgagaaagcacttcctggccaccggcatcatcagattctacctgagcaaccccgaggacttcatccccttccacgccgtgagccaggtggaccacatcatgagaatcatcctgggcttcctgctgttcctgaccatcctgaagaccctgagatacagcagattcttctacgacgtgagactggcccagagagccatccaggccgccctgcccggcatctgccacatggccttcgtggtgagcgtgtacttcttcgtgtacatggccttcggctacctggtgttcggccagcacgagtggaactacagcaacctgatccacagcacccagaccgtgttcagctactgcgtgagcgccttccagaacaccgagttcagcaacaacagaatcctgggcgtgctgttcctgagcagcttcatgctggtgatgatctgcgtgctgatcaacctgttccaggccgtgatcctgagcgcctacgaggagatgaagcagcccgtgtacgaggagcccagcgacgaggtggaggccatgacctacctgtgcagaaagctgagaaccatgttcagcttcctgaccagccagagcaaggccaaggacgagcccgagttcttcatcgacatgctgtacggccagcccgagaagaacagccacagatacctgggcctgaagaccagaaacatcaacggcaagaagatggtgtacctggtggtgtag

SEQ ID NO: 161568 - protein, 94 aa, Artificial Sequence
  derived and/or modified sequence
MMGLSLASAVLLASLLSLHLGTATRGSDISKTCCFQYSHKPLPWTWVRSYEFTSNSCSQRAVIFTTKRGKKVCTHPRKKWVQKYISLLKTPKQL

SEQ ID NO: 161569 - DNA, 285 bp, Artificial Sequence
  derived and/or modified sequence
atgatgggcctgagcctggccagcgccgtgctgctggccagcctgctgagcctgcacctgggcaccgccaccagaggcagcgacatcagcaagacctgctgcttccagtacagccacaagcccctgccctggacctgggtgagaagctacgagttcaccagcaacagctgcagccagagagccgtgatcttcaccaccaagagaggcaagaaggtgtgcacccaccccagaaagaagtgggtgcagaagtacatcagcctgctgaagacccccaagcagctgtag

SEQ ID NO: 161570 - DNA, 285 bp, Artificial Sequence
  derived and/or modified sequence
atgatgggcctcagcctcgcaagcgccgtgcttctcgccagcctattatcacttcacctgggtaccgccacgcgcggatctgatattagcaagacatgttgtttccagtattcccacaaaccccttccgtggacctgggtaaggtcttacgagtttactagtaatagttgctcacagcgcgccgtcatcttcactacgaaacgtggtaaaaaggtatgcactcatcctcggaagaagtgggttcagaagtacatcagcctcctcaagactccgaaacagttgtag

SEQ ID NO: 161571 - DNA, 285 bp, Artificial Sequence
  derived and/or modified sequence
atgatgggcctgagcctggccagcgctgtgctgctggccagcctgctgagcctgcacctgggcacagccacccggggcagtgacatcagcaagacctgctgcttccagtacagccacaagcccctgccctggacctgggtgcgctcctatgagttcaccagcaacagctgcagccagagagctgtgatcttcaccaccaagaggggcaagaaggtgtgcacccaccccaggaagaagtgggtgcagaagtacatcagcctgctgaagacccccaagcagctgtag

SEQ ID NO: 161572 - DNA, 285 bp, Artificial Sequence
  derived and/or modified sequence
atgatgggcctgagcctggccagcgccgtgctgctggccagcctgctctcactacatctggggaccgccactaggggttctgatattagcaagacctgctgctttcaatatagccacaaacccctaccctggacttgggttcgtagctatgaatttacaagtaattcctgtagccagagagccgtcatcttcacgactaaaagaggcaagaaggtgtgcacccatcccagaaagaaatgggtccagaaatacatcagtctgttgaaaacaccgaagcagctctag

SEQ ID NO: 161573 - DNA, 285 bp, Artificial Sequence
  derived and/or modified sequence
atgatgggcttatccctagccagtgcagttctgttggcctctctgctttcactgcacttagggacagccacgcgcggatctgacatttctaagacatgctgctttcaatattcacataaaccacttccatggacatgggtccggtcatatgagttcaccagtaacagctgctcccagagagcggtgatatttactacaaagcggggaaaaaaagtgtgtacccaccccaggaagaagtgggtgcagaaatatatttcattgcttaagacaccaaaacagctctag

SEQ ID NO: 161574 - DNA, 703 bp, Artificial Sequence
  derived and/or modified sequence
agaacctcagaaatgtgagttatttgggaatggctgtttgtaaatgtccttacgtaagccaagaggaggtcttgacttggggtcccaggggtaccgcagatcccagggactggagcagcactagcaagctctggaggatgagccaggagtctggaattgaggctgagccaaagaccccagggccgtctcagtctcataaaaggggatcaggcaggaggagtttgggagaaacctgagaagggcctgatttgcagcatcatgatgggcctctccttggcctctgctgtgctcctggcctccctcctgagtctccaccttggaactgccacacgtgggagtgacatatccaagacctgctgcttccaatacagccacaagccccttccctggacctgggtgcgaagctatgaattcaccagtaacagctgctcccagcgggctgtgatattcactaccaaaagaggcaagaaagtctgtacccatccaaggaaaaaatgggtgcaaaaatacatttctttactgaaaactccgaaacaattgtgactcagctgaattttcatccgaggacgcttggaccccgctcttggctctgcagccctctggggagcctgcggaatcttttctgaaggctacatggacccgctggggaggagagggtgtttcctcccagagttactttaataaaggttgttcatagagttga

SEQ ID NO: 161575 - DNA, 285 bp, Artificial Sequence
  derived and/or modified sequence
atgatgggactgtccttagccagcgctgttctcctggcgagcttgctttccctgcacctgggcaccgccactagagggtccgatatttccaagacctgctgctttcagtactcccacaagccactaccctggacttgggtgaggagctacgaatttacatctaatagctgctctcagagagctgtgatctttaccaccaagagggggaaaaaggtgtgcactcatcctcgtaagaagtgggttcagaaatacatctcactgctgaagacacccaaacagctatag

SEQ ID NO: 161576 - DNA, 285 bp, Artificial Sequence
  derived and/or modified sequence
atgatggggcttagcctggcatcggctgtactgcttgcaagccttctgtctctgcatctcggtacagctaccagaggctcagacatatctaaaacatgctgcttccagtacagtcataagccactgccctggacatgggtgagatcttacgaatttacctccaatagttgctcacaacgagcagtgatttttaccacaaaacgaggtaaaaaagtgtgtacacatccacgtaagaaatgggtgcaaaagtacatctcactcctgaagactcctaaacagctctag

SEQ ID NO: 161577 - DNA, 285 bp, Artificial Sequence
  derived and/or modified sequence
atgatgggcctgagcctggccagcgccgtgctgctggccagcctgctgagcctgcacctaggcaccgcaactcgaggctccgatatctcaaagacctgttgtttccagtacagtcacaagcctctgccctggacctgggttcgttcatatgagtttacctccaatagctgctcccaacgagccgtgattttcactaccaaaagggggaagaaggtgtgtacacaccctagaaagaaatgggtgcagaaatacatctctttgctgaagacccccaagcagctgtag

SEQ ID NO: 161578 - DNA, 285 bp, Artificial Sequence
  derived and/or modified sequence
atgatgggcctgagcctggccagcgccgtgctgctggccagcctgctgtcccttcacctggggacagcaactagaggcagtgacatttctaaaacctgttgtttccagtattcgcataaaccgttgccttggacgtgggtccgctcgtatgaatttacctccaattcctgctcacagagggccgttattttcaccaccaaacgaggcaagaaagtgtgcacacaccccagaaaaaaatgggtccagaaatatatctctctattaaagactcccaagcaactgtag

SEQ ID NO: 161579 - DNA, 285 bp, Artificial Sequence
  derived and/or modified sequence
atgatgggtctgagtctggcaagcgctgtgctattggcatcattactgagtttgcatctcgggacagctacgagggggtctgatatttctaagacttgttgcttccagtattcacacaagcctctcccctggacatgggtccgtagttacgagttcactagtaactcgtgttctcagagagcggtgattttcaccacgaagcggggaaagaaagtgtgtacccacccacgcaaaaaatgggtccagaagtatatctctctcctcaagacgcccaaacagctctag

SEQ ID NO: 161580 - DNA, 285 bp, Artificial Sequence
  derived and/or modified sequence
atgatgggtctgtccctggcgtccgcagtactcctggcgagtttactgagtttgcaccttggcactgctaccagaggatcggatatctcaaaaacttgttgctttcagtatagccacaaaccgctgccatggacatgggttcggagctatgagtttacctctaattcgtgtagccagagagcagtcatttttacaacaaagagggggaagaaagtatgcacacatcccaggaaaaagtgggttcaaaagtacatctccctgctgaaaacccccaaacagctatag

SEQ ID NO: 161581 - DNA, 285 bp, Artificial Sequence
  derived and/or modified sequence
atgatgggcctttcccttgcatcagccgtgctgctcgcctcactgttgtctcttcatctgggcacagcaaccaggggcagcgacattagtaagacttgttgtttccagtatagccacaaaccattaccatggacctgggtacgatcatacgagttcacaagcaatagctgcagtcagagggctgtgatcttcacgacaaaacgcggaaaaaaagtctgcactcaccctagaaaaaagtgggtccagaaatacatatctcttctaaagacccctaaacaactttag

SEQ ID NO: 161582 - DNA, 526 bp, Artificial Sequence
  derived and/or modified sequence
cagggccgtctcagtctcataaaaggggatcaggcaggaggagtttgggagaaacctgagaagggcctgatttgcagcatcatgatgggcctctccttggcctctgctgtgctcctggcctccctcctgagtctccaccttggaactgccacacgtgggagtgacatatccaagacctgctgcttccaatacagccacaagccccttccctggacctgggtgcgaagctatgaattcaccagtaacagctgctcccagcgggctgtgatattcactaccaaaagaggcaagaaagtctgtacccatccaaggaaaaaatgggtgcaaaaatacatttctttactgaaaactccgaaacaattgtgactcagctgaattttcatccgaggacgcttggaccccgctcttggctctgcagccctctggggagcctgcggaatcttttctgaaggctacatggacccgctggggaggagagggtgtttcctcccagagttactttaataaaggttgttcatagagttga

SEQ ID NO: 161583 - RNA, 285 nt, Artificial Sequence
  derived and/or modified sequence
augaugggccuuucccuugcaucagccgugcugcucgccucacuguugucucuucaucugggcacagcaaccaggggcagcgacauuaguaagacuuguuguuuccaguauagccacaaaccauuaccauggaccuggguacgaucauacgaguucacaagcaauagcugcagucagagggcugugaucuucacgacaaaacgcggaaaaaaagucugcacucacccuagaaaaaaguggguccagaaauacauaucucuucuaaagaccccuaaacaacuuuag

SEQ ID NO: 161584 - protein, 90 aa, Artificial Sequence
  derived and/or modified sequence
MEETTDWIYGFFSLLSDIISSEDEEDDDGDEDTDKGEIDEPPLRKKEIHKDKTEKQEKPERKIQTKDWSANSSTIRTLKLTQLKPIYICT

SEQ ID NO: 161585 - protein, 721 aa, Artificial Sequence
  derived and/or modified sequence
MTEITAEGNASTTTTVIDSKNGSVPKSPGKVLKRTVTEDIVTTFSSPAAWLLVIALIITWSAVAIVMFDLVDYKNFSASSIAKIGSDPLKLVRDAMEETTDWIYGFFSLLSDIISSEDEEDDDGDEDTDKGEIDEPPLRKKEIHKDKTEKQEKPERKIQTKVTHKEKEKGKEKVREKEKPEKKATHKEKIEKKEKPETKTLAKEQKKAKTAEKSEEKTKKEVKGGKQEKVKQTAAKVKEVQKTPSKPKEKEDKEKAAVSKHEQKDQYAFCRYMIDIFVHGDLKPGQSPAIPPPLPTEQASRPTPASPALEEKEGEKKKAEKKVTSETKKKEKEDIKKKSEKETAIDVEKKEPGKASETKQGTVKIAAQAAAKKDEKKEDSKKTKKPAEVEQPKGKKQEKKEKHVEPAKSPKKEHSVPSDKQVKAKTERAKEEIGAVSIKKAVPGKKEEKTTKTVEQEIRKEKSGKTSSILKDKEPIKGKEEKVPASLKEKEPETKKDEKMSKAGKEVKPKPPQLQGKKEEKPEPQIKKEAKPAISEKVQIHKQDIVKPEKTVSHGKPEEKVLKQVKAVTIEKTAKPKPTKKAEHREREPPSIKTDKPKPTPKGTSEVTESGKKKTEISEKESKEKADMKHLREEKVSTRKESLQLHNVTKEDVEDVPASKKAKEGTEDVSPTKQKSPISFFQCVYLDGYNGYGFQFPFTPADRPGESSGQANSPGQKQQGQ

SEQ ID NO: 161586 - protein, 731 aa, Artificial Sequence
  derived and/or modified sequence
IVEIYPQGNASTTTTVIDSKNGSVPKSPGKVLKRTVTEDIVTTFSSPAAWLLVIALIITWSAVAIVMFDLVDYKNFSASSIAKIGSDPLKLVRDAMEETTDWIYGFFSLLSDIISSEDEEDDDGDEDTDKGEIDEPPLRKKEIHKDKTEKQEKPERKIQTKVTHKEKEKGKEKVREKEKPEKKATHKEKIEKKEKPETKTLAKEQKKAKTAEKSEEKTKKEVKGGKQEKVKQTAAKVKEVQKTPSKPKEKEDKEKAAVSKHEQKDQYAFCRYMIDIFVHGDLKPGQSPAIPPPLPTEQASRPTPASPALEEKEGEKKKAEKKVTSETKKKEKEDIKKKSEKETAIDVEKKVQEPGKASETKQGTVKIAAQAAAKKDEKKEDSKKTKKPAEVEQPKGKKQEKKEKHVEPAKSPKKEHSVPSDKQVKAKTERAKEEIGAVSIKKAVPGKKEEKTTKTVEQEIRKEKSGKTSSILKDKEPIKGKEEKVPASLKEKEPETKKDEKMSKAGKEVKPKPPQLQGKKEEKPEPQIKKEAKPAISEKVQIHKQDIVKPEKTVSHGKPEEKVLKQVKAVTIEKTAKPKPTKKAEHREREPPSIKTDKPKPTPKGTSEVTESGKKKTEISEKESKEKADMKHLREEKVSTRKESLQLHNVTKAEEVDSTLEDVEDVPASKKAKEGTEDVSPTKQKSPISFFQCVYLDGYNGYGFQFPFTPADRPGESSGQANSPGQKQQGQ

SEQ ID NO: 161587 - protein, 729 aa, Artificial Sequence
  derived and/or modified sequence
MTEITAEGNASTTTTVIDSKNGSVPKSPGKVLKRTVTEDIVTTFSSPAAWLLVIALIITWSAVAIVMFDLVDYKNFSASSIAKIGSDPLKLVRDAMEETTDWIYGFFSLLSDIISSEDEEDDDGDEDTDKGEIDEPPLRKKEIHKDKTEKQEKPERKIQTKVTHKEKEKGKEKVREKEKPEKKATHKEKIEKKEKPETKTLAKEQKKAKTAEKSEEKTKKEVKGGKQEKVKQTAAKVKEVQKTPSKPKEKEDKEKAAVSKHEQKDQYAFCRYMIDIFVHGDLKPGQSPAIPPPLPTEQASRPTPASPALEEKEGEKKKAEKKVTSETKKKEKEDIKKKSEKETAIDVEKKEPGKASETKQGTVKIAAQAAAKKDEKKEDSKKTKKPAEVEQPKGKKQEKKEKHVEPAKSPKKEHSVPSDKQVKAKTERAKEEIGAVSIKKAVPGKKEEKTTKTVEQEIRKEKSGKTSSILKDKEPIKGKEEKVPASLKEKEPETKKDEKMSKAGKEVKPKPPQLQGKKEEKPEPQIKKEAKPAISEKVQIHKQDIVKPEKTVSHGKPEEKVLKQVKAVTIEKTAKPKPTKKAEHREREPPSIKTDKPKPTPKGTSEVTESGKKKTEISEKESKEKADMKHLREEKVSTRKESLQLHNVTKAEKPARVSKDVEDVPASKKAKEGTEDVSPTKQKSPISFFQCVYLDGYNGYGFQFPFTPADRPGESSGQANSPGQKQQGQ

SEQ ID NO: 161588 - DNA, 2166 bp, Artificial Sequence
  derived and/or modified sequence
atgaccgagatcaccgccgagggcaacgccagcaccaccaccaccgtgatcgacagcaagaacggcagcgtgcccaagagccccggcaaggtgctgaagagaaccgtgaccgaggacatcgtgaccaccttcagcagccccgccgcctggctgctggtgatcgccctgatcatcacctggagcgccgtggccatcgtgatgttcgacctggtggactacaagaacttcagcgccagcagcatcgccaagatcggcagcgaccccctgaagctggtgagagacgccatggaggagaccaccgactggatctacggcttcttcagcctgctgagcgacatcatcagcagcgaggacgaggaggacgacgacggcgacgaggacaccgacaagggcgagatcgacgagccccccctgagaaagaaggagatccacaaggacaagaccgagaagcaggagaagcccgagagaaagatccagaccaaggtgacccacaaggagaaggagaagggcaaggagaaggtgagagagaaggagaagcccgagaagaaggccacccacaaggagaagatcgagaagaaggagaagcccgagaccaagaccctggccaaggagcagaagaaggccaagaccgccgagaagagcgaggagaagaccaagaaggaggtgaagggcggcaagcaggagaaggtgaagcagaccgccgccaaggtgaaggaggtgcagaagacccccagcaagcccaaggagaaggaggacaaggagaaggccgccgtgagcaagcacgagcagaaggaccagtacgccttctgcagatacatgatcgacatcttcgtgcacggcgacctgaagcccggccagagccccgccatccccccccccctgcccaccgagcaggccagcagacccacccccgccagccccgccctggaggagaaggagggcgagaagaagaaggccgagaagaaggtgaccagcgagaccaagaagaaggagaaggaggacatcaagaagaagagcgagaaggagaccgccatcgacgtggagaagaaggagcccggcaaggccagcgagaccaagcagggcaccgtgaagatcgccgcccaggccgccgccaagaaggacgagaagaaggaggacagcaagaagaccaagaagcccgccgaggtggagcagcccaagggcaagaagcaggagaagaaggagaagcacgtggagcccgccaagagccccaagaaggagcacagcgtgcccagcgacaagcaggtgaaggccaagaccgagagagccaaggaggagatcggcgccgtgagcatcaagaaggccgtgcccggcaagaaggaggagaagaccaccaagaccgtggagcaggagatcagaaaggagaagagcggcaagaccagcagcatcctgaaggacaaggagcccatcaagggcaaggaggagaaggtgcccgccagcctgaaggagaaggagcccgagaccaagaaggacgagaagatgagcaaggccggcaaggaggtgaagcccaagcccccccagctgcagggcaagaaggaggagaagcccgagccccagatcaagaaggaggccaagcccgccatcagcgagaaggtgcagatccacaagcaggacatcgtgaagcccgagaagaccgtgagccacggcaagcccgaggagaaggtgctgaagcaggtgaaggccgtgaccatcgagaagaccgccaagcccaagcccaccaagaaggccgagcacagagagagagagccccccagcatcaagaccgacaagcccaagcccacccccaagggcaccagcgaggtgaccgagagcggcaagaagaagaccgagatcagcgagaaggagagcaaggagaaggccgacatgaagcacctgagagaggagaaggtgagcaccagaaaggagagcctgcagctgcacaacgtgaccaaggaggacgtggaggacgtgcccgccagcaagaaggccaaggagggcaccgaggacgtgagccccaccaagcagaagagccccatcagcttcttccagtgcgtgtacctggacggctacaacggctacggcttccagttccccttcacccccgccgacagacccggcgagagcagcggccaggccaacagccccggccagaagcagcagggccagtag

SEQ ID NO: 161589 - DNA, 2196 bp, Artificial Sequence
  derived and/or modified sequence
atcgtggagatctacccccagggcaacgccagcaccaccaccaccgtgatcgacagcaagaacggcagcgtgcccaagagccccggcaaggtgctgaagagaaccgtgaccgaggacatcgtgaccaccttcagcagccccgccgcctggctgctggtgatcgccctgatcatcacctggagcgccgtggccatcgtgatgttcgacctggtggactacaagaacttcagcgccagcagcatcgccaagatcggcagcgaccccctgaagctggtgagagacgccatggaggagaccaccgactggatctacggcttcttcagcctgctgagcgacatcatcagcagcgaggacgaggaggacgacgacggcgacgaggacaccgacaagggcgagatcgacgagccccccctgagaaagaaggagatccacaaggacaagaccgagaagcaggagaagcccgagagaaagatccagaccaaggtgacccacaaggagaaggagaagggcaaggagaaggtgagagagaaggagaagcccgagaagaaggccacccacaaggagaagatcgagaagaaggagaagcccgagaccaagaccctggccaaggagcagaagaaggccaagaccgccgagaagagcgaggagaagaccaagaaggaggtgaagggcggcaagcaggagaaggtgaagcagaccgccgccaaggtgaaggaggtgcagaagacccccagcaagcccaaggagaaggaggacaaggagaaggccgccgtgagcaagcacgagcagaaggaccagtacgccttctgcagatacatgatcgacatcttcgtgcacggcgacctgaagcccggccagagccccgccatccccccccccctgcccaccgagcaggccagcagacccacccccgccagccccgccctggaggagaaggagggcgagaagaagaaggccgagaagaaggtgaccagcgagaccaagaagaaggagaaggaggacatcaagaagaagagcgagaaggagaccgccatcgacgtggagaagaaggtgcaggagcccggcaaggccagcgagaccaagcagggcaccgtgaagatcgccgcccaggccgccgccaagaaggacgagaagaaggaggacagcaagaagaccaagaagcccgccgaggtggagcagcccaagggcaagaagcaggagaagaaggagaagcacgtggagcccgccaagagccccaagaaggagcacagcgtgcccagcgacaagcaggtgaaggccaagaccgagagagccaaggaggagatcggcgccgtgagcatcaagaaggccgtgcccggcaagaaggaggagaagaccaccaagaccgtggagcaggagatcagaaaggagaagagcggcaagaccagcagcatcctgaaggacaaggagcccatcaagggcaaggaggagaaggtgcccgccagcctgaaggagaaggagcccgagaccaagaaggacgagaagatgagcaaggccggcaaggaggtgaagcccaagcccccccagctgcagggcaagaaggaggagaagcccgagccccagatcaagaaggaggccaagcccgccatcagcgagaaggtgcagatccacaagcaggacatcgtgaagcccgagaagaccgtgagccacggcaagcccgaggagaaggtgctgaagcaggtgaaggccgtgaccatcgagaagaccgccaagcccaagcccaccaagaaggccgagcacagagagagagagccccccagcatcaagaccgacaagcccaagcccacccccaagggcaccagcgaggtgaccgagagcggcaagaagaagaccgagatcagcgagaaggagagcaaggagaaggccgacatgaagcacctgagagaggagaaggtgagcaccagaaaggagagcctgcagctgcacaacgtgaccaaggccgaggaggtggacagcaccctggaggacgtggaggacgtgcccgccagcaagaaggccaaggagggcaccgaggacgtgagccccaccaagcagaagagccccatcagcttcttccagtgcgtgtacctggacggctacaacggctacggcttccagttccccttcacccccgccgacagacccggcgagagcagcggccaggccaacagccccggccagaagcagcagggccagtag

SEQ ID NO: 161590 - DNA, 2190 bp, Artificial Sequence
  derived and/or modified sequence
atgaccgagatcaccgccgagggcaacgccagcaccaccaccaccgtgatcgacagcaagaacggcagcgtgcccaagagccccggcaaggtgctgaagagaaccgtgaccgaggacatcgtgaccaccttcagcagccccgccgcctggctgctggtgatcgccctgatcatcacctggagcgccgtggccatcgtgatgttcgacctggtggactacaagaacttcagcgccagcagcatcgccaagatcggcagcgaccccctgaagctggtgagagacgccatggaggagaccaccgactggatctacggcttcttcagcctgctgagcgacatcatcagcagcgaggacgaggaggacgacgacggcgacgaggacaccgacaagggcgagatcgacgagccccccctgagaaagaaggagatccacaaggacaagaccgagaagcaggagaagcccgagagaaagatccagaccaaggtgacccacaaggagaaggagaagggcaaggagaaggtgagagagaaggagaagcccgagaagaaggccacccacaaggagaagatcgagaagaaggagaagcccgagaccaagaccctggccaaggagcagaagaaggccaagaccgccgagaagagcgaggagaagaccaagaaggaggtgaagggcggcaagcaggagaaggtgaagcagaccgccgccaaggtgaaggaggtgcagaagacccccagcaagcccaaggagaaggaggacaaggagaaggccgccgtgagcaagcacgagcagaaggaccagtacgccttctgcagatacatgatcgacatcttcgtgcacggcgacctgaagcccggccagagccccgccatccccccccccctgcccaccgagcaggccagcagacccacccccgccagccccgccctggaggagaaggagggcgagaagaagaaggccgagaagaaggtgaccagcgagaccaagaagaaggagaaggaggacatcaagaagaagagcgagaaggagaccgccatcgacgtggagaagaaggagcccggcaaggccagcgagaccaagcagggcaccgtgaagatcgccgcccaggccgccgccaagaaggacgagaagaaggaggacagcaagaagaccaagaagcccgccgaggtggagcagcccaagggcaagaagcaggagaagaaggagaagcacgtggagcccgccaagagccccaagaaggagcacagcgtgcccagcgacaagcaggtgaaggccaagaccgagagagccaaggaggagatcggcgccgtgagcatcaagaaggccgtgcccggcaagaaggaggagaagaccaccaagaccgtggagcaggagatcagaaaggagaagagcggcaagaccagcagcatcctgaaggacaaggagcccatcaagggcaaggaggagaaggtgcccgccagcctgaaggagaaggagcccgagaccaagaaggacgagaagatgagcaaggccggcaaggaggtgaagcccaagcccccccagctgcagggcaagaaggaggagaagcccgagccccagatcaagaaggaggccaagcccgccatcagcgagaaggtgcagatccacaagcaggacatcgtgaagcccgagaagaccgtgagccacggcaagcccgaggagaaggtgctgaagcaggtgaaggccgtgaccatcgagaagaccgccaagcccaagcccaccaagaaggccgagcacagagagagagagccccccagcatcaagaccgacaagcccaagcccacccccaagggcaccagcgaggtgaccgagagcggcaagaagaagaccgagatcagcgagaaggagagcaaggagaaggccgacatgaagcacctgagagaggagaaggtgagcaccagaaaggagagcctgcagctgcacaacgtgaccaaggccgagaagcccgccagagtgagcaaggacgtggaggacgtgcccgccagcaagaaggccaaggagggcaccgaggacgtgagccccaccaagcagaagagccccatcagcttcttccagtgcgtgtacctggacggctacaacggctacggcttccagttccccttcacccccgccgacagacccggcgagagcagcggccaggccaacagccccggccagaagcagcagggccagtag

SEQ ID NO: 161591 - DNA, 2166 bp, Artificial Sequence
  derived and/or modified sequence
atgaccgagatcacggcagaaggcaatgccagcaccaccaccacagtaatcgattctaagaacggctctgttcccaagtcacctggtaaggtgttgaaaagaaccgtaacggaagatattgtgacaactttcagcagccctgcagcctggctactggtcattgccctgataattacctggtccgccgtggctatcgtgatgttcgatctggtggactacaagaactttagcgcatcatccattgccaagataggtagcgatccactgaaactggtgcgcgacgcaatggaggagaccacggattggatatatggcttcttctccttactttccgacatcattagctccgaggacgaagaagacgatgacggcgacgaggacactgataagggggaaattgacgagcctccattgcggaaaaaggaaatccacaaggataagactgagaagcaggaaaagcctgaacgaaagatccagacgaaagttactcataaggaaaaggaaaaaggtaaggagaaggttagggagaaggaaaaaccagagaaaaaagccacacacaaggagaaaatcgagaaaaaagagaaaccagaaacaaaaaccctggcaaaagaacagaagaaagctaagacggccgagaaatcagaggaaaagacaaaaaaggaagtcaaaggaggaaaacaggagaaagtcaaacaaactgctgccaaggtcaaagaggtccagaaaactccatcaaagcccaaagagaaggaggataaagaaaaggctgccgtgtctaagcatgagcagaaggaccagtacgctttttgtcggtacatgatagatattttcgtacatggcgatctcaagcctggccagtctccggcgatccccccacctctcccgacggagcaggcttcacgcccgacccccgccagtcccgcacttgaagagaaagagggtgagaaaaagaaggcagaaaaaaaagttacctctgagaccaaaaaaaaggaaaaagaggatatcaagaagaagagtgagaaggaaacagccatcgatgtggagaaaaaggagccaggcaaagcctccgaaactaagcagggcactgttaagattgcggctcaggcggccgctaaaaaggatgagaaaaaggaggactcaaaaaagacgaaaaagcccgctgaagtcgagcagccaaaaggtaaaaaacaggaaaagaaggagaagcacgttgagcctgcaaaaagccctaaaaaggagcatagcgtacccagtgataagcaggtgaaggccaagacagagagagccaaagaggaaattggggctgtgtcaataaaaaaagccgttcccggcaagaaggaggagaaaacaacgaagacagtggaacaagagattcgaaaggagaagagcggtaaaacgagtagtatcctgaaagacaaggaaccaattaaaggaaaggaggaaaaggttcccgcctcactaaaagagaaggagcccgagaccaaaaaagatgaaaagatgagcaaagccggcaaagaggtgaagccaaagcctccccagctacagggaaagaaggaagagaagcccgaaccacagattaaaaaagaggctaaacctgcaatctccgagaaagtgcaaatccacaaacaggatatagtgaaacctgagaagacagtcagccacgggaagcctgaggaaaaagtgctgaaacaggttaaggccgttaccatcgaaaagactgccaaaccaaaacctaccaagaaggcggagcaccgcgagcgggagcctccatccattaagaccgataagcccaagccgaccccaaaaggtacctcagaggtgaccgagtcaggaaaaaaaaagaccgagatctctgagaaagagtccaaggaaaaggccgatatgaagcaccttagggaggaaaaggtcagcactcgaaaagaatccttgcagcttcacaacgtgacgaaggaggatgtagaggatgtgcccgcatccaagaaagcaaaggagggaacagaggatgtgtcacccacaaaacagaaaagccctatatctttctttcaatgcgtctatctagacggttataatggatacggatttcagttcccctttacacccgctgatcggccaggtgaaagtagtggccaggccaattctcctggacagaagcagcaagggcagtag

SEQ ID NO: 161592 - DNA, 2196 bp, Artificial Sequence
  derived and/or modified sequence
atcgtagaaatctaccctcaaggaaacgctagcactacaaccacagtcatagattctaagaatgggtctgtacccaagagccccgggaaggttttaaaaaggacggtgaccgaggatattgtgactacattttcatccccagctgcctggcttttggttatcgcccttataattacctggtccgcagtcgcgatagttatgttcgacttggttgattacaaaaattttagtgcctcgagcatagccaagatcggaagcgaccccctgaagctggtgcgagatgccatggaggagaccacagactggatttacgggttcttttccctgctgagtgatatcatctcttctgaggatgaggaagacgatgatggagatgaggacaccgataagggcgaaatcgatgaaccaccactgcgcaaaaaggaaatccataaagataagaccgaaaagcaggaaaagcctgagcggaagatccaaacgaaagtcacgcacaaagagaaagaaaaaggaaaagaaaaagtgcgtgagaaagagaaaccggaaaaaaaagctacgcacaaagaaaagatcgagaagaaagagaaaccagagaccaagaccctggctaaggagcagaaaaaggcaaaaaccgccgagaaaagtgaggaaaagacaaagaaagaggttaaggggggcaagcaagaaaaggtaaagcagacagccgctaaggtaaaggaggtgcagaaaacaccatccaaacccaaggaaaaagaagacaaggaaaaggccgccgtgagcaagcacgagcaaaaggaccaatatgctttctgcagatacatgattgacatctttgtacatggagacttaaagcctgggcagagtccagccattccaccacctctccctacagagcaggcctctaggcctaccccggcttcgccggcactggaggaaaaggaaggagaaaaaaagaaggccgagaaaaaggtgacctctgaaaccaagaaaaaagagaaggaggacatcaaaaagaaatctgagaaagagaccgctatagatgtggagaaaaaagtgcaggagcctggtaaagctagcgagactaagcagggcacagtgaagatcgccgcgcaggctgcggctaaaaaagatgaaaaaaaggaagattcgaaaaagacaaagaaaccagcggaagtggaacaacccaaagggaaaaagcaggaaaagaaagagaagcacgtcgagcccgccaaatcaccgaagaaagaacatagcgtgccctcggacaaacaagttaaagccaaaacagagcgcgctaaagaggagattggcgctgtgagtatcaagaaggctgtaccaggaaaaaaggaagaaaaaacaaccaagactgtcgagcaggagatcagaaaagaaaagtccgggaaaacttctagcatacttaaagataaagaaccgatcaagggaaaggaagagaaggttcctgcgtccctgaaggaaaaagaaccagagactaagaaggatgagaaaatgtccaaggccgggaaagaggttaagccaaagccgcctcagttgcagggcaaaaaggaggagaagcctgagcctcagattaagaaagaggctaaacccgcaataagcgaaaaggtgcagatccacaagcaggatatcgtaaaacccgaaaagacagtctctcacggaaagccggaagagaaggtgctgaaacaagtgaaagcggtgaccatcgagaaaacagctaagcccaagcccacaaagaaggcagagcatagggagagagaacccccctccattaagaccgataagcctaagcccaccccaaaagggacgtccgaggtgactgaatccggcaagaagaagacagaaatttctgagaaggaatctaaggaaaaagctgacatgaaacaccttcgtgaggagaaagtatccacgaggaaggagtctctgcaactgcacaacgtgacaaaagccgaagaggtagactccaccctggaagacgtggaagacgttccggcctctaagaaggctaaggagggaaccgaagacgtgtcaccgaccaaacagaagtcccctataagttttttccagtgcgtgtacttggatggttataacggctacgggtttcaattcccgtttacacctgctgaccgccccggcgagtcatcaggacaggccaattccccaggacagaagcaacagggacagtag

SEQ ID NO: 161593 - DNA, 2190 bp, Artificial Sequence
  derived and/or modified sequence
atgacagagatcacagctgagggaaacgcctccacaaccacgaccgtcatcgatagcaagaatgggtccgtgcctaaatccccagggaaggtgctgaagcgcaccgttaccgaggatatcgtaaccacattttctagcccagcagcttggctactggtgattgcactgatcattacctggtccgcagttgctatcgtcatgtttgacttggtggactacaaaaatttcagcgccagtagcatagctaaaataggctccgacccactaaaactcgtcagagacgcgatggaagagacaactgattggatctatgggtttttctctcttctgtccgacattatcagctcagaagatgaggaagatgatgacggcgatgaggatactgataagggagagatcgacgagcctcccctccgcaagaaagaaattcataaagacaagaccgagaaacaggagaaaccagagcggaaaatccaaacaaaagtgactcacaaagagaaggaaaaggggaaagagaaggtgcgggagaaggaaaaacctgaaaagaaagccacccacaaagaaaagattgagaagaaggaaaaacccgagaccaaaactctcgctaaggaacaaaaaaaggccaagacagccgaaaagtccgaagaaaagaccaagaaagaagtcaaaggaggtaagcaggaaaaagttaaacagaccgctgccaaggtgaaagaggtgcaaaaaaccccatccaaacctaaggagaaagaagataaagaaaaagccgccgtgtctaagcatgagcagaaagaccagtatgcgttttgccggtacatgatcgacatcttcgtgcatggtgacctaaaacctggtcagagtcccgccatacctccccccctacccaccgagcaggccagtcgaccaacccccgcctcacctgccttggaagaaaaggagggcgagaagaagaaagccgagaagaaggtaacctccgaaacgaagaaaaaggaaaaagaggacatcaagaagaaatcagagaaggagaccgcaattgacgttgagaagaaagagcccgggaaggcatctgaaacgaagcaggggacggttaaaatagcggcccaagcagccgcaaagaaggacgagaaaaaagaagacagcaaaaaaacaaagaagccagcggaggttgagcagccaaagggaaaaaaacaggaaaaaaaagaaaaacacgtggaacctgccaagagccccaaaaaggaacactccgtgccttccgataagcaggtcaaggccaagactgagcgcgcaaaagaagaaatcggagccgtcagcataaaaaaggcagtcccaggaaaaaaggaggaaaaaaccaccaagactgtggaacaagagattagaaaggagaaaagcggcaaaaccagttcaattctgaaggacaaagaaccaataaaagggaaggaggaaaaagtccctgctagcctcaaggaaaaggaacctgagactaagaaggatgaaaaaatgagcaaggctgggaaggaggtaaagccaaaaccgcctcaacttcagggcaaaaaagaggaaaaacctgaacctcaaatcaaaaaggaggcgaagccagcgattagcgagaaggttcagattcacaaacaagacattgtgaagcccgaaaaaacagtgagccatggcaagccagaggaaaaagttcttaagcaggtcaaggcggtaacgatcgagaagaccgccaagcccaaaccaactaaaaaagcagagcacagggaaagggaacccccaagtattaaaacggataagcccaagcccacacctaagggaacctccgaggttactgaatccggtaagaaaaaaactgagatcagcgaaaaagagtccaaagagaaagctgacatgaagcacctgagggaagaaaaagtctcaaccaggaaagagtcacttcagcttcataatgtgactaaagccgagaagccggcccgggtttcgaaggacgtggaagacgtgcccgccagcaagaaagccaaagaaggcactgaagacgtaagccccactaagcagaagagcccaatcagtttcttccagtgcgtgtatcttgacggatacaatggatacggcttccaatttcccttcactcctgccgatcggcccggggagagtagcgggcaggccaatagccccgggcagaaacaacaagggcagtag

SEQ ID NO: 161594 - DNA, 2166 bp, Artificial Sequence
  derived and/or modified sequence
atgacagagatcacagctgagggcaatgccagcaccaccaccaccgtgattgacagcaagaatggatctgtgcccaagagccctgggaaggtgctgaagaggacagtgacagaggacatcgtgaccaccttcagcagccctgctgcctggctgctggtgattgccctgatcatcacctggagcgctgtggccatcgtgatgtttgacctggtggactacaagaacttcagcgccagcagcatcgccaagattggaagtgaccccctgaagctggtgagagatgccatggaggagaccacagactggatctacggcttcttcagcctgctgagtgacatcatcagcagtgaagatgaggaggatgatgatggagatgaggacacagacaagggggagattgatgagccccccctgaggaagaaggagatccacaaggacaagacagagaagcaggagaagccagagaggaagatccagaccaaggtgacccacaaggagaaggagaagggcaaggagaaggtgcgggagaaggagaagccagagaagaaggccacccacaaggagaagattgagaagaaggagaagccagagaccaagaccctggccaaggagcagaagaaggccaagacagctgagaagtctgaggagaagaccaagaaggaggtgaagggcggcaagcaggagaaggtgaagcagacagctgccaaggtgaaggaggtgcagaagacccccagcaagcccaaggagaaggaggacaaggagaaggctgctgtgtccaagcatgagcagaaggaccagtatgccttctgccgctacatgattgacatctttgtgcatggagacctgaagccaggccagagccctgccatccccccacccctgcccacagagcaggccagccggcccaccccagccagccctgccctggaggagaaggagggggagaagaagaaggccgagaagaaggtgaccagcgagaccaagaagaaggagaaggaggacatcaagaagaagtctgagaaggagacagccattgatgtggagaagaaggagcccgggaaggccagcgagaccaagcagggcaccgtgaagattgctgcccaggccgccgccaagaaggatgagaagaaggaggacagcaagaagaccaagaagccagctgaggtggagcagcccaagggcaagaagcaggagaagaaggagaagcacgtggagcccgccaagagccccaagaaggagcacagcgtgcccagcgacaagcaggtgaaggccaagacagagcgggccaaggaggagattggagctgtgtccatcaagaaggctgtgcctgggaagaaggaggagaagaccaccaagacagtggagcaggagatcaggaaggagaagagcggcaagaccagcagcatcctgaaggacaaggagcccatcaagggcaaggaggagaaggtgcctgccagcctgaaggagaaggagcctgagaccaagaaggatgagaagatgagcaaggccggcaaggaggtgaagcccaagccaccccagctgcagggcaagaaggaggagaagccagagccccagatcaagaaggaggccaagccagccatcagcgagaaggtgcagatccacaagcaggacatcgtgaagccagagaagacagtgagccacggcaagccagaggagaaggtgctgaagcaggtgaaggctgtgaccatcgagaagacagccaagcccaagcccaccaagaaggccgagcaccgggagcgggagcccccatccatcaagacagacaagcccaagcccacccccaagggcaccagcgaggtgacagagagcggcaagaagaagacagagatcagcgagaaggagagcaaggagaaggctgacatgaagcacctgcgggaggagaaggtgtccaccaggaaggagagcctgcagctgcacaacgtgaccaaggaggatgtggaggatgtgcctgccagcaagaaggccaaggagggcacagaagatgtgagccccaccaagcagaagagccccatctccttcttccagtgtgtgtacctggatggctacaacggctacggcttccagttccccttcaccccagctgacaggcctggagagagcagcggccaggccaacagccctggccagaagcagcagggccagtag

SEQ ID NO: 161595 - DNA, 2196 bp, Artificial Sequence
  derived and/or modified sequence
attgtggagatctacccccagggcaatgccagcaccaccaccaccgtgattgacagcaagaatggatctgtgcccaagagccctgggaaggtgctgaagaggacagtgacagaggacatcgtgaccaccttcagcagccctgctgcctggctgctggtgattgccctgatcatcacctggagcgctgtggccatcgtgatgtttgacctggtggactacaagaacttcagcgccagcagcatcgccaagattggaagtgaccccctgaagctggtgagagatgccatggaggagaccacagactggatctacggcttcttcagcctgctgagtgacatcatcagcagtgaagatgaggaggatgatgatggagatgaggacacagacaagggggagattgatgagccccccctgaggaagaaggagatccacaaggacaagacagagaagcaggagaagccagagaggaagatccagaccaaggtgacccacaaggagaaggagaagggcaaggagaaggtgcgggagaaggagaagccagagaagaaggccacccacaaggagaagattgagaagaaggagaagccagagaccaagaccctggccaaggagcagaagaaggccaagacagctgagaagtctgaggagaagaccaagaaggaggtgaagggcggcaagcaggagaaggtgaagcagacagctgccaaggtgaaggaggtgcagaagacccccagcaagcccaaggagaaggaggacaaggagaaggctgctgtgtccaagcatgagcagaaggaccagtatgccttctgccgctacatgattgacatctttgtgcatggagacctgaagccaggccagagccctgccatccccccacccctgcccacagagcaggccagccggcccaccccagccagccctgccctggaggagaaggagggggagaagaagaaggccgagaagaaggtgaccagcgagaccaagaagaaggagaaggaggacatcaagaagaagtctgagaaggagacagccattgatgtggagaagaaggtgcaggagcccgggaaggccagcgagaccaagcagggcaccgtgaagattgctgcccaggccgccgccaagaaggatgagaagaaggaggacagcaagaagaccaagaagccagctgaggtggagcagcccaagggcaagaagcaggagaagaaggagaagcacgtggagcccgccaagagccccaagaaggagcacagcgtgcccagcgacaagcaggtgaaggccaagacagagcgggccaaggaggagattggagctgtgtccatcaagaaggctgtgcctgggaagaaggaggagaagaccaccaagacagtggagcaggagatcaggaaggagaagagcggcaagaccagcagcatcctgaaggacaaggagcccatcaagggcaaggaggagaaggtgcctgccagcctgaaggagaaggagcctgagaccaagaaggatgagaagatgagcaaggccggcaaggaggtgaagcccaagccaccccagctgcagggcaagaaggaggagaagccagagccccagatcaagaaggaggccaagccagccatcagcgagaaggtgcagatccacaagcaggacatcgtgaagccagagaagacagtgagccacggcaagccagaggagaaggtgctgaagcaggtgaaggctgtgaccatcgagaagacagccaagcccaagcccaccaagaaggccgagcaccgggagcgggagcccccatccatcaagacagacaagcccaagcccacccccaagggcaccagcgaggtgacagagagcggcaagaagaagacagagatcagcgagaaggagagcaaggagaaggctgacatgaagcacctgcgggaggagaaggtgtccaccaggaaggagagcctgcagctgcacaacgtgaccaaggccgaggaggtggacagcaccctggaggatgtggaggatgtgcctgccagcaagaaggccaaggagggcacagaagatgtgagccccaccaagcagaagagccccatctccttcttccagtgtgtgtacctggatggctacaacggctacggcttccagttccccttcaccccagctgacaggcctggagagagcagcggccaggccaacagccctggccagaagcagcagggccagtag

SEQ ID NO: 161596 - DNA, 2190 bp, Artificial Sequence
  derived and/or modified sequence
atgacagagatcacagctgagggcaatgccagcaccaccaccaccgtgattgacagcaagaatggatctgtgcccaagagccctgggaaggtgctgaagaggacagtgacagaggacatcgtgaccaccttcagcagccctgctgcctggctgctggtgattgccctgatcatcacctggagcgctgtggccatcgtgatgtttgacctggtggactacaagaacttcagcgccagcagcatcgccaagattggaagtgaccccctgaagctggtgagagatgccatggaggagaccacagactggatctacggcttcttcagcctgctgagtgacatcatcagcagtgaagatgaggaggatgatgatggagatgaggacacagacaagggggagattgatgagccccccctgaggaagaaggagatccacaaggacaagacagagaagcaggagaagccagagaggaagatccagaccaaggtgacccacaaggagaaggagaagggcaaggagaaggtgcgggagaaggagaagccagagaagaaggccacccacaaggagaagattgagaagaaggagaagccagagaccaagaccctggccaaggagcagaagaaggccaagacagctgagaagtctgaggagaagaccaagaaggaggtgaagggcggcaagcaggagaaggtgaagcagacagctgccaaggtgaaggaggtgcagaagacccccagcaagcccaaggagaaggaggacaaggagaaggctgctgtgtccaagcatgagcagaaggaccagtatgccttctgccgctacatgattgacatctttgtgcatggagacctgaagccaggccagagccctgccatccccccacccctgcccacagagcaggccagccggcccaccccagccagccctgccctggaggagaaggagggggagaagaagaaggccgagaagaaggtgaccagcgagaccaagaagaaggagaaggaggacatcaagaagaagtctgagaaggagacagccattgatgtggagaagaaggagcccgggaaggccagcgagaccaagcagggcaccgtgaagattgctgcccaggccgccgccaagaaggatgagaagaaggaggacagcaagaagaccaagaagccagctgaggtggagcagcccaagggcaagaagcaggagaagaaggagaagcacgtggagcccgccaagagccccaagaaggagcacagcgtgcccagcgacaagcaggtgaaggccaagacagagcgggccaaggaggagattggagctgtgtccatcaagaaggctgtgcctgggaagaaggaggagaagaccaccaagacagtggagcaggagatcaggaaggagaagagcggcaagaccagcagcatcctgaaggacaaggagcccatcaagggcaaggaggagaaggtgcctgccagcctgaaggagaaggagcctgagaccaagaaggatgagaagatgagcaaggccggcaaggaggtgaagcccaagccaccccagctgcagggcaagaaggaggagaagccagagccccagatcaagaaggaggccaagccagccatcagcgagaaggtgcagatccacaagcaggacatcgtgaagccagagaagacagtgagccacggcaagccagaggagaaggtgctgaagcaggtgaaggctgtgaccatcgagaagacagccaagcccaagcccaccaagaaggccgagcaccgggagcgggagcccccatccatcaagacagacaagcccaagcccacccccaagggcaccagcgaggtgacagagagcggcaagaagaagacagagatcagcgagaaggagagcaaggagaaggctgacatgaagcacctgcgggaggagaaggtgtccaccaggaaggagagcctgcagctgcacaacgtgaccaaggccgagaagccagcccgggtgtccaaggatgtggaggatgtgcctgccagcaagaaggccaaggagggcacagaagatgtgagccccaccaagcagaagagccccatctccttcttccagtgtgtgtacctggatggctacaacggctacggcttccagttccccttcaccccagctgacaggcctggagagagcagcggccaggccaacagccctggccagaagcagcagggccagtag

SEQ ID NO: 161597 - DNA, 2166 bp, Artificial Sequence
  derived and/or modified sequence
atgaccgagatcaccgccgagggcaacgccagcaccaccaccaccgtcatcgattctaaaaatggaagtgttcccaagtcaccagggaaggtcttgaagcggactgtcacagaagacatagtgaccaccttctcaagtcccgcggcttggttgctcgtcatcgcccttatcattacgtggagtgcagtggcaatcgtgatgttcgatctcgtggactataagaacttctcagccagcagcatcgcaaagatcggttctgaccctttgaaacttgtgcgggatgccatggaggaaaccaccgactggatctatggattttttagtctgctctccgacataataagctctgaagacgaggaagatgacgatggagatgaggataccgacaagggtgagattgacgagcctcctttaaggaaaaaggaaatacataaggataagactgagaagcaggaaaagcccgagcgcaagattcagaccaaggtgacgcacaaagagaaagagaagggcaaggaaaaagttcgcgagaaggagaagcctgaaaaaaaggccacccacaaagagaagattgagaaaaaagaaaaaccggagaccaagacactggcaaaagagcagaagaaagctaaaactgcagagaaaagtgaagagaaaaccaagaaagaagttaagggaggcaaacaagaaaaagtcaaacagactgctgcaaaagtgaaggaggttcagaagacaccttctaaacctaaagagaaagaagataaagagaaggccgcggtgtctaaacacgaacagaaggaccagtatgccttctgtcgttatatgattgatattttcgtgcacggcgacctgaagcctgggcaatccccagcgatccctccgcccctgcctacggagcaggctagtcgcccaacccccgccagccctgcactggaagagaaggaaggcgagaaaaagaaagccgaaaagaaagttacatctgaaaccaagaaaaaagagaaagaggatatcaaaaaaaagtcggagaaggagacagcgattgacgtggaaaaaaaggaacctgggaaggcctccgaaacaaaacaaggcacagtaaagatcgccgctcaggcggcggcgaaaaaagatgagaagaaagaggacagcaagaagacaaaaaagcctgccgaagtagagcaacctaaaggcaagaaacaggaaaagaaggaaaagcacgtggaacctgcaaagtctcccaagaaagagcattctgtgccctctgacaagcaggtgaaagccaaaaccgagcgggctaaggaagagatcggtgccgtgtctattaaaaaagctgtacccggcaaaaaagaagaaaagaccacgaagaccgtagagcaagaaattcgcaaggagaaatccgggaaaacctcctctatcttgaaggataaagagccaatcaagggtaaagaagagaaggtgcccgcgtcattgaaagagaaggagccggagaccaaaaaggatgagaagatgtccaaggccggcaaagaggtcaaaccaaagcccccccagcttcaaggaaagaaagaggagaagccagagccccagatcaaaaaagaggccaagcctgctatcagcgagaaggtgcaaatacataagcaggacatcgttaagccagagaagacagtgtcccacgggaaacctgaagaaaaggtgttaaaacaggtaaaggcggtgaccatcgagaaaacggcaaagcctaaacccacaaagaaagccgaacatcgtgagcgggagcctccaagtatcaagactgacaaacctaagcctaccccaaaggggactagtgaagtaacagaaagtggcaagaaaaagacagaaattagcgagaaggagagcaaagaaaaagctgacatgaagcatttacgtgaggaaaaggtaagcactagaaaagaatccctgcagctgcacaacgtaaccaaggaagacgtcgaggacgtccccgccagtaagaaggcgaaggaaggaaccgaggatgtttctccaaccaaacagaaaagccctatttcattctttcagtgcgtgtacctggacggatacaacggctatggatttcaattcccgttcacaccagccgacaggcccggagagtcctctggccaggcgaacagtcccgggcagaaacagcaggggcagtag

SEQ ID NO: 161598 - DNA, 2196 bp, Artificial Sequence
  derived and/or modified sequence
atcgtggagatctacccccagggcaacgccagcaccaccaccaccgtcatcgatagcaaaaacggttctgtgcctaagtccccgggaaaagtgctgaaaagaactgtgaccgaggacatcgtaaccactttttccagcccagctgcatggctcttagttatcgcattgatcataacctggagcgccgtggcaatcgtgatgttcgatctggtggattataagaacttctctgcctctagcattgccaagatcggttctgaccccctaaaactcgtccgggacgctatggaggagaccaccgattggatctacggctttttcagtcttcttagcgatattatcagctctgaggatgaggaggacgatgatggggacgaagatacagacaagggcgaaattgacgagccccccctcagaaaaaaggagatccacaaggacaaaacagagaaacaggagaaaccagagcggaagattcagacaaaagtgacgcataaagaaaaagaaaaagggaaggagaaagttagagagaaagaaaaacctgaaaaaaaggctacacacaaagaaaagatcgagaagaaggagaagcctgagactaagacgcttgcaaaggaacaaaaaaaagccaagaccgctgaaaaaagcgaagagaaaactaagaaggaagtgaagggcggaaagcaggaaaaggttaaacagactgcagcgaaggtcaaagaggtgcagaaaactcctagtaagcctaaggagaaggaagataaggagaaggccgcagtctccaaacacgagcaaaaggatcagtatgctttttgtcggtacatgattgatatcttcgtccatggcgacctgaaacctggccagtctcccgccatcccaccgcctctgcccaccgagcaggcatcccggccgaccccagcaagccccgcgctggaggagaaggagggcgaaaagaagaaagcggagaagaaggtaacctccgagaccaaaaaaaaagagaaggaagatatcaagaaaaagagtgaaaaagagacagccatcgacgtggaaaagaaagtccaggaacccggcaaggcctcagaaactaaacaagggacagtgaaaatcgcagcccaggcagccgctaagaaggatgaaaagaaggaggacagcaagaagaccaaaaagcctgctgaagtagaacaacccaaaggcaaaaagcaagagaagaaggaaaaacacgttgagcctgccaagagccccaaaaaggaacattctgttccatcagacaagcaggtcaaagctaagactgaacgtgccaaagaggagatcggcgctgtctctattaaaaaggccgtccccggcaagaaggaagagaagaccacaaaaacagtcgaacaagagatacgtaaagaaaaaagcggaaaaactagctcaattcttaaggacaaggaaccaattaaagggaaggaggaaaaggtgccggcctcgctcaaagagaaggaacctgaaaccaaaaaggacgaaaaaatgtcaaaagccggtaaggaggtcaaaccaaagcccccacagttgcagggtaaaaaggaagagaaaccagagccccagatcaaaaaggaggccaaacccgccatttccgagaaagtgcaaatccataaacaggatatcgtaaagccagagaaaaccgttagccatggtaagcccgaggagaaggtgttgaagcaagttaaggcagtcacgatcgaaaaaacagcaaagcctaagcccacaaagaaggccgagcacagagagcgagagcctcccagtattaagacagacaaacccaaaccaacgccaaagggaacaagcgaggttactgagtcagggaaaaagaaaacagaaattagcgagaaggaatccaaagagaaggcagacatgaagcacttgcgcgaggaaaaggtgtctactagaaaggagtcattgcagttacataatgtaaccaaagctgaggaggtggatagcaccctggaagatgttgaagacgttccggcgagcaagaaagcgaaggagggcactgaggatgttagccctaccaagcagaaaagcccgatctcattttttcagtgtgtgtaccttgatgggtacaatgggtacggcttccaattcccctttactccagccgatagaccgggggaatcgtctgggcaggccaattctccaggccagaagcagcagggccagtag

SEQ ID NO: 161599 - DNA, 2190 bp, Artificial Sequence
  derived and/or modified sequence
atgaccgagatcaccgccgagggcaacgccagcaccaccaccaccgtgattgatagcaagaacggatcagtaccgaagtcacctggaaaggtattaaagcgcaccgtgacagaggacatcgtgacaaccttctcctcaccagcagcctggctcttagtgatcgccctgatcatcacatggagcgctgtggccatcgttatgttcgacctcgtcgattacaagaatttttcagcctcttccattgcgaaaattggctccgacccattgaaactggtgagagatgcaatggaggagactacggactggatatatgggttcttctctctgttgtcagacataattagcagcgaggatgaggaagatgatgatggggatgaggacacggataaaggtgaaatcgatgagccccctctgaggaagaaggaaatccacaaggataaaacggaaaaacaggagaaacccgagcgcaagattcagacaaaggtaacacataaggagaaggaaaaagggaaagagaaggtgcgtgagaaggagaagccagagaagaaggccacgcataaggaaaagattgaaaaaaaagaaaagccagaaaccaaaaccctagccaaagagcagaaaaaggcaaaaaccgcagagaaaagcgaagaaaaaactaagaaggaagtcaaaggcggaaaacaggaaaaagtgaaacaaacagccgccaaggtgaaggaggttcagaaaaccccgtctaaacctaaggaaaaagaagacaaagaaaaagccgccgtgtctaagcacgagcagaaagatcaatatgcattctgccgttatatgattgatatctttgtacatggcgatctgaaaccggggcagtctccagcaatcccacctccactgcccactgaacaggctagccgtcccaccccggcttcccccgccctggaggagaaagaaggcgaaaaaaaaaaagctgaaaaaaaagtcaccagtgagaccaagaaaaaggaaaaggaggatatcaagaagaagagcgagaaggaaacagctatcgatgtagagaagaaagagcctggcaaagcatccgagacaaaacaaggcaccgttaaaattgcagctcaggccgcagccaaaaaagatgaaaaaaaagaagattcgaagaagacaaagaaaccggcggaggtggaacagcccaaagggaagaagcaagagaaaaaagaaaaacacgtggagcctgcgaagtcgcctaagaaagaacacagcgtgcccagcgataagcaagtaaaggcgaagaccgagagagccaaagaggagatcggcgcagtcagcattaagaaggccgtccctggcaaaaaagaagaaaagacaaccaaaacagtcgagcaagagattcggaaagagaagtcagggaaaacgagtagtattctcaaggataaagagcccatcaaaggaaaggaggaaaaagtgccggcatctctgaaggaaaaggagcccgagacaaagaaagatgaaaagatgtccaaagctgggaaggaggtgaagccaaagcctccccagctccagggaaaaaaggaagaaaagcccgaaccccagattaagaaagaagctaagcctgctattagtgaaaaggtgcagatccataagcaggatattgtaaagcctgagaagactgtgtcacacggtaaacctgaggaaaaagtcctgaagcaagtgaaagctgtgactatcgagaaaaccgctaagccaaagccaacaaaaaaagccgaacacagagagcgagagccgcccagcattaaaaccgataagcccaaacctacgccaaaaggcacctccgaagtgactgagtccggcaagaagaaaactgaaatcagcgagaaggagagcaaggagaaggcagacatgaagcacttacgcgaagagaaagtttcaacacgcaaggagtcgctgcagcttcataacgtgacaaaggccgagaagccagcccgtgtatctaaggatgtagaagatgtgccagccagtaagaaggcaaaagagggcactgaggacgtgtcccccaccaagcagaaatcgcccatctcctttttccaatgcgtttatctcgacggatacaacggttatggtttccagttccccttcacccccgccgataggccaggggagtcatcggggcaagctaattcccccggtcagaagcagcagggtcagtag

SEQ ID NO: 161600 - DNA, 2166 bp, Artificial Sequence
  derived and/or modified sequence
atgaccgagattactgccgagggaaatgcatctacaacaacaacagtgatcgatagcaaaaatggctctgtcccgaagtcgccgggtaaggtcctcaaacgcaccgtgaccgaagacattgttaccaccttctcttcaccagccgcatggcttctggtgatcgcactgatcataacctggagcgcggtggcgattgtgatgttcgatctggtagactacaaaaactttagtgctagttcaattgcaaagattggctcagaccctctgaagttggtgcgcgacgccatggaggagaccacagactggatttacggcttcttcagcctgctgagcgacattatctcttccgaggacgaagaggacgatgacggtgatgaagacacagacaaaggagaaatcgatgaaccacctctgaggaagaaggagatccataaagacaagaccgagaaacaggagaaacctgaaaggaagattcagacaaaggtgacacacaaagaaaaggaaaagggcaaggagaaagtaagagagaaagagaaacccgagaaaaaggccacccacaaggagaagatcgagaagaaagagaaacctgagaccaagaccctggcaaaggagcaaaagaaggccaaaaccgctgagaaaagcgaggagaaaaccaaaaaagaggtgaaggggggaaagcaagagaaagtgaaacagactgctgctaaggtgaaggaggttcagaaaactccttccaagcctaaagaaaaggaagacaaggaaaaagctgccgtttccaagcatgagcagaaagatcaatatgcattttgtagatacatgattgatatctttgtgcacggcgatctaaagccaggacagagccccgcaatccctccacctctgcccacggagcaggccagccgacccactcctgctagcccagcccttgaagagaaggaaggagagaaaaagaaggctgagaagaaagtaacctcagagacaaaaaagaaagaaaaggaggacataaagaagaagagtgaaaaagagaccgcaattgatgtggagaagaaagagccaggcaaggcatcagaaaccaagcaggggaccgtgaagattgctgcacaagctgcagcaaagaaggatgagaaaaaggaagactccaaaaaaaccaaaaagccagccgaagtggaacagcccaaagggaaaaagcaagaaaagaaggaaaagcacgtggaacccgctaagtcacctaagaaagaacactctgtgccctcagataagcaagtcaaagcgaagaccgagcgcgcaaaagaagagatcggcgctgtgagcatcaagaaggctgtaccagggaaaaaggaagagaaaactactaagacggtagaacaagagattaggaaagagaaaagcggcaagacgtctagtatactgaaggacaaagaacccattaaggggaaggaagaaaaagtccccgcatcactcaaggaaaaggagcccgaaaccaagaaggatgaaaaaatgagcaaggcagggaaggaggtgaagcccaagccccctcagttacagggtaagaaggaggagaagccggaacctcagataaaaaaggaggccaagcccgcaatcagcgaaaaggtgcagatccataagcaagatatcgtgaagcctgaaaagaccgttagccacggaaagcctgaggaaaaggttcttaaacaggtgaaggctgttacaatcgagaagaccgctaagccgaagccaactaaaaaggcagagcaccgcgagcgagagccaccgagcattaagacagataaacctaaacctacacccaagggcacttccgaggtgactgaaagcggcaagaagaagaccgaaatatccgagaaagagagcaaggaaaaggctgatatgaaacatttgagggaagagaaggtgtccacacgtaaggagtcccttcagcttcacaacgtgactaaggaggacgtagaagatgttcccgctagcaagaaggctaaggaaggtacagaggacgtgtcccccactaagcagaagtcacctatttcatttttccagtgcgtctacctcgatggctacaacggatacggatttcaattcccctttaccccagccgaccgaccgggtgaatccagcggccaggcaaactccccagggcagaaacagcagggccaatag

SEQ ID NO: 161601 - DNA, 2196 bp, Artificial Sequence
  derived and/or modified sequence
atcgtcgagatctatcctcagggcaacgcttctacaaccaccactgttatcgacagcaagaatggttccgtccctaaatctcccggaaaggtgttaaagcgtactgtgaccgaggacatcgtcaccaccttttccagcccggctgcctggctgctggtgattgctttaattataacctggtccgctgtggccattgtcatgtttgatctagtcgactacaagaacttctctgcttctagtatcgccaagattgggagcgacccactgaagctcgtccgcgatgctatggaagaaacaaccgactggatttatggatttttttcactgctctctgacattatctcttccgaggacgaggaagacgacgatggggacgaggatacagataagggtgagatcgacgagcctccccttcggaaaaaagagattcataaggataaaacagagaaacaggagaagccagagagaaaaatccagactaaagtcactcacaaagaaaaagagaagggaaaagagaaagtgcgcgaaaaagagaaacctgagaaaaaagccacccacaaagagaagatcgaaaaaaaagagaaacctgagaccaagaccctagcaaaagaacagaagaaggctaaaaccgcggagaagagcgaagagaagaccaagaaggaggttaagggaggcaaacaggagaaggtgaaacagacagccgctaaagtaaaagaggtacagaaaactccttccaaacctaaagagaaagaagataaagaaaaggccgctgtcagtaagcacgagcagaaggatcaatacgcattttgcaggtatatgatcgacatctttgtccacggcgatctcaaaccgggtcaaagcccagccattcctcccccactccccacagagcaggccagcagaccgactccagcaagccccgctctcgaggagaaggaaggggaaaaaaaaaaggccgagaaaaaggtcacttccgagactaagaagaaggagaaggaagacatcaaaaagaaaagcgagaaggaaactgctatcgacgtcgaaaaaaaggtgcaggagcctggtaaagcctccgaaacgaagcagggtacagtaaaaattgcagcacaggcggctgccaaaaaggacgagaagaaagaggactccaagaagaccaagaagccggcagaggttgaacagcctaagggcaaaaagcaggagaaaaaagaaaaacacgtagaacccgctaaatcacctaagaaggaacacagcgttccctccgataagcaggtgaaagcaaagaccgaacgtgcaaaggaagagatcggcgctgttagtatcaaaaaggccgtccctggtaagaaggaggaaaagacaacaaaaaccgtagagcaggagatacgtaaagaaaagagtggaaagacatcaagcatactcaaagacaaggagccaatcaaaggcaaagaggagaaagtgcctgctagcttaaaagagaaagagccggagaccaagaaggacgaaaagatgtctaaagccggaaaagaagtgaagccgaagccaccacagctgcagggcaaaaaggaagagaagcccgagcctcagatcaaaaaggaggccaaaccagccatatctgagaaagtacagatccataaacaggacatcgtgaaacccgagaaaactgttagccacggaaaacctgaggagaaggttctgaagcaggtgaaagcagtaactatagagaaaaccgctaagccaaaaccgaccaagaaagcagagcaccgcgaaagagagccaccaagcatcaaaactgataagccaaagcccacacccaaaggcacaagcgaggttacggagagcggtaagaaaaagactgaaatttccgaaaaggagtctaaggaaaaggcggatatgaagcacctgcgggaagaaaaagtgtccactcgcaaagaatctctgcagctccacaatgtgaccaaggcagaggaagtcgattcgaccttggaggacgtggaggacgtcccggcaagtaaaaaggccaaagaagggaccgaagatgtgtccccaacaaaacagaagagcccaatctctttcttccagtgcgtgtatctggatggatacaatgggtatggcttccagttcccctttacacctgcggacaggcccggtgagagttcaggccaggccaactcaccaggacaaaaacagcaaggacagtag

SEQ ID NO: 161602 - DNA, 2190 bp, Artificial Sequence
  derived and/or modified sequence
atgactgagatcactgcagaggggaacgcctctacaacaaccaccgtgatcgattccaagaacggcagcgtgcctaagtctcccggaaaggtcctcaaaagaacagtgacagaggacattgtcaccaccttctcatctccagcagcgtggctgcttgtgatcgccctaataataacatggtctgcagtcgccattgtcatgtttgacctcgtcgattacaaaaatttttcagcaagtagtatagcaaaaatcgggtcagacccgctaaagctcgtgagagatgcaatggaagagaccactgattggatttacggcttcttttcactgctgtccgacatcattagttccgaggatgaggaggacgatgatggggatgaagacaccgacaagggggaaatcgatgaacccccactccgtaagaaggaaatccacaaagacaagaccgagaaacaagagaagcctgagcggaagatccagaccaaggtgacgcacaaggagaaagagaaaggcaaagagaaggttcgggagaaagaaaaaccagagaaaaaagccacgcacaaagagaagatagaaaagaaagagaagccagagaccaagaccttggctaaagagcagaagaaggctaagaccgctgaaaaaagcgaagagaaaaccaaaaaggaggttaagggagggaagcaggagaaggtaaagcagacggctgcgaaggtgaaggaagtgcagaaaactccatctaaacctaaagagaaggaagacaaggagaaagccgctgtttccaaacacgaacagaaagaccagtacgcgttctgcagatacatgatcgatattttcgtccacggcgatttgaaaccaggtcagagcccagccattccacctccactcccgacggagcaggcctcccgcccaacccctgctagccctgccctggaagaaaaggagggagaaaagaaaaaggccgagaagaaggtcacctcagagaccaagaaaaaagaaaaagaggatatcaaaaaaaagtccgaaaaggaaaccgcaatcgatgtcgagaagaaagaacccggaaaggcatctgaaaccaagcagggcacagtcaagattgcggcacaggccgctgccaagaaagacgagaaaaaggaggactccaaaaagactaagaaaccggctgaggttgagcagcctaagggcaaaaaacaggaaaaaaaggagaagcacgtcgaacctgctaagtctccaaagaaagaacacagtgtgccgtctgataaacaggttaaggcaaagaccgagcgggcaaaggaggaaattggagcagtaagtatcaaaaaggccgtccccggaaaaaaagaggaaaaaaccactaagactgtggaacaagagattcgaaaagagaagtctggtaagacctcgtccatcttgaaggacaaagagccaattaaaggcaaggaggagaaggtcccggcaagtctcaaagagaaagaacccgaaactaagaaagacgaaaaaatgtccaaagccggaaaggaggtgaaacccaaacctcctcagctgcagggaaaaaaggaggagaagcccgagcctcagattaagaaggaagctaaaccagccatatccgagaaggttcagatccacaaacaggatattgtgaaacccgagaaaaccgtttcacacggtaaaccggaggagaaagtgctaaagcaggttaaagccgtgacgatcgagaaaaccgctaagcccaaaccaaccaaaaaagccgaacatagagaacgagagccccctagcatcaaaaccgacaaacccaaaccaacgcccaagggcactagcgaagtgacagaatccgggaagaagaaaactgaaatttcggagaaagagagcaaagaaaaagccgacatgaaacacctgcgggaagagaaagtgtcaactcgcaaggaaagcctgcagttgcacaatgttaccaaggctgagaaaccggctcgcgtctcgaaggacgttgaggacgtgcctgctagtaagaaagcaaaggaggggactgaagacgtgtccccaacaaagcagaagagccccattagcttttttcagtgtgtatacctcgatggatacaatggatatggcttccaattcccattcactcctgctgaccgaccaggggaatcctctggccaggctaactcccctggtcagaaacaacaagggcagtag

SEQ ID NO: 161603 - DNA, 4746 bp, Artificial Sequence
  derived and/or modified sequence
ctctagagtgccaaaaaagaaaaaaaaaagtgctgaagagtcctagggagatgaggctatttttgtttgaagctgatacttctagctgagccacaagtgctgcttggaaagggcttaggttgtttccagggggagaactctgcagaggagaggcaaagttcaacaggacaacaaagaagcagcagaaacagccaggaaaacgaagagcccccaggttttgacacagaaccctccaccagagttctcaaatccccaaatactctgcaaagtgcaacttgacgggaacttttcaactgacttttacttttgacgaccaccatgactgagatcactgctgaaggaaatgcatctacaaccacaactgtgatagacagcaaaaatggatctgtgcccaaatcccccggaaaagtgctgaagaggacagtcacagaagacatagtgacgacgttcagctcccctgcagcctggcttctggtcattgccctgataatcacgtggtcagctgttgccatcgttatgtttgatttagtggattacaaaaacttttcagcaagctctattgccaagattggctcagatcctttaaaactggtacgtgatgctatggaggaaaccacggactggatctatggcttcttttctttgttatctgacatcatctcatctgaagatgaagaagatgatgatggtgacgaagatactgataaaggagaaatagatgagcctcccttgagaaaaaaagaaatacacaaagataagactgaaaaacaagagaaacctgaaaggaaaatacaaactaaagttacacacaaagaaaaagaaaaaggaaaagaaaaagtaagagaaaaagaaaaacctgaaaagaaagcaactcacaaggaaaaaattgagaaaaaagaaaaaccagaaacaaagacactggcgaaagaacagaagaaagctaagactgcagaaaagagtgaagaaaagactaaaaaggaagtgaaaggtggaaaacaggagaaagtgaagcaaacagctgcaaaagtaaaagaagtacagaaaacaccatcaaaacccaaagaaaaggaggacaaagagaaagcagctgtgtcaaagcatgaacagaaagatcagtatgcattctgtcgatatatgattgacatatttgtccatggggatttaaaaccaggacaaagcccagccattccacctcccttaccgacagaacaagcttccagacccactccggcatcacctgcccttgaagaaaaagaaggggaaaagaagaaggctgagaagaaagttacttctgaaacaaaaaagaaagaaaaagaagatatcaaaaagaaaagtgagaaggaaactgccattgatgtggaaaaaaaagagccgggaaaagcttctgaaaccaaacaagggactgtaaaaattgcagcacaagcagcagctaagaaggatgaaaagaaggaagattccaagaaaacaaaaaaacctgcagaagtagaacaacccaagggaaaaaaacaggaaaagaaagaaaaacatgtggaaccagcaaagtcaccaaagaaagaacactcagttccaagtgacaaacaagtaaaagcaaaaactgaacgagccaaagaggagattggtgcggtttcaattaaaaaagctgtacctggaaagaaggaagagaaaacaaccaagacagtggagcaagaaattagaaaagaaaaatctgggaagacttcttcaattctgaaagataaagaacctattaaagggaaagaagagaaagttccagcttccctaaaggaaaaagaacctgaaactaaaaaagatgaaaagatgtccaaagcaggcaaagaagtcaagcctaaacctccacaactacaaggaaaaaaggaagagaagccagagccccaaattaaaaaagaagcaaaaccagctatatctgaaaaagtgcaaatacacaaacaagacatagtgaaaccagaaaagactgtttctcatggtaaaccagaagaaaaagttctcaagcaggtaaaagctgtcacaatagaaaaaacagccaagcccaaaccaacaaaaaaagctgaacatcgagaaagagaacctccatctataaaaacagacaaaccaaaaccaactccaaaaggaacatcagaagtcacagaatcaggaaagaagaaaactgaaatatctgaaaaagaaagtaaagaaaaagcagacatgaagcatcttagagaagaaaaagtctcaacaagaaaagaaagtcttcaattacacaatgtgacaaaagaagatgttgaagatgtaccagcttcaaagaaagctaaagaaggaactgaagatgtgtctcccacaaagcagaaaagtcccatcagtttcttccagtgtgtctacttggatgggtacaatggctatggatttcagtttcctttcactcctgcagaccgccctggagagagctctggtcaagcaaattctccaggacagaagcaacaaggacagtaaacacacatgtatgacccttacaagtgctttaagattttaaaaatgtgatgttttgtccacagtagttcaggcaattaagaatatgcaacccagagaatttctgtgaaaacattttgctctttggcctggtgtggacggaaagggtggccaaatggattgagtgatgagcagacatgtttaagggtctaagtctcaagaatctgttatgtgtgtttgctgcggtgggagggggtgcttgtatttatcttatttccagtcactataaggttgtacacaaactaatttaaagtttacttaataatggtatctttaaaataattgacacaattgcaaaatgaattcctggcttcagttagctattatttttttaatgacaacatagactgtgctctaagtttaaaagatggggaagcttatataaaagtgacccttttgcatcatatgggtatctaaacttaatttacccaataagttgatgcttaatgattttattttatttttgtctatttctattttagttgtggctttgctctaagaatgggtaatagttgtactacagactgctataaatttcttgtgatactcttttagagctcaaaatatctctgagctttagacatggtaaggtggagagtaaatgcttgataaatctttaagatatgtcttgaatgataattaggacattcagtccagtggaaatacaccattcaattagtcaggtctggtgaatcgtttgtttaaaatattagcaaatgagatgtggaattctgaaatttctccagactgtgtcttaataaaaatgtcacctgggtgaaattttagatcaatcactaaatttgggtgacaaatataaaaatattttcatttcactttaatacattctttctgtgaagtaaaatgtttttctttctcataatggcaaaatatgaatgccatcaaagtttaaggaattcattttagccttaaatgccttcgtgagatgtcttacttgtattttaggtaactggtcatcagtgccaatgacatggataacaatttttaatctactcgacagtgcatccctgggaatgactgttatgtttttgtcatattcctggtaatataaatactcgtgttctttactacattgtttttatcaactctaaaagtcatgcctctgtgacctttatcatgtttacaattgcaactgaacttatgacaaattaactcaggaaataaattgagttatcctttctagcattgtaattaccatcagcaaggcctgagatagccagagccaatactagccaagtgatttattttcaaggattgccactaactacggttctttaggaccaagatataaaacagtcactaaaaatcattaggctaggtatcagtaatacattcattactaataatgcatttttggagacttttgtgaaagaagttggtctctgccaaaagctggtggaccacattcacaccacgaaagccagtgtcacatgaaccagattaatgactctctttatggggtatgtgggacatcctggaagtgtataatttcaggaatgaccagacaataccatcttgcaaagccccttcaggtgacaatctaaacttgtgggtaggagagtgcataaagtttattgctcaactgctcctccagcctgctgaatttactgagtaaagaaatagcaaatatgatagatgttttagatttcatagaacagaatggtttgtccattaattctttcattcaatgactgtttattgaatacctactcttttagggcgctgtgttaggtgctgtattgtacaagaaaaatataataaattagattcccagcgctattctgacatagtgaatgaccttgaaaaatttactaaacatactatgtttgtttctccatgagtaaaatagggatatagggacaaacagtctaatatctcatagaaataccatggagacaaataaaatattttaatataaatatgatattaaagtaaatttctgaagtaatacttttgggtatggcactagtttttcctctgactattttactgtttctttcactctcaatataaaaactatttgataagataaaacgatatattttattgtaattagaatttagacaaatcagctataatgtaaaaatgttaataataattacgttttatctgattaaagttacaatgatcatagcactttaaaaatattatctgaactgtcatttgtttatatattaccgtctaataaaatagttatagatcttccaa

SEQ ID NO: 161604 - DNA, 4459 bp, Artificial Sequence
  derived and/or modified sequence
atcgtggaaatctatcctcaaggaaatgcatctacaaccacaactgtgatagacagcaaaaatggatctgtgcccaaatcccccggaaaagtgctgaagaggacagtcacagaagacatagtgacgacgttcagctcccctgcagcctggcttctggtcattgccctgataatcacgtggtcagctgttgccatcgttatgtttgatttagtggattacaaaaacttttcagcaagctctattgccaagattggctcagatcctttaaaactggtacgtgatgctatggaggaaaccacggactggatctatggcttcttttctttgttatctgacatcatctcatctgaagatgaagaagatgatgatggtgacgaagatactgataaaggagaaatagatgagcctcccttgagaaaaaaagaaatacacaaagataagactgaaaaacaagagaaacctgaaaggaaaatacaaactaaagttacacacaaagaaaaagaaaaaggaaaagaaaaagtaagagaaaaagaaaaacctgaaaagaaagcaactcacaaggaaaaaattgagaaaaaagaaaaaccagaaacaaagacactggcgaaagaacagaagaaagctaagactgcagaaaagagtgaagaaaagactaaaaaggaagtgaaaggtggaaaacaggagaaagtgaagcaaacagctgcaaaagtaaaagaagtacagaaaacaccatcaaaacccaaagaaaaggaggacaaagagaaagcagctgtgtcaaagcatgaacagaaagatcagtatgcattctgtcgatatatgattgacatatttgtccatggggatttaaaaccaggacaaagcccagccattccacctcccttaccgacagaacaagcttccagacccactccggcatcacctgcccttgaagaaaaagaaggggaaaagaagaaggctgagaagaaagttacttctgaaacaaaaaagaaagaaaaagaagatatcaaaaagaaaagtgagaaggaaactgccattgatgtggaaaaaaaagtccaagagccgggaaaagcttctgaaaccaaacaagggactgtaaaaattgcagcacaagcagcagctaagaaggatgaaaagaaggaagattccaagaaaacaaaaaaacctgcagaagtagaacaacccaagggaaaaaaacaggaaaagaaagaaaaacatgtggaaccagcaaagtcaccaaagaaagaacactcagttccaagtgacaaacaagtaaaagcaaaaactgaacgagccaaagaggagattggtgcggtttcaattaaaaaagctgtacctggaaagaaggaagagaaaacaaccaagacagtggagcaagaaattagaaaagaaaaatctgggaagacttcttcaattctgaaagataaagaacctattaaagggaaagaagagaaagttccagcttccctaaaggaaaaagaacctgaaactaaaaaagatgaaaagatgtccaaagcaggcaaagaagtcaagcctaaacctccacaactacaaggaaaaaaggaagagaagccagagccccaaattaaaaaagaagcaaaaccagctatatctgaaaaagtgcaaatacacaaacaagacatagtgaaaccagaaaagactgtttctcatggtaaaccagaagaaaaagttctcaagcaggtaaaagctgtcacaatagaaaaaacagccaagcccaaaccaacaaaaaaagctgaacatcgagaaagagaacctccatctataaaaacagacaaaccaaaaccaactccaaaaggaacatcagaagtcacagaatcaggaaagaagaaaactgaaatatctgaaaaagaaagtaaagaaaaagcagacatgaagcatcttagagaagaaaaagtctcaacaagaaaagaaagtcttcaattacacaatgtgacaaaagcagaggaagtggacagtactctagaagatgttgaagatgtaccagcttcaaagaaagctaaagaaggaactgaagatgtgtctcccacaaagcagaaaagtcccatcagtttcttccagtgtgtctacttggatgggtacaatggctatggatttcagtttcctttcactcctgcagaccgccctggagagagctctggtcaagcaaattctccaggacagaagcaacaaggacagtaaacacacatgtatgacccttacaagtgctttaagattttaaaaatgtgatgttttgtccacagtagttcaggcaattaagaatatgcaacccagagaatttctgtgaaaacattttgctctttggcctggtgtggacggaaagggtggccaaatggattgagtgatgagcagacatgtttaagggtctaagtctcaagaatctgttatgtgtgtttgctgcggtgggagggggtgcttgtatttatcttatttccagtcactataaggttgtacacaaactaatttaaagtttacttaataatggtatctttaaaataattgacacaattgcaaaatgaattcctggcttcagttagctattatttttttaatgacaacatagactgtgctctaagtttaaaagatggggaagcttatataaaagtgacccttttgcatcatatgggtatctaaacttaatttacccaataagttgatgcttaatgattttattttatttttgtctatttctattttagttgtggctttgctctaagaatgggtaatagttgtactacagactgctataaatttcttgtgatactcttttagagctcaaaatatctctgagctttagacatggtaaggtggagagtaaatgcttgataaatctttaagatatgtcttgaatgataattaggacattcagtccagtggaaatacaccattcaattagtcaggtctggtgaatcgtttgtttaaaatattagcaaatgagatgtggaattctgaaatttctccagactgtgtcttaataaaaatgtcacctgggtgaaattttagatcaatcactaaatttgggtgacaaatataaaaatattttcatttcactttaatacattctttctgtgaagtaaaatgtttttctttctcataatggcaaaatatgaatgccatcaaagtttaaggaattcattttagccttaaatgccttcgtgagatgtcttacttgtattttaggtaactggtcatcagtgccaatgacatggataacaatttttaatctactcgacagtgcatccctgggaatgactgttatgtttttgtcatattcctggtaatataaatactcgtgttctttactacattgtttttatcaactctaaaagtcatgcctctgtgacctttatcatgtttacaattgcaactgaacttatgacaaattaactcaggaaataaattgagttatcctttctagcattgtaattaccatcagcaaggcctgagatagccagagccaatactagccaagtgatttattttcaaggattgccactaactacggttctttaggaccaagatataaaacagtcactaaaaatcattaggctaggtatcagtaatacattcattactaataatgcatttttggagacttttgtgaaagaagttggtctctgccaaaagctggtggaccacattcacaccacgaaagccagtgtcacatgaaccagattaatgactctctttatggggtatgtgggacatcctggaagtgtataatttcaggaatgaccagacaataccatcttgcaaagccccttcaggtgacaatctaaacttgtgggtaggagagtgcataaagtttattgctcaactgctcctccagcctgctgaatttactgagtaaagaaatagcaaatatgatagatgttttagatttcatagaacagaatggtttgtccattaattctttcattcaatgactgtttattgaatacctactcttttagggcgctgtgttaggtgctgtattgtacaagaaaaatataataaattagattcccagcgctattctgacatagtgaatgaccttgaaaaatttactaaacatactatgtttgtttctccatgagtaaaatagggatatagggacaaacagtctaatatctcatagaaataccatggagacaaataaaatattttaatataaatatgatattaaagtaaatttctgaagtaatacttttgggtatggcactagtttttcctctgactattttactgtttctttcactctcaatataaaaactatttgataagataaaacgatatattttattgtaattagaatttagacaaatcagctataatgtaaaaatgttaataataattacgttttatctgattaaagttacaatgatcatagcactttaaaaatattatctgaactgtcatttgtttatatattaccgtctaataaaatagttatagatcttccaag

SEQ ID NO: 161605 - DNA, 4475 bp, Artificial Sequence
  derived and/or modified sequence
acttttacttttgacgaccaccatgactgagatcactgctgaaggaaatgcatctacaaccacaactgtgatagacagcaaaaatggatctgtgcccaaatcccccggaaaagtgctgaagaggacagtcacagaagacatagtgacgacgttcagctcccctgcagcctggcttctggtcattgccctgataatcacgtggtcagctgttgccatcgttatgtttgatttagtggattacaaaaacttttcagcaagctctattgccaagattggctcagatcctttaaaactggtacgtgatgctatggaggaaaccacggactggatctatggcttcttttctttgttatctgacatcatctcatctgaagatgaagaagatgatgatggtgacgaagatactgataaaggagaaatagatgagcctcccttgagaaaaaaagaaatacacaaagataagactgaaaaacaagagaaacctgaaaggaaaatacaaactaaagttacacacaaagaaaaagaaaaaggaaaagaaaaagtaagagaaaaagaaaaacctgaaaagaaagcaactcacaaggaaaaaattgagaaaaaagaaaaaccagaaacaaagacactggcgaaagaacagaagaaagctaagactgcagaaaagagtgaagaaaagactaaaaaggaagtgaaaggtggaaaacaggagaaagtgaagcaaacagctgcaaaagtaaaagaagtacagaaaacaccatcaaaacccaaagaaaaggaggacaaagagaaagcagctgtgtcaaagcatgaacagaaagatcagtatgcattctgtcgatatatgattgacatatttgtccatggggatttaaaaccaggacaaagcccagccattccacctcccttaccgacagaacaagcttccagacccactccggcatcacctgcccttgaagaaaaagaaggggaaaagaagaaggctgagaagaaagttacttctgaaacaaaaaagaaagaaaaagaagatatcaaaaagaaaagtgagaaggaaactgccattgatgtggaaaaaaaagagccgggaaaagcttctgaaaccaaacaagggactgtaaaaattgcagcacaagcagcagctaagaaggatgaaaagaaggaagattccaagaaaacaaaaaaacctgcagaagtagaacaacccaagggaaaaaaacaggaaaagaaagaaaaacatgtggaaccagcaaagtcaccaaagaaagaacactcagttccaagtgacaaacaagtaaaagcaaaaactgaacgagccaaagaggagattggtgcggtttcaattaaaaaagctgtacctggaaagaaggaagagaaaacaaccaagacagtggagcaagaaattagaaaagaaaaatctgggaagacttcttcaattctgaaagataaagaacctattaaagggaaagaagagaaagttccagcttccctaaaggaaaaagaacctgaaactaaaaaagatgaaaagatgtccaaagcaggcaaagaagtcaagcctaaacctccacaactacaaggaaaaaaggaagagaagccagagccccaaattaaaaaagaagcaaaaccagctatatctgaaaaagtgcaaatacacaaacaagacatagtgaaaccagaaaagactgtttctcatggtaaaccagaagaaaaagttctcaagcaggtaaaagctgtcacaatagaaaaaacagccaagcccaaaccaacaaaaaaagctgaacatcgagaaagagaacctccatctataaaaacagacaaaccaaaaccaactccaaaaggaacatcagaagtcacagaatcaggaaagaagaaaactgaaatatctgaaaaagaaagtaaagaaaaagcagacatgaagcatcttagagaagaaaaagtctcaacaagaaaagaaagtcttcaattacacaatgtgacaaaagcagaaaaacctgcaagagtatcaaaagatgttgaagatgtaccagcttcaaagaaagctaaagaaggaactgaagatgtgtctcccacaaagcagaaaagtcccatcagtttcttccagtgtgtctacttggatgggtacaatggctatggatttcagtttcctttcactcctgcagaccgccctggagagagctctggtcaagcaaattctccaggacagaagcaacaaggacagtaaacacacatgtatgacccttacaagtgctttaagattttaaaaatgtgatgttttgtccacagtagttcaggcaattaagaatatgcaacccagagaatttctgtgaaaacattttgctctttggcctggtgtggacggaaagggtggccaaatggattgagtgatgagcagacatgtttaagggtctaagtctcaagaatctgttatgtgtgtttgctgcggtgggagggggtgcttgtatttatcttatttccagtcactataaggttgtacacaaactaatttaaagtttacttaataatggtatctttaaaataattgacacaattgcaaaatgaattcctggcttcagttagctattatttttttaatgacaacatagactgtgctctaagtttaaaagatggggaagcttatataaaagtgacccttttgcatcatatgggtatctaaacttaatttacccaataagttgatgcttaatgattttattttatttttgtctatttctattttagttgtggctttgctctaagaatgggtaatagttgtactacagactgctataaatttcttgtgatactcttttagagctcaaaatatctctgagctttagacatggtaaggtggagagtaaatgcttgataaatctttaagatatgtcttgaatgataattaggacattcagtccagtggaaatacaccattcaattagtcaggtctggtgaatcgtttgtttaaaatattagcaaatgagatgtggaattctgaaatttctccagactgtgtcttaataaaaatgtcacctgggtgaaattttagatcaatcactaaatttgggtgacaaatataaaaatattttcatttcactttaatacattctttctgtgaagtaaaatgtttttctttctcataatggcaaaatatgaatgccatcaaagtttaaggaattcattttagccttaaatgccttcgtgagatgtcttacttgtattttaggtaactggtcatcagtgccaatgacatggataacaatttttaatctactcgacagtgcatccctgggaatgactgttatgtttttgtcatattcctggtaatataaatactcgtgttctttactacattgtttttatcaactctaaaagtcatgcctctgtgacctttatcatgtttacaattgcaactgaacttatgacaaattaactcaggaaataaattgagttatcctttctagcattgtaattaccatcagcaaggcctgagatagccagagccaatactagccaagtgatttattttcaaggattgccactaactacggttctttaggaccaagatataaaacagtcactaaaaatcattaggctaggtatcagtaatacattcattactaataatgcatttttggagacttttgtgaaagaagttggtctctgccaaaagctggtggaccacattcacaccacgaaagccagtgtcacatgaaccagattaatgactctctttatggggtatgtgggacatcctggaagtgtataatttcaggaatgaccagacaataccatcttgcaaagccccttcaggtgacaatctaaacttgtgggtaggagagtgcataaagtttattgctcaactgctcctccagcctgctgaatttactgagtaaagaaatagcaaatatgatagatgttttagatttcatagaacagaatggtttgtccattaattctttcattcaatgactgtttattgaatacctactcttttagggcgctgtgttaggtgctgtattgtacaagaaaaatataataaattagattcccagcgctattctgacatagtgaatgaccttgaaaaatttactaaacatactatgtttgtttctccatgagtaaaatagggatatagggacaaacagtctaatatctcatagaaataccatggagacaaataaaatattttaatataaatatgatattaaagtaaatttctgaagtaatacttttgggtatggcactagtttttcctctgactattttactgtttctttcactctcaatataaaaactatttgataagataaaacgatatattttattgtaattagaatttagacaaatcagctataatgtaaaaatgttaataataattacgttttatctgattaaagttacaatgatcatagcactttaaaaatattatctgaactgtcatttgtttatatattaccgtctaataaaatagttatagatcttccaag

SEQ ID NO: 161606 - protein, 498 aa, Artificial Sequence
  derived and/or modified sequence
MDFSVKVDIEKEVTCPICLELLTEPLSLDCGHSFCQACITAKIKESVIISRGESSCPVCQTRFQPGNLRPNRHLANIVERVKEVKMSPQEGQKRDVCEHHGKKLQIFCKEDGKVICWVCELSQEHQGHQTFRINEVVKECQEKLQVALQRLIKEDQEAEKLEDDIRQERTAWKNYIQIERQKILKGFNEMRVILDNEEQRELQKLEEGEVNVLDNLAAATDQLVQQRQDASTLISDLQRRLRGSSVEMLQDVIDVMKRSESWTLKKPKSVSKKLKSVFRVPDLSGMLQVLKELTDVQYYWVDVMLNPGSATSNVAISVDQRQVKTVRTCTFKNSNPCDFSAFGVFGCQYFSSGKYYWEVDVSGKIAWILGVHSKISSLNKRKSSGFAFDPSVNYSKVYSRYRPQYGYWVIGLQNTCEYNAFEDSSSSDPKVLTLFMAVPPCRIGVFLDYEAGIVSFFNVTNHGALIYKFSGCRFSRPAYPYFNPWNCLVPMTVCPPSS

SEQ ID NO: 161607 - protein, 227 aa, Artificial Sequence
  derived and/or modified sequence
MDFSVKVDIEKEVTCPICLELLTEPLSLDCGHSFCQACITAKIKESVIISRGESSCPVCQTRFQPGNLRPNRHLANIVERVKEVKMSPQEGQKRDVCEHHGKKLQIFCKEDGKVICWVCELSQEHQGHQTFRINEVVKECQEKLQVALQRLIKEDQEAEKLEDDIRQERTAWKNYIQIERQKILKGFNEMRVILDNEEQRELQKLEEGEVNVLDNLAAATDQLVQQR

SEQ ID NO: 161608 - protein, 203 aa, Artificial Sequence
  derived and/or modified sequence
MDFSVKVDIEKEVTCPICLELLTEPLSLDCGHSFCQACITAKIKESVIISRGESSCPVCQTRFQPGNLRPNRHLANIVERVKEVKMSPQEGQKRDVCEHHGKKLQIFCKEDGKVICWVCELSQEHQGHQTFRINEVVKECQEKLQVALQRLIKEDQEAEKLEDDIRQERTAWKNYIQIERQKILKGFNEMRVILDNEEQRELQ

SEQ ID NO: 161609 - DNA, 3015 bp, Artificial Sequence
  derived and/or modified sequence
cagggtttattgttatgtaagttcttgttcagcttcctttgttttctttcacttctgagaatttaactttcgtttctcactcagctcctgtggggaaactcatttgtggagaccagccctctggcttggtgagtgaatctggtttacaccggctcctgccctgccttcactcttctcccctgattcaagactcctctgctttggactgaagcactgcaggagtttgtgaccaagaacttcaagagtcaagacagaaggaagccaagggagcagtgcaatggatttctcagtaaaggtagacatagagaaggaggtgacctgccccatctgcctggagctcctgacagaacctctgagcctagattgtggccacagcttctgccaagcctgcatcactgcaaagatcaaggagtcagtgatcatctcaagaggggaaagcagctgtcctgtgtgtcagaccagattccagcctgggaacctccgacctaatcggcatctggccaacatagttgagagagtcaaagaggtcaagatgagcccacaggaggggcagaagagagatgtctgtgagcaccatggaaaaaaactccagatcttctgtaaggaggatggaaaagtcatttgctgggtttgtgaactgtctcaggaacaccaaggtcaccaaacattccgcataaacgaggtggtcaaggaatgtcaggaaaagctgcaggtagccctgcagaggctgataaaggaggatcaagaggctgagaagctggaagatgacatcagacaagagagaaccgcctggaagaattatatccagatcgagagacagaagattctgaaagggttcaatgaaatgagagtcatcttggacaatgaggagcagagagagctgcaaaagctggaggaaggtgaggtgaatgtgctggataacctggcagcagctacagaccagctggtccagcagaggcaggatgccagcacgctcatctcagatctccagcggaggttgaggggatcgtcagtagagatgctgcaggatgtgattgacgtcatgaaaaggagtgaaagctggacattgaagaagccaaaatctgtttccaagaaactaaagagtgtattccgagtaccagatctgagtgggatgctgcaagttcttaaagagctgacagatgtccagtactactgggtggacgtgatgctgaatccaggcagtgccacttcgaatgttgctatttctgtggatcagagacaagtgaaaactgtacgcacctgcacatttaagaattcaaatccatgtgatttttctgcttttggtgtcttcggctgccaatatttctcttcggggaaatattactgggaagtagatgtgtctggaaagattgcctggatcctgggcgtacacagtaaaataagtagtctgaataaaaggaagagctctgggtttgcttttgatccaagtgtaaattattcaaaagtttactccagatatagacctcaatatggctactgggttataggattacagaatacatgtgaatataatgcttttgaggactcctcctcttctgatcccaaggttttgactctctttatggctgtgcctccctgtcgtattggggttttcctagactatgaggcaggcattgtctcatttttcaatgtcacaaaccacggagcactcatctacaagttctctggatgtcgcttttctcgacctgcttatccgtatttcaatccttggaactgcctagtccccatgactgtgtgcccaccgagctcctgagtgttctcattcctttacccacttctgcatagtagcccttgtgctgagactcagattctgcacctgagttcatctctactgagaccatctcttcctttctttccccttcttttacttagaatgtctttgtattcatttgctagggcttccatagcaaagcatcatagattgctgatttaaactgtaattgtattgccgtactgtgggctggaaatcccaaatctagattccagcagagttggttctttctgaggtctgcaaggaagggctctgttccatgcctctctccttggcttgtagaaggcatcttgtccctatgactcttcacattgtctttatgtacatctctgtgcccaagttttccctttttattaagacaccagtcatactggctcagggcccaccgctaatgccttaatgaaatcattttaacattatattctctacaaagaccttatttccaaataagataatatttggaggtattgggaataaaaactccaacatataaatttgaggaaggcacgatttcactcataacaatcttaccctttcttgcaagagatgcttgtacattattttcctaataccttggtttcactagtagtaaacattattattttttttatatttgcaaaggaaacatatctaatccttcctatagaaagaacagtattgctgtaattccttttcttttcttcctcatttcctctgccccttaaaagattgaagaaagagaaacttgtcaactcatatccacgttatctagcaaagtacataagaatctatcactaagtaatgtatccttcagaatgtgttggtttaccagtgacaccccatattcatcacaaaattaaagcaagaagtccatagtaatttatttgctaatagtggatttttaatgctcagagtttctgaggtcaaattttatcttttcacttacaagctctatgatcttaaataatttacttaatgtattttggtgtattttcctcaaattaatattggtgttcaagactatatctaattcctctgatcactttgagaaacaaacttttattaaatgtaaggcacttttctatgaattttaaatataaaaataaatattgttctgattattactgaaaagatgtcagccatttcaatgtcttgggaaacaattttttgtttttgttctgttttctttttgcttcaataaaacaatagctggctctaaaaaaaaaaaaaaaaaaaaaaaaaaa

SEQ ID NO: 161610 - DNA, 1497 bp, Artificial Sequence
  derived and/or modified sequence
atggacttcagcgtgaaggtggacatcgagaaggaggtgacctgccccatctgcctggagctgctgaccgagcccctgagcctggactgcggccacagcttctgccaggcctgcatcaccgccaagatcaaggagagcgtgatcatcagcagaggcgagagcagctgccccgtgtgccagaccagattccagcccggcaacctgagacccaacagacacctggccaacatcgtggagagagtgaaggaggtgaagatgagcccccaggagggccagaagagagacgtgtgcgagcaccacggcaagaagctgcagatcttctgcaaggaggacggcaaggtgatctgctgggtgtgcgagctgagccaggagcaccagggccaccagaccttcagaatcaacgaggtggtgaaggagtgccaggagaagctgcaggtggccctgcagagactgatcaaggaggaccaggaggccgagaagctggaggacgacatcagacaggagagaaccgcctggaagaactacatccagatcgagagacagaagatcctgaagggcttcaacgagatgagagtgatcctggacaacgaggagcagagagagctgcagaagctggaggagggcgaggtgaacgtgctggacaacctggccgccgccaccgaccagctggtgcagcagagacaggacgccagcaccctgatcagcgacctgcagagaagactgagaggcagcagcgtggagatgctgcaggacgtgatcgacgtgatgaagagaagcgagagctggaccctgaagaagcccaagagcgtgagcaagaagctgaagagcgtgttcagagtgcccgacctgagcggcatgctgcaggtgctgaaggagctgaccgacgtgcagtactactgggtggacgtgatgctgaaccccggcagcgccaccagcaacgtggccatcagcgtggaccagagacaggtgaagaccgtgagaacctgcaccttcaagaacagcaacccctgcgacttcagcgccttcggcgtgttcggctgccagtacttcagcagcggcaagtactactgggaggtggacgtgagcggcaagatcgcctggatcctgggcgtgcacagcaagatcagcagcctgaacaagagaaagagcagcggcttcgccttcgaccccagcgtgaactacagcaaggtgtacagcagatacagaccccagtacggctactgggtgatcggcctgcagaacacctgcgagtacaacgccttcgaggacagcagcagcagcgaccccaaggtgctgaccctgttcatggccgtgcccccctgcagaatcggcgtgttcctggactacgaggccggcatcgtgagcttcttcaacgtgaccaaccacggcgccctgatctacaagttcagcggctgcagattcagcagacccgcctacccctacttcaacccctggaactgcctggtgcccatgaccgtgtgcccccccagcagctag

SEQ ID NO: 161611 - DNA, 684 bp, Artificial Sequence
  derived and/or modified sequence
atggacttcagcgtgaaggtggacatcgagaaggaggtgacctgccccatctgcctggagctgctgaccgagcccctgagcctggactgcggccacagcttctgccaggcctgcatcaccgccaagatcaaggagagcgtgatcatcagcagaggcgagagcagctgccccgtgtgccagaccagattccagcccggcaacctgagacccaacagacacctggccaacatcgtggagagagtgaaggaggtgaagatgagcccccaggagggccagaagagagacgtgtgcgagcaccacggcaagaagctgcagatcttctgcaaggaggacggcaaggtgatctgctgggtgtgcgagctgagccaggagcaccagggccaccagaccttcagaatcaacgaggtggtgaaggagtgccaggagaagctgcaggtggccctgcagagactgatcaaggaggaccaggaggccgagaagctggaggacgacatcagacaggagagaaccgcctggaagaactacatccagatcgagagacagaagatcctgaagggcttcaacgagatgagagtgatcctggacaacgaggagcagagagagctgcagaagctggaggagggcgaggtgaacgtgctggacaacctggccgccgccaccgaccagctggtgcagcagagatag

SEQ ID NO: 161612 - DNA, 612 bp, Artificial Sequence
  derived and/or modified sequence
atggacttcagcgtgaaggtggacatcgagaaggaggtgacctgccccatctgcctggagctgctgaccgagcccctgagcctggactgcggccacagcttctgccaggcctgcatcaccgccaagatcaaggagagcgtgatcatcagcagaggcgagagcagctgccccgtgtgccagaccagattccagcccggcaacctgagacccaacagacacctggccaacatcgtggagagagtgaaggaggtgaagatgagcccccaggagggccagaagagagacgtgtgcgagcaccacggcaagaagctgcagatcttctgcaaggaggacggcaaggtgatctgctgggtgtgcgagctgagccaggagcaccagggccaccagaccttcagaatcaacgaggtggtgaaggagtgccaggagaagctgcaggtggccctgcagagactgatcaaggaggaccaggaggccgagaagctggaggacgacatcagacaggagagaaccgcctggaagaactacatccagatcgagagacagaagatcctgaagggcttcaacgagatgagagtgatcctggacaacgaggagcagagagagctgcagtag

SEQ ID NO: 161613 - DNA, 1497 bp, Artificial Sequence
  derived and/or modified sequence
atggacttttcagtgaaggttgatatcgagaaagaagtgacttgccctatttgcctggaactactgacggagcctcttagtctggactgcggacactctttttgtcaggcctgtatcactgcaaaaattaaagaaagtgtgattatctcacgaggcgaatcatcttgtcccgtttgtcagactaggttccagccagggaacctgaggccaaaccgacatctcgcaaacatcgtagaacgcgtcaaggaagtgaagatgtctccacaggaaggtcagaagcgagacgtttgtgagcaccatgggaaaaaactgcagattttttgtaaggaagacgggaaggtgatttgttgggtctgtgagcttagccaagagcaccagggccaccagacattccggattaacgaggtggtaaaggagtgtcaggaaaaactccaggttgcactccagcgactgattaaggaggaccaggaggcagaaaaactggaagatgacatcaggcaggagcgtaccgcttggaagaactacattcagatcgagaggcagaagattctgaagggtttcaacgaaatgcgggtaatcctggacaatgaagaacagagggagcttcaaaagctggaagaaggggaggtcaacgtcttggataacctggccgccgcgaccgatcaactggtgcagcaaagacaggatgccagcaccctaatcagtgacctgcagaggaggcttagaggcagctccgttgagatgctacaggatgtgatagacgtgatgaagcggtcagagagttggacgctgaagaagcctaaatcagttagcaagaagctgaagagcgtctttcgagttccggatttatctggaatgttgcaggtacttaaagaactgacagatgtgcagtactattgggttgatgtaatgctgaatcccggttccgccaccagtaatgtggctatttctgttgaccagagacaagtgaaaaccgtcaggacttgtaccttcaaaaactcaaatccatgcgacttctctgcttttggtgtattcggatgccagtatttcagcagcggcaagtattactgggaggtggacgtgtccggtaaaattgcttggattttgggagtccactcaaagatcagcagcctcaataagcgaaagagtagcgggtttgcatttgacccctccgtcaattatagtaaagtttattcaaggtacaggccacagtacggctattgggttattggattgcagaacacctgcgagtacaatgcctttgaagattcctcctcatctgaccccaaggtgctgactctctttatggctgtgccgccctgccgtatcggagtgtttttggactacgaggcaggcatagtctcatttttcaacgtgactaatcatggagcattgatttataagttcagcggttgtcggtttagccgaccagcttacccctactttaacccttggaactgcctggtccccatgaccgtgtgccctccgagttcatag

SEQ ID NO: 161614 - DNA, 684 bp, Artificial Sequence
  derived and/or modified sequence
atggacttttctgtgaaagtagacatcgagaaggaggtcacttgcccaatatgtctggagttgctcacggagcccctttcgctggactgtggtcatagcttctgtcaggcttgtatcactgcgaaaataaaggaaagcgtgatcatttcacggggcgaaagctcatgtcccgtgtgccagactcgcttccagccaggcaatctgcggccgaatcgccatttagctaatatagtagagcgtgtgaaagaagtgaaaatgagcccccaagaaggacagaagagggacgtgtgcgaacatcacggtaagaagctgcagattttctgcaaagaggatggaaaagttatttgttgggtgtgcgagttaagccaggaacatcaagggcaccagacattccgcattaatgaggtggttaaggagtgccaggagaagttacaggttgccctgcaaagactgatcaaggaagatcaggaagccgaaaagctggaggacgatatcagacaggaaagaactgcgtggaaaaattacatccagattgagcggcagaaaatcctcaaggggttcaacgaaatgagagttatcctggataatgaggaacagcgggagctacagaagctggaggaaggggaggtcaacgtgcttgacaatctcgctgcggccaccgaccagctggtgcagcaacggtag

SEQ ID NO: 161615 - DNA, 612 bp, Artificial Sequence
  derived and/or modified sequence
atggactttagcgttaaggttgacatcgaaaaagaggtgacctgtccgatatgtctggagctgctcaccgaaccactgtctctggactgcggtcactcattttgccaagcttgtatcacagctaagataaaagaatctgtcatcataagccggggagagagttcatgtccagtatgccagacccggtttcaacctggaaatctgcgacccaataggcacctagcgaatatcgttgagcgggtgaaagaagtgaaaatgtcaccccaggaaggtcagaagcgggatgtttgcgaacatcacgggaagaagttgcagatattctgcaaggaggacggaaaggtcatatgttgggtatgtgagctctcccaagaacatcaggggcatcagacttttaggataaatgaagtagtgaaggagtgccaggagaagctccaggtagcactgcagcgacttatcaaggaggaccaggaagcagagaaattagaagatgacatacgccaggagagaacagcctggaagaattatattcaaatagaaaggcagaagattctgaaggggtttaatgaaatgcgcgtgatcttggataacgaggagcaacgggagctccagtag

SEQ ID NO: 161616 - DNA, 1497 bp, Artificial Sequence
  derived and/or modified sequence
atggacttctctgtgaaggtggacatcgagaaggaggtgacctgccccatctgcctggagctgctgacagagcccctgagcctggactgtggccacagcttctgccaggcctgcatcacagccaagatcaaggagagcgtcatcatcagcagaggagagagcagctgccctgtgtgccagacccgcttccagcccggcaacctgcggcccaacagacacctggccaacatcgtggagcgggtgaaggaggtgaagatgagcccccaggagggccagaagagagatgtgtgtgagcaccacggcaagaagctgcagatcttctgcaaggaggatggcaaggtgatctgctgggtgtgtgagctgagccaggagcaccagggccaccagaccttccgcatcaatgaggtggtgaaggagtgccaggagaagctgcaggtggccctgcagaggctcatcaaggaggaccaggaggccgagaagctggaggatgacatccggcaggagaggacagcctggaagaactacatccagatcgagcggcagaagatcctgaagggcttcaatgagatgagggtcatcctggacaatgaggagcagcgggagctgcagaagctggaggagggggaggtgaatgtgctggacaacctggccgccgccacagaccagctggtgcagcagaggcaggatgccagcaccctcatcagtgacctgcagaggcggctgcggggcagctctgtggagatgctgcaggatgtgattgatgtgatgaagaggtctgagagctggaccctgaagaagcccaagtctgtgtccaagaagctgaagagcgtcttccgggtgcctgacctgagcggcatgctgcaggtgctgaaggagctgacagatgtgcagtactactgggtggatgtgatgctgaaccctggcagcgccaccagcaatgtggccatctctgtggaccagaggcaggtgaagacagtgaggacctgcaccttcaagaacagcaacccctgtgacttcagcgccttcggcgtgtttggctgccagtacttcagcagcggcaagtactactgggaggtggatgtgtctgggaagatcgcctggatcctgggcgtgcacagcaagatcagcagcctgaacaagaggaagagcagcggctttgcctttgaccccagcgtgaactacagcaaggtgtacagccgctaccggccccagtatggctactgggtgattggcctgcagaacacctgtgagtacaatgcctttgaggacagcagcagcagtgaccccaaggtgctgaccctcttcatggctgtgcccccctgcagaattggagtcttcctggactatgaagctggcatcgtgtccttcttcaacgtgaccaaccacggggccctgatctacaagttcagcggctgccgcttcagcaggcctgcctacccctacttcaacccctggaactgcctggtgcccatgacagtgtgcccccccagcagctag

SEQ ID NO: 161617 - DNA, 684 bp, Artificial Sequence
  derived and/or modified sequence
atggacttctctgtgaaggtggacatcgagaaggaggtgacctgccccatctgcctggagctgctgacagagcccctgagcctggactgtggccacagcttctgccaggcctgcatcacagccaagatcaaggagagcgtcatcatcagcagaggagagagcagctgccctgtgtgccagacccgcttccagcccggcaacctgcggcccaacagacacctggccaacatcgtggagcgggtgaaggaggtgaagatgagcccccaggagggccagaagagagatgtgtgtgagcaccacggcaagaagctgcagatcttctgcaaggaggatggcaaggtgatctgctgggtgtgtgagctgagccaggagcaccagggccaccagaccttccgcatcaatgaggtggtgaaggagtgccaggagaagctgcaggtggccctgcagaggctcatcaaggaggaccaggaggccgagaagctggaggatgacatccggcaggagaggacagcctggaagaactacatccagatcgagcggcagaagatcctgaagggcttcaatgagatgagggtcatcctggacaatgaggagcagcgggagctgcagaagctggaggagggggaggtgaatgtgctggacaacctggccgccgccacagaccagctggtgcagcagaggtag

SEQ ID NO: 161618 - DNA, 612 bp, Artificial Sequence
  derived and/or modified sequence
atggacttctctgtgaaggtggacatcgagaaggaggtgacctgccccatctgcctggagctgctgacagagcccctgagcctggactgtggccacagcttctgccaggcctgcatcacagccaagatcaaggagagcgtcatcatcagcagaggagagagcagctgccctgtgtgccagacccgcttccagcccggcaacctgcggcccaacagacacctggccaacatcgtggagcgggtgaaggaggtgaagatgagcccccaggagggccagaagagagatgtgtgtgagcaccacggcaagaagctgcagatcttctgcaaggaggatggcaaggtgatctgctgggtgtgtgagctgagccaggagcaccagggccaccagaccttccgcatcaatgaggtggtgaaggagtgccaggagaagctgcaggtggccctgcagaggctcatcaaggaggaccaggaggccgagaagctggaggatgacatccggcaggagaggacagcctggaagaactacatccagatcgagcggcagaagatcctgaagggcttcaatgagatgagggtcatcctggacaatgaggagcagcgggagctgcagtag

SEQ ID NO: 161619 - DNA, 1497 bp, Artificial Sequence
  derived and/or modified sequence
atggacttcagcgtgaaggtggacatcgagaaggaggtgacctgccccatctgtctagaactgctcaccgagccgttatctctcgattgcggacatagcttctgccaagcctgcataacagccaaaatcaaagagagcgtgataatatccagaggagaaagtagctgcccagtgtgccaaacacgctttcagccaggtaatctgcgccctaataggcatttggccaatatcgtcgaacgggttaaagaggtcaagatgtcacctcaggagggacagaagagggacgtgtgcgaacatcatgggaaaaagcttcagatcttttgtaaagaggatggcaaagtaatctgctgggtgtgtgagttgagtcaagagcaccaggggcatcaaacattccgaatcaatgaggtagtgaaggagtgccaagaaaaactgcaggtcgcattacagcgtttgatcaaggaagatcaggaggctgagaaactggaggatgacattagacaggaaagaaccgcttggaagaattacatccagatcgagcggcaaaagatcctgaagggcttcaacgaaatgagagtgatccttgacaacgaagagcaaagagaactgcagaagcttgaggaaggggaggtgaacgtcctagacaacctggccgctgcaaccgatcaactggtgcaacagcgtcaggatgcctctacactgatttcggacctgcagaggcgcttgcgtgggagttcagtggagatgctccaggacgtaattgatgtaatgaagcgcagcgaatcctggaccctgaagaagcctaagtctgtgtccaaaaaactcaaatccgtgtttagggtacctgatctgtcaggtatgcttcaggtgctgaaggagctgaccgacgtgcaatattactgggtggatgtgatgctgaatccaggtagcgcgactagcaatgtggcaatttcagtagatcagcggcaagtaaagacggttcgtacctgcactttcaaaaacagcaacccatgcgatttttctgctttcggggtcttcggctgccaatatttttccagcggaaagtattactgggaagtagacgtttccgggaaaatagcctggatcctgggggtgcactccaagattagctctctgaacaaacgcaaatcctctggttttgccttcgatccatcagtcaactacagtaaagtgtactccaggtaccggccccagtatgggtactgggtgatcggacttcagaacacatgcgaatataatgcttttgaagattctagcagtagcgaccctaaagtgttgaccctgttcatggctgtacccccgtgtcggataggagtttttcttgactacgaagccggcatagtgtctttcttcaacgtgactaaccatggcgcgctgatctacaaatttagtggctgtcggtttagccggcctgcatatccttattttaatccttggaattgcctcgttccaatgacagtgtgcccccctagttcatag

SEQ ID NO: 161620 - DNA, 684 bp, Artificial Sequence
  derived and/or modified sequence
atggacttcagcgtgaaggtggacatcgagaaggaggtgacctgcccgatatgcctggaactgctgacagagccattatctctggactgcgggcattccttctgccaggcttgcattacagccaaaattaaagagagcgtgattatttccagaggggaaagctcttgccctgtctgccagacacggttccagcctggcaatctgcgccctaaccgccaccttgcaaacattgtggagcgcgtcaaagaagtcaagatgtctccccaggaaggccagaagagagacgtgtgtgagcatcatggaaaaaagttacaaatattttgcaaagaggacggcaaagtgatttgttgggtgtgcgagctctcccaggagcaccagggccaccagacattccggatcaacgaggtggtgaaggagtgccaggagaagctgcaagtggccctgcaacggctgatcaaggaagatcaggaagcggagaagctcgaggacgatatccggcaagagaggacggcttggaaaaattatattcagatagagcgacaaaagatcctgaaaggcttcaatgaaatgagagtaatcctggacaatgaggagcaaagagagttgcagaaactggaggagggagaggtgaatgtgctggacaaccttgccgcagccacagaccagttggtgcagcagcggtag

SEQ ID NO: 161621 - DNA, 612 bp, Artificial Sequence
  derived and/or modified sequence
atggacttcagcgtgaaggtggacatcgagaaggaggtgacctgccccatttgtttagagctattgactgagcccctttccttggactgcggccactcattctgccaggcctgcatcaccgcgaagatcaaagagtctgtaatcatctcccggggggagtcatcttgtccagtatgtcagacaagatttcagccaggaaacctgcggcctaaccggcacctggccaacatcgtggagagggtcaaggaggtgaaaatgagccctcaggagggacagaagcgggatgtctgcgaacatcatggaaagaagctccagattttttgtaaggaggatggaaaagtgatctgttgggtatgcgagctgagccaggaacatcaggggcatcagactttcaggattaacgaggtggtgaaggaatgccaggagaagctccaggtcgccctgcagcggttaattaaagaagaccaggaggccgaaaagctggaggacgacattcgccaggagcggaccgcgtggaaaaattacattcagatagagcgccagaagatactaaagggattcaacgagatgcgggttattctggacaatgaggagcagcgcgaactacaatag

SEQ ID NO: 161622 - DNA, 1497 bp, Artificial Sequence
  derived and/or modified sequence
atggacttttcagtcaaagttgacatcgaaaaggaagttacttgccctatctgcttagagctgcttacagagcctctgtctttggactgtgggcactccttctgccaggcctgcatcacagctaaaatcaaggaatctgttatcattagtcggggagaatcgtcttgccccgtgtgtcagaccagattccagcctgggaaccttcggccaaatcgccacctggccaacattgtggaaagggtgaaggaggtgaagatgtccccacaggagggacagaaaagggacgtttgtgagcaccatggaaagaaattacaaattttttgtaaagaagatggtaaggtgatttgttgggtctgtgagttatcccaagagcaccagggccaccagacctttcgaattaacgaggtcgttaaggagtgccaggagaagctccaggtggctctgcagagacttattaaagaagatcaggaagcagagaaactcgaggacgacattaggcaggagcggacagcctggaaaaattatatccagatcgagaggcagaagatacttaaaggcttcaacgagatgcgcgtgatcctggacaatgaggagcagcgcgagttgcagaagttggaagagggcgaggtcaatgtcttggataacttggcagccgcaaccgatcaactggtccagcagaggcaggacgctagcaccttaatttcggaccttcagaggagacttcgcggttcctctgttgagatgctgcaggacgtgattgatgtcatgaaacgtagtgagagttggaccctaaaaaagcccaaaagtgtatccaagaagcttaaatctgtattcagagtccccgacctctccggtatgttgcaagtcctaaaagagctgacagatgtacaatattactgggttgatgtcatgctgaacccaggaagcgcaacaagcaacgtagctatcagtgtggaccagcgacaggttaagactgtgagaacttgcacctttaagaacagcaacccctgtgattttagcgcattcggcgtctttggttgccaatacttctcatcaggcaagtattattgggaggtagacgtctctggcaagatagcctggattctcggcgtgcactccaagatatcatctttgaacaaacgtaaaagtagcggatttgcctttgatcctagtgtgaactactcaaaagtgtactctaggtatagaccacagtacggctattgggtgataggacttcagaatacttgtgagtacaacgcatttgaggattcttcttcttctgaccccaaggtgttgacattattcatggctgtgcctccttgcaggattggcgtgttccttgactacgaagcaggaattgtgagtttcttcaacgtgactaaccatggagcactgatctataagttctctgggtgccgattttctcgccctgcgtatccgtatttcaatccatggaactgcttagtgccgatgactgtttgccccccaagtagttag

SEQ ID NO: 161623 - DNA, 684 bp, Artificial Sequence
  derived and/or modified sequence
atggatttctccgtgaaggtggacatcgagaaggaagtgacatgtccaatctgcctcgaacttctgactgagccgctgagcctcgactgtggccatagtttttgccaggcctgcatcaccgccaaaatcaaggaatctgtcattatcagccgaggtgaaagctcctgccccgtgtgccagacccggtttcaaccagggaaccttcggcctaacaggcatctagccaacatcgtcgagagagttaaagaagtcaaaatgagccctcaagaggggcagaagagggacgtgtgtgagcatcacgggaagaaactgcagatcttctgcaaggaagacggcaaggtgatctgctgggtttgcgaactctcccaagaacatcaaggccatcagacatttcgcattaacgaagtggtcaaggagtgccaagagaagctccaggttgccctgcagagactgattaaggaggaccaggaagctgagaaattagaagatgatatccgccaggaacgcacagcctggaaaaactatatccaaattgagaggcagaagatcctcaagggcttcaacgaaatgcgtgttatacttgacaatgaggagcagagagaacttcagaagctggaagaaggcgaggtgaatgtgctggacaatctagctgcagcgacagaccagctggtgcaacagaggtag

SEQ ID NO: 161624 - DNA, 612 bp, Artificial Sequence
  derived and/or modified sequence
atggactttagcgttaaagtcgacatagagaaggaggtgacctgcccaatctgcctggagctactgactgagcctctgtcccttgactgtggccactcattctgccaggcctgcatcacagcgaagatcaaggaatcagtcatcatttcacgtggagagtcctcttgtcctgtttgccagactcggttccaacccggaaacttgagaccaaatcggcatctcgcaaatatcgtggagcgcgtgaaggaggttaagatgtctcctcaggaggggcaaaaaagggacgtttgtgaacaccacggcaaaaagcttcagattttttgtaaagaggacggtaaagtgatttgttgggtctgcgagctgagccaggagcaccaaggccaccaaacctttcgaatcaacgaagtcgtcaaggagtgccaggagaaactgcaggttgcgctccagaggctcattaaagaggaccaagaagccgagaaactggaagatgacattcgtcaggagagaacagcttggaagaactatatccagatagaaagacagaaaattttgaagggcttcaacgaaatgcgggtaattcttgataacgaagagcagcgggagcttcagtag

SEQ ID NO: 161625 - DNA, 2989 bp, Artificial Sequence
  derived and/or modified sequence
cagggtttattgttatgtaagttcttgttcagcttcctttgttttctttcacttctgagaatttaactttcgtttctcactcagctcctgtggggaaactcatttgtggagaccagccctctggcttggtgagtgaatctggtttacaccggctcctgccctgccttcactcttctcccctgattcaagactcctctgctttggactgaagcactgcaggagtttgtgaccaagaacttcaagagtcaagacagaaggaagccaagggagcagtgcaatggatttctcagtaaaggtagacatagagaaggaggtgacctgccccatctgcctggagctcctgacagaacctctgagcctagattgtggccacagcttctgccaagcctgcatcactgcaaagatcaaggagtcagtgatcatctcaagaggggaaagcagctgtcctgtgtgtcagaccagattccagcctgggaacctccgacctaatcggcatctggccaacatagttgagagagtcaaagaggtcaagatgagcccacaggaggggcagaagagagatgtctgtgagcaccatggaaaaaaactccagatcttctgtaaggaggatggaaaagtcatttgctgggtttgtgaactgtctcaggaacaccaaggtcaccaaacattccgcataaacgaggtggtcaaggaatgtcaggaaaagctgcaggtagccctgcagaggctgataaaggaggatcaagaggctgagaagctggaagatgacatcagacaagagagaaccgcctggaagaattatatccagatcgagagacagaagattctgaaagggttcaatgaaatgagagtcatcttggacaatgaggagcagagagagctgcaaaagctggaggaaggtgaggtgaatgtgctggataacctggcagcagctacagaccagctggtccagcagaggcaggatgccagcacgctcatctcagatctccagcggaggttgaggggatcgtcagtagagatgctgcaggatgtgattgacgtcatgaaaaggagtgaaagctggacattgaagaagccaaaatctgtttccaagaaactaaagagtgtattccgagtaccagatctgagtgggatgctgcaagttcttaaagagctgacagatgtccagtactactgggtggacgtgatgctgaatccaggcagtgccacttcgaatgttgctatttctgtggatcagagacaagtgaaaactgtacgcacctgcacatttaagaattcaaatccatgtgatttttctgcttttggtgtcttcggctgccaatatttctcttcggggaaatattactgggaagtagatgtgtctggaaagattgcctggatcctgggcgtacacagtaaaataagtagtctgaataaaaggaagagctctgggtttgcttttgatccaagtgtaaattattcaaaagtttactccagatatagacctcaatatggctactgggttataggattacagaatacatgtgaatataatgcttttgaggactcctcctcttctgatcccaaggttttgactctctttatggctgtgcctccctgtcgtattggggttttcctagactatgaggcaggcattgtctcatttttcaatgtcacaaaccacggagcactcatctacaagttctctggatgtcgcttttctcgacctgcttatccgtatttcaatccttggaactgcctagtccccatgactgtgtgcccaccgagctcctgagtgttctcattcctttacccacttctgcatagtagcccttgtgctgagactcagattctgcacctgagttcatctctactgagaccatctcttcctttctttccccttcttttacttagaatgtctttgtattcatttgctagggcttccatagcaaagcatcatagattgctgatttaaactgtaattgtattgccgtactgtgggctggaaatcccaaatctagattccagcagagttggttctttctgaggtctgcaaggaagggctctgttccatgcctctctccttggcttgtagaaggcatcttgtccctatgactcttcacattgtctttatgtacatctctgtgcccaagttttccctttttattaagacaccagtcatactggctcagggcccaccgctaatgccttaatgaaatcattttaacattatattctctacaaagaccttatttccaaataagataatatttggaggtattgggaataaaaactccaacatataaatttgaggaaggcacgatttcactcataacaatcttaccctttcttgcaagagatgcttgtacattattttcctaataccttggtttcactagtagtaaacattattattttttttatatttgcaaaggaaacatatctaatccttcctatagaaagaacagtattgctgtaattccttttcttttcttcctcatttcctctgccccttaaaagattgaagaaagagaaacttgtcaactcatatccacgttatctagcaaagtacataagaatctatcactaagtaatgtatccttcagaatgtgttggtttaccagtgacaccccatattcatcacaaaattaaagcaagaagtccatagtaatttatttgctaatagtggatttttaatgctcagagtttctgaggtcaaattttatcttttcacttacaagctctatgatcttaaataatttacttaatgtattttggtgtattttcctcaaattaatattggtgttcaagactatatctaattcctctgatcactttgagaaacaaacttttattaaatgtaaggcacttttctatgaattttaaatataaaaataaatattgttctgattattactgaaaagatgtcagccatttcaatgtcttgggaaacaattttttgtttttgttctgttttctttttgcttcaataaaacaatagctggctcta

SEQ ID NO: 161626 - DNA, 897 bp, Artificial Sequence
  derived and/or modified sequence
gacgggcagactgctgctcatctctgcagctccactttggtctcttgtctctgaaggtccagtcacagggaacttgttcttctgagtacccacagcttactcttcctttgtagcaggaccagccacagaaaaaactcctcagacaccgagcactgcaggagtttgtgaccaagaacttcaagagtcaagacagaaggaagccaagggagcagtgcaatggatttctcagtaaaggtagacatagagaaggaggtgacctgccccatctgcctggagctcctgacagaacctctgagcctagattgtggccacagcttctgccaagcctgcatcactgcaaagatcaaggagtcagtgatcatctcaagaggggaaagcagctgtcctgtgtgtcagaccagattccagcctgggaacctccgacctaatcggcatctggccaacatagttgagagagtcaaagaggtcaagatgagcccacaggaggggcagaagagagatgtctgtgagcaccatggaaaaaaactccagatcttctgtaaggaggatggaaaagtcatttgctgggtttgtgaactgtctcaggaacaccaaggtcaccaaacattccgcataaacgaggtggtcaaggaatgtcaggaaaagctgcaggtagccctgcagaggctgataaaggaggatcaagaggctgagaagctggaagatgacatcagacaagagagaaccgcctggaagaattatatccagatcgagagacagaagattctgaaagggttcaatgaaatgagagtcatcttggacaatgaggagcagagagagctgcaaaagctggaggaaggtgaggtgaatgtgctggataacctggcagcagctacagaccagctggtccagcagagg

SEQ ID NO: 161627 - DNA, 812 bp, Artificial Sequence
  derived and/or modified sequence
attgttatctcctgtggggaaactcatttgtggagaccagccctctggcttggtgagtgaatctggtttacaccggctcctgccctgccttcactcttctcccctgattcaagactcctctgctttggactgaagcactgcaggagtttgtgaccaagaacttcaagagtcaagacagaaggaagccaagggagcagtgcaatggatttctcagtaaaggtagacatagagaaggaggtgacctgccccatctgcctggagctcctgacagaacctctgagcctagattgtggccacagcttctgccaagcctgcatcactgcaaagatcaaggagtcagtgatcatctcaagaggggaaagcagctgtcctgtgtgtcagaccagattccagcctgggaacctccgacctaatcggcatctggccaacatagttgagagagtcaaagaggtcaagatgagcccacaggaggggcagaagagagatgtctgtgagcaccatggaaaaaaactccagatcttctgtaaggaggatggaaaagtcatttgctgggtttgtgaactgtctcaggaacaccaaggtcaccaaacattccgcataaacgaggtggtcaaggaatgtcaggaaaagctgcaggtagccctgcagaggctgataaaggaggatcaagaggctgagaagctggaagatgacatcagacaagagagaaccgcctggaagaattatatccagatcgagagacagaagattctgaaagggttcaatgaaatgagagtcatcttggacaatgaggagcagagagagctgcaaaa

SEQ ID NO: 161628 - DNA, 1688 bp, Artificial Sequence
  derived and/or modified sequence
aatctggtttacaccggctcctgccctgccttcactcttctcccctgattcaagactcctctgctttggactgaagcactgcaggagtttgtgaccaagaacttcaagagtcaagacagaaggaagccaagggagcagtgcaatggatttctcagtaaaggtagacatagagaaggaggtgacctgccccatctgcctggagctcctgacagaacctctgagcctagattgtggccacagcttctgccaagcctgcatcactgcaaagatcaaggagtcagtgatcatctcaagaggggaaagcaggggcagaagagagatgtctgtgagcaccatggaaaaaaactccagatcttctgtaaggaggatggaaaagtcatttgctgggtttgtgaactgtctcaggaacaccaaggtcaccaaacattccgcataaacgaggtggtcaaggaatgtcaggaaaagctgcaggtagccctgcagaggctgataaaggaggatcaagaggctgagaagctggaagatgacatcagacaagagagaaccgcctggaagaattatatccagatcgagagacagaagattctgaaagggttcaatgaaatgagagtcatcttggacaatgaggagcagagagagctgcaaaagctggaggaaggtgaggtgaatgtgctggataacctggcagcagctacagaccagctggtccagcagaggcaggatgccagcacgctcatctcagatctccagcggaggttgaggggatcgtcagtagagatgctgcaggatgtgattgacgtcatgaaaaggagtgaaagctggacattgaagaagccaaaatctgtttccaagaaactaaagagtgtattccgagtaccagatctgagtgggatgctgcaagttcttaaagagctgacagatgtccagtactactgggtggacgtgatgctgaatccaggcagtgccacttcgaatgttgctatttctgtggatcagagacaagtgaaaactgtacgcacctgcacatttaagaattcaaatccatgtgatttttctgcttttggtgtcttcggctgccaatatttctcttcggggaaatattactgggaagtagatgtgtctggaaagattgcctggatcctgggcgtacacagtaaaataagtagtctgaataaaaggaagagctctgggtttgcttttgatccaagtgtaaattattcaaaagtttactccagatatagacctcaatatggctactgggttataggattacagaatacatgtgaatataatgcttttgaggactcctcctcttctgatcccaaggttttgactctctttatggctgtgcctccctgtcgtattggggttttcctagactatgaggcaggcattgtctcatttttcaatgtcacaaaccacggagcactcatctacaagttctctggatgtcgcttttctcgacctgcttatccgtatttcaatccttggaactgcctagtccccatgactgtgtgcccaccgagctcctgagtgttctcattcctttacccacttctgcatagtagcccttgtgctgagactcagattctgcacctgagttcatctctactgagaccatctcttcctttctttccccttcttttacttagaatgtctttgtattcatttgctagggcttccatagc

SEQ ID NO: 161629 - protein, 481 aa, Artificial Sequence
  derived and/or modified sequence
MVMAAKKGPGPGGGVSGGKAEAEAASEVWCRRVRELGGCSQAGNRHCFECAQRGVTYVDITVGSFVCTTCSGLLRGLNPPHRVKSISMTTFTEPEVVFLQSRGNEVCRKIWLGLFDARTSLVPDSRDPQKVKEFLQEKYEKKRWYVPPDQVKGPTYTKGSASTPVQGSIPEGKPLRTLLGDPAPSLSVAASTSSQPVSQSHARTSQARSTQPPPHSSVKKASTDLLADIGGDPFAAPQMAPAFAAFPAFGGQTPSQGGFANFDAFSSGPSSSVFGSLPPAGQASFQAQPTPAGSSQGTPFGATPLAPASQPNSLADVGSFLGPGVPAAGVPSSLFGMAGQVPPLQSVTMGGGGGSSTGLAFGAFTNPFTAPAAQSPLPSTNPFQPNGLAPGPGFGMSSAGPGFPQAVPPTGAFASSFPAPLFPPQTPLVQQQNGSSFGDLGSAKLGQRPLSQPAGISTNPFMTGPSSSPFASKPPTTNPFL

SEQ ID NO: 161630 - DNA, 468 bp, Artificial Sequence
  derived and/or modified sequence
atggtgatggccgccaagaagggccccggccccggcggcggcgtgagcggcggcaaggccgaggccgaggccgccagcgaggtgtggtgcagaagagtgagagagctgggcggctgcagccaggccggcaacagacactgcttcgagtgcgcccagagaggcgtgacctacgtggacatcaccgtgggcagcttcgtgtgcaccacctgcagcggcctgctgagaggcctgaaccccccccacagagtgaagagcatcagcatgaccaccttcaccgagcccgaggtggtgttcctgcagagcagaggcaacgaggtgtgcagaaagatctggctgggcctgttcgacgccagaaccagcctggtgcccgacagcagagacccccagaaggtgaaggagttcctgcaggagaagtacgagaagaagagatggcccgacaccttccccagaagactgtgccagctgtag

SEQ ID NO: 161631 - DNA, 1446 bp, Artificial Sequence
  derived and/or modified sequence
atggtgatggccgccaagaagggccccggccccggcggcggcgtgagcggcggcaaggccgaggccgaggccgccagcgaggtgtggtgcagaagagtgagagagctgggcggctgcagccaggccggcaacagacactgcttcgagtgcgcccagagaggcgtgacctacgtggacatcaccgtgggcagcttcgtgtgcaccacctgcagcggcctgctgagaggcctgaaccccccccacagagtgaagagcatcagcatgaccaccttcaccgagcccgaggtggtgttcctgcagagcagaggcaacgaggtgtgcagaaagatctggctgggcctgttcgacgccagaaccagcctggtgcccgacagcagagacccccagaaggtgaaggagttcctgcaggagaagtacgagaagaagagatggtacgtgccccccgaccaggtgaagggccccacctacaccaagggcagcgccagcacccccgtgcagggcagcatccccgagggcaagcccctgagaaccctgctgggcgaccccgcccccagcctgagcgtggccgccagcaccagcagccagcccgtgagccagagccacgccagaaccagccaggccagaagcacccagccccccccccacagcagcgtgaagaaggccagcaccgacctgctggccgacatcggcggcgaccccttcgccgccccccagatggcccccgccttcgccgccttccccgccttcggcggccagacccccagccagggcggcttcgccaacttcgacgccttcagcagcggccccagcagcagcgtgttcggcagcctgccccccgccggccaggccagcttccaggcccagcccacccccgccggcagcagccagggcacccccttcggcgccacccccctggcccccgccagccagcccaacagcctggccgacgtgggcagcttcctgggccccggcgtgcccgccgccggcgtgcccagcagcctgttcggcatggccggccaggtgccccccctgcagagcgtgaccatgggcggcggcggcggcagcagcaccggcctggccttcggcgccttcaccaaccccttcaccgcccccgccgcccagagccccctgcccagcaccaaccccttccagcccaacggcctggcccccggccccggcttcggcatgagcagcgccggccccggcttcccccaggccgtgccccccaccggcgccttcgccagcagcttccccgcccccctgttccccccccagacccccctggtgcagcagcagaacggcagcagcttcggcgacctgggcagcgccaagctgggccagagacccctgagccagcccgccggcatcagcaccaaccccttcatgaccggccccagcagcagccccttcgccagcaagccccccaccaccaaccccttcctgtag

SEQ ID NO: 161632 - DNA, 468 bp, Artificial Sequence
  derived and/or modified sequence
atggtaatggccgcgaaaaagggaccgggtcctggcggtggcgtgtccggtggtaaggctgaggctgaagcagcttccgaagtgtggtgccgcagagtccgtgaactcggggggtgtagtcaagcggggaataggcactgcttcgagtgcgctcagaggggagtaacttatgtggacattactgtgggctccttcgtgtgtacgacatgctccggcctcctgcgcgggctaaaccccccccacagagtgaagagtatctccatgaccacattcaccgagccagaggtggtgttcctgcaatccagaggtaacgaggtgtgccggaagatctggctggggctgttcgacgcccgtacctccttggtgcctgactcacgggacccacagaaagtgaaagagttcctccaggaaaaatacgaaaaaaagcgttggcccgacaccttccccagacggctgtgtcagctgtag

SEQ ID NO: 161633 - DNA, 1446 bp, Artificial Sequence
  derived and/or modified sequence
atggtgatggccgcaaagaaaggacccggcccgggcggaggagtaagcggagggaaggctgaagctgaggccgcctcggaagtatggtgtagacgggtgcgtgaactaggcggttgtagccaggcaggcaaccggcactgcttcgagtgcgcccagcgcggagtgacatacgtggatatcactgtgggcagcttcgtatgcaccacatgcagcggattactacggggcctgaatcctccacaccgcgttaagagtatctcaatgacaacgttcaccgagccagaggtcgtatttttgcagtcaagagggaacgaggtctgtcgtaagatttggctgggcctctttgatgcaagaacaagcctagtgccagattctagggacccccagaaggtaaaggaatttctgcaggaaaaatacgagaagaagcgctggtacgtgcctcccgatcaggtgaaggggccaacctacaccaagggttctgctagtacccctgtgcaagggtcaatccccgagggcaagccactcaggacacttttgggagatccggctcctagcctgagtgttgcggccagcacttccagccagcccgtgtcacaaagccatgcccggacctctcaggctcgaagcacccagccaccacctcactcttcagtgaaaaaagcatcgaccgatctcctggccgacatcggaggagatccttttgccgcaccgcagatggctccagccttcgccgcttttccagccttcggcggccagacaccttcgcaaggcggcttcgcaaatttcgatgctttctcctcagggccttcgagtagcgtgttcggctctctgcctccagcaggacaggcaagttttcaggcccagccaactcccgcaggtagcagccaggggactccctttggtgcaacccccctcgcacccgcctcccagccaaattcccttgcagacgttgggtcgtttctcgggccaggcgtccccgccgctggagtgcctagctccctcttcggtatggccggtcaggttccgcctctccagagcgtgaccatggggggcggaggcggttcaagcacggggctcgcatttggcgcctttactaatccgtttaccgctccagccgcacagtctcctctgccatcaactaacccgttccagccaaatggcctggctcccggtcctgggtttggtatgagtagtgcgggccccggcttccctcaagctgttccacccaccggggctttcgcatcttcgttcccagcaccccttttcccccctcagaccccactggtgcaacagcagaacggttccagctttggggacctcggctctgccaaattgggccagaggcctttaagccagccagccggtatcagtaccaacccattcatgactgggccttcttcctcccctttcgcttcgaagcctccaacaactaatccctttctgtag

SEQ ID NO: 161634 - DNA, 468 bp, Artificial Sequence
  derived and/or modified sequence
atggtgatggccgccaagaagggccctggccctgggggcggcgtgtctgggggcaaggccgaggccgaggccgccagcgaggtgtggtgcagaagagtgcgggagctgggcggctgcagccaggccggcaacagacactgctttgaatgtgcccagaggggcgtgacctacgtggacatcaccgtgggcagctttgtgtgcaccacctgcagcggcctgctgcggggcctgaaccccccccaccgggtgaagagcatctccatgaccaccttcacagagcctgaggtggtgttcctgcagagcagaggaaatgaggtgtgcaggaagatctggctgggcctgtttgatgcccggaccagcctggtgcctgacagccgggacccccagaaggtgaaggagttcctgcaggagaagtatgagaagaagcgctggccagacaccttcccccggcggctgtgccagctgtag

SEQ ID NO: 161635 - DNA, 1446 bp, Artificial Sequence
  derived and/or modified sequence
atggtgatggccgccaagaagggccctggccctgggggcggcgtgtctgggggcaaggccgaggccgaggccgccagcgaggtgtggtgcagaagagtgcgggagctgggcggctgcagccaggccggcaacagacactgctttgaatgtgcccagaggggcgtgacctacgtggacatcaccgtgggcagctttgtgtgcaccacctgcagcggcctgctgcggggcctgaaccccccccaccgggtgaagagcatctccatgaccaccttcacagagcctgaggtggtgttcctgcagagcagaggaaatgaggtgtgcaggaagatctggctgggcctgtttgatgcccggaccagcctggtgcctgacagccgggacccccagaaggtgaaggagttcctgcaggagaagtatgagaagaagcgctggtacgtgcccccagaccaggtgaagggccccacctacaccaagggcagcgccagcacccctgtgcagggcagcatccctgagggcaagcccctgcggaccctgctgggggaccctgcccccagcctgtctgtggccgccagcaccagcagccagcctgtgtcccagagccacgcccggaccagccaggcccggagcacccagcccccaccccacagctctgtgaagaaggccagcacagacctgctggccgacattggaggagacccctttgctgccccccagatggccccagcctttgctgccttccctgcctttggaggccagacccccagccagggcggctttgccaactttgatgccttcagcagcggccccagcagctctgtgtttggcagcctgcccccagctggccaggccagcttccaggcccagcccaccccagctggcagcagccagggcaccccatttggagccacccccctggccccagccagccagcccaacagcctggctgatgtgggcagcttcctgggccctggggtgcctgctgctggggtgcccagcagcctgtttggcatggccggccaggtgccccccctgcagagcgtgaccatgggcggcggcggcggcagcagcacaggcctggcctttggagccttcaccaaccccttcaccgccccagctgcccagagccccctgcccagcaccaaccccttccagcccaacggcctggcccctggccctggcttcggcatgagcagcgctggccctggcttcccccaggccgtgccccccaccggggcctttgccagcagcttccctgcccccctcttccccccccagacccccctggtgcagcagcagaatggcagcagctttggagacctgggcagcgccaagctgggccagaggcccctgagccagcctgctggcatcagcaccaaccccttcatgacaggccccagcagcagcccctttgccagcaagccacccaccaccaaccccttcctgtag

SEQ ID NO: 161636 - DNA, 468 bp, Artificial Sequence
  derived and/or modified sequence
atggtgatggccgccaagaagggccccggccccggcggcggcgtgtctggcggcaaggctgaggcggaggctgcctctgaagtatggtgccggcgcgttcgtgaactgggagggtgcagccaagccgggaaccggcattgcttcgagtgcgcacagcgtggtgtaacttatgtagatatcaccgttggatcctttgtgtgcactacctgtagcggcctcctccgcggcctcaaccccccccatcgagtcaaatccatatccatgacaacattcactgagcccgaggtggtattcctgcagtctagaggcaatgaggtctgcaggaagatttggttaggcctgttcgatgcccgtacctccctggtaccagactcacgcgaccctcagaaagtcaaagagtttttacaggaaaagtacgaaaaaaaacgctggcccgacaccttcccacgcagactgtgccagctgtag

SEQ ID NO: 161637 - DNA, 1446 bp, Artificial Sequence
  derived and/or modified sequence
atggtgatggccgccaagaagggccccggccccggcggcggcgtgagtgggggcaaagctgaggccgaggcggcatctgaggtctggtgcaggagagtgagggaactcggcgggtgctcccaagcagggaaccgacattgcttcgagtgcgcccagaggggagtgacatatgttgatatcactgtgggaagttttgtttgcacaacttgtagcggactcctccgtggtctgaatcctcctcaccgcgttaagagcatttcaatgaccactttcaccgaacctgaggtagtgttcctgcagagtaggggcaatgaagtgtgtcgcaagatttggcttggcctgttcgacgcgcgaacatccctggttccagactcccgggacccacagaaagtcaaagaattccttcaggaaaagtacgaaaagaagcgctggtacgtcccccccgaccaggtcaaagggcctacatacactaagggatctgcatcgactccagtgcagggtagcatacctgagggaaagcctctgcgaaccctgctgggagatccagcccccagtctgagtgtggccgcgtcaacgagctcacagccagtgtctcagtctcatgcacgcacatctcaagccaggtctacccagcctcccccccacagcagcgtgaaaaaagcctcaactgatctcctggccgacattggaggagatcctttcgcggctcctcagatggcacctgcctttgctgcatttcccgctttcgggggccagacgcctagccaagggggcttcgccaatttcgacgccttctctagtggcccatccagctcagtcttcggcagcttaccacctgccggccaagcatcttttcaggcacagcccacacccgccgggtctagtcagggcacaccatttggtgccactccactggccccagcttcacagcctaactcccttgcagacgtggggagtttcctgggacccggagtgcctgccgccggagtgccctcctcgcttttcggaatggctggccaggtccctccattacagtccgtgacaatgggaggcggaggtggctcatcaactggcctggcctttggcgcctttaccaacccattcaccgccccagctgctcagtccccccttccgtccaccaaccctttccaacccaacgggctggcccctggacctggattcggcatgtcaagcgccggtcccggattcccgcaagccgtgccacccacgggcgcattcgcctccagtttccctgcccccctgttccctccccagactcccctcgtgcagcagcagaacggttccagttttggcgacctaggttcagccaaattaggccaaaggcctctctcgcagccggccggcatcagtaccaatccctttatgacgggaccttctagttctcctttcgcttcaaagcctcccaccacgaacccctttctctag

SEQ ID NO: 161638 - DNA, 1869 bp, Artificial Sequence
  derived and/or modified sequence
gccgggcgtgcggaggcggctgaggaggcgggaaggcggcagtggttgaaggggtgattgctgactagcggggagggagtgggcagcgatggtgatggcggcgaagaagggcccgggcccgggcggcggggtcagcgggggcaaggcggaggcggaggcggcctcggaggtgtggtgccgtcgggtgcgggagctgggtggctgcagccaggccgggaaccgccactgcttcgagtgcgcccagcgcggggtcacctacgtggatatcaccgtgggcagcttcgtgtgcaccacctgctccggcctcctgagagggctgaacccccctcatcgtgtcaagtcaatctccatgacaactttcactgagcctgaagtagtattcctgcaatcccgtggaaatgaggtttgccggaagatttggttgggtctgtttgatgctcggacatctttagtaccagattccagggatcctcagaaagtgaaggagtttctccaggaaaaatatgagaagaagagatggccagacaccttcccaaggaggctttgccaactttgatgcctttagcagtggccccagctcttctgtgtttggaagcctccctccagctggtcaagcctcgttccaggcccagccaactcctgcagggagcagccaggggactccatttggtgccactcccctggcacccgccagtcagccaaacagcctcgcagacgtgggcagcttcctgggacccggggtgcccgctgcaggtgttcctagcagcctcttcgggatggctggccaggtccccccgctccagtctgtcacgatgggcggcggcggcggcagcagcacagggctggcctttggagccttcactaaccctttcacagctcccgccgcccagtccccgctgccttccaccaacccgttccagcccaatggcttggcgccagggcccggctttgggatgagcagtgctgggcctggcttcccccaggcagtgccacccactggggcctttgccagctccttcccagcaccgctgttccccccgcagaccccgcttgttcagcagcagaatggctcttccttcggggacttaggatcagccaagttggggcagaggccactgagccagccagctgggatctccaccaaccccttcatgactggaccctcatcaagcccattcgcctccaaacctccaaccaccaaccccttcttgtagcactgtgtttttggggggcctcttccctgccttctggggcccctctgctccctagagctctggtgaccacttgcctgtgggcatttctatgggccttggggatggtggaggtgctaatgctttgcttggggcctacaggtgaaaggtggctgccctcagattccacaaagcctctctcccctccctcgtcccacccccacccaggcaggaagcccaggaggagtgcgggcagggcctgacctggaggagtgatggttgagggggagggatttttttcaaatgatcagtcccctgtggaacagctcttccctgggcctagctcgccagcgctgtgctcctcatggacgggagcgcagtggggaaggtaggggaaagatgaggcacagtgttgatggggcagtgaccagacagtcctgagacccagaaggcccaggtggcccaagtgctcttggtggcccagcttggccagcacacactttcctcctgcagcaccccctgctgaaggggtcccccattgttttgcttccccagcgcccaggatgagcggtttaccatcgagcttacccgggcccggctcctgtcaagcactttagttagctgttggtgtcatgtttggataccagtgttttatatttatacatagagaggattttct

SEQ ID NO: 161639 - DNA, 4796 bp, Artificial Sequence
  derived and/or modified sequence
ggatgccgcccgctcccgagcttctgtcaggggagccgggcgtgcggaggcggctgaggaggcgggaaggcggcagtggttgaaggggtgattgctgactagcggggagggagtgggcagcgatggtgatggcggcgaagaagggcccgggcccgggcggcggggtcagcgggggcaaggcggaggcggaggcggcctcggaggtgtggtgccgtcgggtgcgggagctgggtggctgcagccaggccgggaaccgccactgcttcgagtgcgcccagcgcggggtcacctacgtggatatcaccgtgggcagcttcgtgtgcaccacctgctccggcctcctgagagggctgaacccccctcatcgtgtcaagtcaatctccatgacaactttcactgagcctgaagtagtattcctgcaatcccgtggaaatgaggtttgccggaagatttggttgggtctgtttgatgctcggacatctttagtaccagattccagggatcctcagaaagtgaaggagtttctccaggaaaaatatgagaagaagagatggtatgtccccccagaccaagtcaaggggcccacttataccaaaggcagtgcctccacccctgtgcagggctccatcccagaagggaagccccttcggacacttctgggtgatcctgcaccgtctctctcagttgctgcctccacctcgagccagcccgtcagtcagtctcacgctcggacatcccaggcccggagcactcagccacctccccactcctctgtcaaaaaagccagtactgacctgctggctgacatcggtggagacccctttgctgcaccccagatggcaccagcttttgctgcattccctgcctttgggggccagacaccttcccaaggaggctttgccaactttgatgcctttagcagtggccccagctcttctgtgtttggaagcctccctccagctggtcaagcctcgttccaggcccagccaactcctgcagggagcagccaggggactccatttggtgccactcccctggcacccgccagtcagccaaacagcctcgcagacgtgggcagcttcctgggacccggggtgcccgctgcaggtgttcctagcagcctcttcgggatggctggccaggtccccccgctccagtctgtcacgatgggcggcggcggcggcagcagcacagggctggcctttggagccttcactaaccctttcacagctcccgccgcccagtccccgctgccttccaccaacccgttccagcccaatggcttggcgccagggcccggctttgggatgagcagtgctgggcctggcttcccccaggcagtgccacccactggggcctttgccagctccttcccagcaccgctgttccccccgcagaccccgcttgttcagcagcagaatggctcttccttcggggacttaggatcagccaagttggggcagaggccactgagccagccagctgggatctccaccaaccccttcatgactggaccctcatcaagcccattcgcctccaaacctccaaccaccaaccccttcttgtagcactgtgtttttggggggcctcttccctgccttctggggcccctctgctccctagagctctggtgaccacttgcctgtgggcatttctatgggccttggggatggtggaggtgctaatgctttgcttggggcctacaggtgaaaggtggctgccctcagattccacaaagcctctctcccctccctcgtcccacccccacccaggcaggaagcccaggaggagtgcgggcagggcctgacctggaggagtgatggttgagggggagggatttttttcaaatgatcagtcccctgtggaacagctcttccctgggcctagctcgccagcgctgtgctcctcatggacgggagcgcagtggggaaggtaggggaaagatgaggcacagtgttgatggggcagtgaccagacagtcctgagacccagaaggcccaggtggcccaagtgctcttggtggcccagcttggccagcacacactttcctcctgcagcaccccctgctgaaggggtcccccattgttttgcttccccagcgcccaggatgagcggtttaccatcgagcttacccgggcccggctcctgtcaagcactttagttagctgttggtgtcatgtttggataccagtgttttatatttatacatagagaggattttctaatatagcctattatatataaatagatctatctatatgcacatacatacatatatacacacacccagccgatctcccgctcccagactgctctcgtatgtggggaatgggatgaatccccatctgtgcctcgaccatcaaagccggagctccagggctggagggggggcagccatgtgtcctgacccccaccatccccagagcctgggttttccagggaaaggctttgtgcaattgcctggtctttttttttttttttttttctccatgtgcctccctgtccccaaatctctgcaccaaagctcattgcaggcaatgttggaaaagaactgcatttgaacgaaagagaaaacggcgcctgtggttttgcttcaggccactttgaggggttgcaggtcagtcaacatgactgatccttgacctggctctgctgggctggactgcctgggccagtgataatgctgccattggccagagacagggcagagcccgtccctgtctgaacaagagtcccgcattagcaatgagaagaagcgtggcgggagaggagccaccactgccggggactggagtttgttggatgtgaggggaatgcccactggggccagggtgggcaaaggaggttggtgccaatgtggtgctggaagtagacccctcctgggtctggaacattctctgccccaggctctttccacctggggatgttgtgacaacatccagctgtggtgtctgggctatttgtgtggtgacaagacagacctggtcagggggtgggtggcaaacacctcacctggctgggcagaggccaccttgctgtttggcccaaggccaggtgaggcccctccctttccaccattgccctggccccgtggccattcattcttggggtttgtctgagtcttccacagagagcagcaaagagatatgggagttgggtgatcagtgtatttactttgcagatttttctggaaataacctctagctgctgctatttgcaaggctgggattggcctccctgtcttttccaacaatcaggaccccatcctgtctgttcctgttcttctcccagcctctgccctccttctgtctcctgggtggtctcccgcttcgctcctggcctttgcatgttccatctcttctctttctcccctcttcgccaccctagattatctctgtgtccctctacctaattctcttaccagttctttcctttctgcttagagccggagggagggaagctggaatctgttatggtgtattagggggaggagcctttctgttatttccccccagcttccatcacccttcccttaatgccaggagcgccgaggtttggaactgaggctaaaccgaagggctttctcctgcttctgtcaccctgtgctgtctcccggcatctcctcactatctgggtccaggcccgggtcctccctgcagactccctcccctccagcccacaaggactccagcctgctggctggtgagagctggatgagcagtaagaagttaacgccaggtcagcctcgggccccagggttccctgggcacaggctgacactaggagctgctctccttggccggggacagctccagcagctcaggctccagccctccagtgagccgcctctcctggagagtagcaaagaatggagaaaggcctggcttgagaggaaatggagaaaacattgcctggtagctgcagattcaaacccaccacacacaccacggggctagagtgactcacctgggctcacaccaacttctggccaatgcagggaccatgctctgcagacagcagtcctctagcatggccccagcattcagccagtcggtcacctgtgggccatccccatgtgtgaggaagcaggagtcagccaccaagtgtctccacatcggagcttgcgggtcagacctgtgggccaggggatgggagcagggctgagggtaggggctgaatgtgtggctctgtccctgtgttgccttccacagaggagcaaggcctcaggctgaggaaggaggggcacgctggaacagcctagtctcctccccgtggattcccccaaacccataacattcttccataggggctgagaacgcagtgccccgtccctgacagggatgaaaagtgaacccctcaggtcaggagaggcagagttgaggttctgccacttcctgtccctggggagccactcaagttaccagggctaccggctgaaataaatcttttccgggtagggtcaagggcagtgtgttgccaaggcaactgatgtaggccagttgcgtgactccaggtttgtcctggtactcagtgggtccaatcacctggcattgatcacctggcattgatcagcacccaccccacccctgaggcttgcccagcccccaggccctcagatccctgctcttcctgcctttcctgcccatgtgtcacccagcacccaaggttcagtgacacagggtggtttggagctggtcactgtcatagcagctgtgatttcacaaggaagggtgctgcagggggacctggttgatggggagtgggaaggggaaggaataaagagatcttcctcaggt

SEQ ID NO: 161640 - DNA, 468 bp, Artificial Sequence
  derived and/or modified sequence
atggtaatggcagctaaaaagggcccaggtccgggagggggtgtatctgggggaaaggcagaagcagaagctgccagcgaagtgtggtgtagaagagttagagaactgggaggatgcagccaggcgggaaaccggcactgtttcgagtgtgctcagcggggagtgacctacgtcgatataactgttggaagcttcgtgtgcacgacttgtagtggcctgctcagggggttgaatccaccccatcgagtaaagtccatttctatgacaaccttcacagaacctgaagtggtctttttgcagagcagaggaaatgaggtctgccgtaagatttggctggggttgttcgatgcacggacctcactcgtgcccgatagcagggacccccagaaagttaaggagtttctccaggagaagtatgaaaagaagaggtggcctgataccttcccacgacgtctgtgtcagctctag

SEQ ID NO: 161641 - DNA, 1446 bp, Artificial Sequence
  derived and/or modified sequence
atggtgatggcagctaagaagggtccaggaccaggcggaggggtgtcgggaggcaaagccgaagcagaagccgcttcggaggtgtggtgtcgcagggttagagagttaggtggctgctcccaggctggcaacagacactgctttgaatgcgcccagcgaggagtcacttatgtggacattactgtcgggtcttttgtgtgtaccacatgtagtggactgttacgagggctgaaccccccacatagagtgaagtccatttcaatgactacattcacagagcccgaagtcgtgtttcttcagtcacgcggtaacgaggtttgtcggaaaatatggttgggcttgttcgacgcccgaacttctttggtaccagattccagagacccacagaaagtgaaggaatttctacaggaaaaatacgaaaaaaaaagatggtacgtgcccccagatcaggtgaagggccctacttatactaaaggcagcgcctctacacctgtgcaggggagtattccagaaggtaagcccttacgcaccctgctgggcgatccagcccctagtttgtccgtggctgccagcacatccagccagccagtctctcaatctcatgctcgtacctctcaggccaggagcactcagccacctccccattcgtccgtaaaaaaagccagcacagatctgctcgcggacattggaggcgaccctttcgcagcaccccaaatggccccagctttcgctgccttccccgctttcgggggtcagacaccctctcaggggggttttgccaatttcgacgctttcagctccgggccttcttccagtgtcttcggcagtttgccccctgcgggacaggcaagcttccaggctcagcccacccccgctggcagcagccagggcaccccctttggagccacgccacttgcccctgcttcacaaccaaattcgctcgccgatgtcggcagctttttgggtccaggcgtgcccgctgccggtgtgcccagcagtctgttcggcatggcaggacaggtcccccctcttcagtctgtcaccatggggggaggaggcggtagctccactggactcgcctttggtgctttcaccaaccctttcacagctcccgctgctcaatcgcccctgccctctactaacccgttccaacctaacgggctggccccagggccaggattcgggatgagtagcgcaggccctggattcccacaggccgtcccacctacaggcgcttttgcgtcttccttccccgctcctctttttcctccacagacacccctagtccaacagcagaacggcagtagttttggcgaccttggttccgcaaagttaggccagcgccctctgtcccagccagccggaatctctactaacccattcatgactggcccatcttctagcccatttgcatcaaaacctcccacaacaaacccatttctgtag

SEQ ID NO: 161642 - protein, 478 aa, Artificial Sequence
  derived and/or modified sequence
MFRLNSLSALAELAVGSRWYHGGSQPIQIRRRLMMVAFLGASAVTASTGLLWKRAHAESPPCVDNLKSDIGDKGKNKDEGDVCNHEKKTADLAPHPEEKKKKRSGFRDRKVMEYENRIRAYSTPDKIFRYFATLKVISEPGEAEVFMTPEDFVRSITPNEKQPEHLGLDQYIIKRFDGKNKKISQEREKFADEGSIFYTLGECGLISFSDYIFLTTVLSTPQRNFEIAFKMFDLNGDGEVDMEEFEQAISIIRSQTSMGMRHRDRPTTGNTLKSGLCSALTTYFFGADLKGKLTIKNFLEFQRKLQHDVLKLEFERHDPVDGRITERQFGGMLLAYSGVQSKKLTAMQRQLKKHFKEGKGLTFQEVENFFTFLKNINDVDTALSFYHMAGASLDKVTMQQVARTVAKVELSDHVCDVVFALFDCDGNGELSNKEFVSIMKQRLMRGLEKPKDMGFTRLMQAMWKCAQETAWDFALPKQ

SEQ ID NO: 161643 - DNA, 1437 bp, Artificial Sequence
  derived and/or modified sequence
atgttcagactgaacagcctgagcgccctggccgagctggccgtgggcagcagatggtaccacggcggcagccagcccatccagatcagaagaagactgatgatggtggccttcctgggcgccagcgccgtgaccgccagcaccggcctgctgtggaagagagcccacgccgagagccccccctgcgtggacaacctgaagagcgacatcggcgacaagggcaagaacaaggacgagggcgacgtgtgcaaccacgagaagaagaccgccgacctggccccccaccccgaggagaagaagaagaagagaagcggcttcagagacagaaaggtgatggagtacgagaacagaatcagagcctacagcacccccgacaagatcttcagatacttcgccaccctgaaggtgatcagcgagcccggcgaggccgaggtgttcatgacccccgaggacttcgtgagaagcatcacccccaacgagaagcagcccgagcacctgggcctggaccagtacatcatcaagagattcgacggcaagaacaagaagatcagccaggagagagagaagttcgccgacgagggcagcatcttctacaccctgggcgagtgcggcctgatcagcttcagcgactacatcttcctgaccaccgtgctgagcaccccccagagaaacttcgagatcgccttcaagatgttcgacctgaacggcgacggcgaggtggacatggaggagttcgagcaggccatcagcatcatcagaagccagaccagcatgggcatgagacacagagacagacccaccaccggcaacaccctgaagagcggcctgtgcagcgccctgaccacctacttcttcggcgccgacctgaagggcaagctgaccatcaagaacttcctggagttccagagaaagctgcagcacgacgtgctgaagctggagttcgagagacacgaccccgtggacggcagaatcaccgagagacagttcggcggcatgctgctggcctacagcggcgtgcagagcaagaagctgaccgccatgcagagacagctgaagaagcacttcaaggagggcaagggcctgaccttccaggaggtggagaacttcttcaccttcctgaagaacatcaacgacgtggacaccgccctgagcttctaccacatggccggcgccagcctggacaaggtgaccatgcagcaggtggccagaaccgtggccaaggtggagctgagcgaccacgtgtgcgacgtggtgttcgccctgttcgactgcgacggcaacggcgagctgagcaacaaggagttcgtgagcatcatgaagcagagactgatgagaggcctggagaagcccaaggacatgggcttcaccagactgatgcaggccatgtggaagtgcgcccaggagaccgcctgggacttcgccctgcccaagcagtag

SEQ ID NO: 161644 - DNA, 1437 bp, Artificial Sequence
  derived and/or modified sequence
atgtttaggctgaactctctttcggcactcgccgagctcgccgttggctctcgttggtaccatggaggcagccaaccgattcagatcagaagacggcttatgatggtggccttcctgggggccagtgccgtgaccgctagtactggtcttctgtggaagagagctcacgcggaaagccctccttgcgtcgataatctcaaatccgacattggagataagggcaagaataaggacgagggggatgtgtgcaatcacgagaagaagaccgctgacctagctccccacccagaggagaaaaagaagaagcggagcggatttagagacagaaaagttatggaatacgagaacagaataagggcctactcaacacccgacaagattttccgttatttcgccactctgaaagtgatttctgagcccggtgaggccgaggtgtttatgaccccagaggattttgtacgctctataacccccaatgagaaacagcctgaacaccttggcctggaccagtatatcattaaaaggttcgacggaaagaacaaaaaaataagccaggagagagaaaaattcgctgatgaaggttcaatcttttataccctcggagaatgcggcctaatctctttcagcgactacatttttctgaccacagtcctttccactccccagaggaacttcgaaatcgccttcaagatgttcgatctgaatggggacggggaggtggatatggaagagttcgagcaggccatttcaataattcggagccaaactagtatgggcatgcgacaccgagaccggcctacgaccggcaacaccctgaagtccggactctgctcggccctgacaacatacttttttggggcagaccttaaagggaagctgacgatcaaaaacttcttagagttccagcgcaagctgcagcacgacgtgcttaagctggaattcgaaaggcacgatcccgttgacggccgcattacagagcgccagttcggggggatgctgctcgcttactcgggagtgcagagcaaaaagctgactgcaatgcagaggcagctaaaaaaacatttcaaggagggtaagggtttgacattccaagaggtcgagaatttctttacctttctgaaaaacatcaatgatgtggacaccgccctgtcattttaccatatggcgggcgcctcactggataaggtcacaatgcagcaagtcgcaagaaccgtcgcaaaggttgaacttagcgaccacgtgtgcgatgtggtgttcgctctctttgactgtgatggcaacggggagctatctaataaggagttcgttagtatcatgaagcagaggctgatgcgaggcctagaaaagcctaaagacatgggtttcactaggctgatgcaggctatgtggaagtgtgcccaagagaccgcttgggatttcgcgctgccgaaacagtag

SEQ ID NO: 161645 - DNA, 1437 bp, Artificial Sequence
  derived and/or modified sequence
atgttccggctgaacagcctgagcgccctggccgagctggccgtgggcagccgctggtaccatggaggcagccagcccatccagatcagaagaaggctgatgatggtggccttcctgggcgccagcgctgtgacagccagcacaggcctgctgtggaagagggcccatgctgagagccccccctgtgtggacaacctgaagagtgacatcggggacaagggcaagaacaaggatgaaggagatgtgtgcaaccacgagaagaagacagctgacctggccccccaccctgaggagaagaagaagaagaggagcggcttccgggacaggaaggtgatggagtatgaaaatcgcatccgggcctacagcaccccagacaagatcttccgctactttgccaccctgaaggtgatcagcgagcccggggaggccgaggtgttcatgaccccagaggactttgtgcgcagcatcaccccaaatgagaagcagcctgagcacctgggcctggaccagtacatcatcaagagatttgatggcaagaacaagaagatcagccaggagcgggagaagtttgctgatgagggcagcatcttctacaccctgggggagtgtggcctcatctccttcagtgactacatcttcctgaccaccgtgctgagcaccccccagaggaactttgaaattgccttcaagatgtttgacctgaatggagatggagaggtggacatggaggagtttgagcaggccatcagcatcatccgcagccagacctccatgggcatgaggcaccgggaccggcccaccaccggcaacaccctgaagagcggcctgtgcagcgccctgaccacctacttctttggagctgacctgaagggcaagctgaccatcaagaacttcctggagttccagaggaagctgcagcatgatgtgctgaagctggagtttgaaagacatgaccctgtggatggccgcatcacagagcggcagtttggaggcatgctgctggcctacagcggcgtgcagagcaagaagctgacagccatgcagaggcagctgaagaagcacttcaaggagggcaagggcctgaccttccaggaggtggagaacttcttcaccttcctgaagaacatcaatgatgtggacacagccctgtccttctaccacatggccggggccagcctggacaaggtgaccatgcagcaggtggccaggacagtggccaaggtggagctgagtgaccacgtgtgtgatgtggtgtttgccctgtttgactgtgatggaaatggagagctgagcaacaaggagtttgtgtccatcatgaagcagaggctgatgaggggcctggagaagcccaaggacatgggcttcacccggctgatgcaggccatgtggaagtgtgcccaggagacagcctgggactttgccctgcccaagcagtag

SEQ ID NO: 161646 - DNA, 2425 bp, Artificial Sequence
  derived and/or modified sequence
aggcccagcggctaggagagtcacgtgagagtgggcggagggggtggaggtttgtctccgctgtttcatctctatggctgtcagaggtgggcggctttgaccgagaggctgctggagctcgtgtttggacgcgatgtttcgtctgaactcactttctgctttggcagaactggctgtgggttctcgatggtaccatggaggatcacagcccatccagatccggcgaagactaatgatggtggctttcctgggagcatctgcagtaactgcaagtactggtcttttgtggaagagggcccatgcagaatctccaccatgtgtagacaacctaaaaagtgacatcggtgataaagggaagaataaagatgaaggggatgtttgtaaccatgagaaaaagactgcagatcttgcccctcacccagaagagaaaaagaagaaacgttctggattcagagacagaaaagtgatggaatatgagaataggattcgagcctactccacgccagacaaaatcttccgatattttgccaccttgaaagtcatcagtgagcctggtgaagcagaagtgtttatgacaccagaagattttgtgcgatccataacacccaatgaaaaacaaccagaacacttgggtctggatcaatatataataaaacgctttgatggaaagaataagaaaatttcccaggaacgagaaaaatttgctgatgaaggcagtatattttacacccttggagaatgtgggctcatatccttttcagactacattttcctcacaactgttctttccactcctcagagaaattttgaaattgccttcaagatgtttgatttgaatggagatggagaagtagatatggaagaatttgaacaggcaattagcatcattcgctcccaaaccagtatgggtatgcgccacagagatcgtccaactactggcaacaccctcaagtctggcttgtgttcagccctcacaacctacttttttggagctgatctgaagggaaagctgacaatcaaaaacttcctcgaatttcagcgtaaactgcagcatgatgttctgaagcttgagtttgaacgccatgaccctgtggatgggagaattactgagaggcagtttggtggcatgctacttgcctacagtggggtgcagtccaagaagctgaccgccatgcagaggcagctcaagaagcacttcaaagaaggaaagggtctgacatttcaggaggtggagaacttctttactttcctaaagaacattaatgatgtggacactgcattgagtttttaccatatggctggagcatctcttgataaagtgaccatgcagcaggtggccaggacagtggctaaagtggagctctcagaccacgtgtgtgatgtggtgtttgcactctttgactgtgatggcaatggcgaactgagcaataaggaatttgtttccatcatgaagcaacggctgatgagaggcctggaaaagcccaaagacatgggtttcactcgcctcatgcaggccatgtggaaatgtgcacaggaaactgcctgggacttcgctttacccaaacagtaaccccacactgcaagaggggacccctccacccccagtaccctggaccccctccgcagagtctcggcagagccctttgtgctgctgcttctggaagtagtcccccttcctcccgggatgacctcaggactctgtcggtttcccctctttacccttccccgtccccgtgttctgctgggctctgattctgcccaatgagtatccccataggttctcaaaaacatgaacaagtctgtaaagctcagacatttgtcagcctcaacagcaccacccattcaagcatcctgtggataaagaattcagggaaccatccacacacctgccaaccctgggaagcatccagttctcaaatcgtttttgctatggatttatactaacaagaacattccttgacttccctcctgctggtgttttaaagccacaagtagggaagatatctggcaggcagaaagaagtctgtgatgataaacaatgatgaggatgacctaggcaccctacgctagtgtgagaagcctgcgccccaggaaggatctgtgttagtccctgggatggctccaaggcctgctctaggaaggcagcatgctcagtgggaacacagcaagattcagaatttaaagtagttgcttcatggctctgtgcactcccttttcttcctcgcagcctccctaagatgactccagtgtgaccctgtgcttagtgagcaatagtgattgagctcatgttccctgcaagtgccatttcctctccaggatgggcctctaaagctgaggcctggctcagagcctgtttgccctctgtcttaaacaattgtaaatatcacttaaattataaccatttgcaataaacatccccaaagtt

SEQ ID NO: 161647 - DNA, 1437 bp, Artificial Sequence
  derived and/or modified sequence
atgttccggctgaacagcctgagcgccctggccgagctggccgtgggcagcagatggtatcatggtggttcacagcctatccagatccgaagacgcctgatgatggtggctttcctcggcgcttctgccgtgaccgccagcaccggactgctgtggaagcgcgcccacgcagaaagtcccccatgtgtggacaatttaaaaagcgacataggggataaggggaaaaacaaggacgagggcgatgtttgcaatcacgagaaaaaaacggctgatctcgcccctcatcctgaagaaaaaaaaaaaaaaagatctgggttcagagacaggaaggtgatggagtacgaaaatagaatccgagcttactctaccccagacaaaattttcagatacttcgccaccttaaaagttatctccgaacccggggaggctgaggtttttatgactcccgaagatttcgtgcgaagcataaccccgaatgagaagcagccagaacatctgggactggaccagtacataataaagaggttcgacggcaaaaataagaagatttcacaggagagagagaagttcgccgatgaagggtcaatcttctacacccttggcgaatgtgggctcatcagttttagtgactacattttcttaaccacagtgctgagcactccacagcgcaatttcgaaatagcgttcaaaatgtttgacctgaacggcgacggcgaggtggacatggaagagtttgagcaggctatctcgattatcaggtcacaaacatccatgggcatgcggcatagggacaggccaacaaccggtaatactctgaagtctggactatgctccgctcttaccacctacttcttcggagctgatcttaagggaaaactgactattaaaaattttctggaattccagaggaagctacaacatgatgtgctgaaattggagtttgagcgccatgatccagttgacggacgcattaccgagagacagttcggggggatgctgcttgcttactccggagtgcagagcaagaaacttaccgcaatgcaaagacagctgaaaaagcacttcaaggaaggcaaagggctgaccttccaggaggtggagaatttcttcacattccttaagaacattaacgacgtcgacacggccttaagcttctatcatatggcaggtgcttctctcgataaggtgactatgcaacaggtcgcccgcaccgtggccaaagtggagctgagcgatcacgtctgcgacgtggtcttcgccctgttcgactgcgacggaaacggcgaattgagtaacaaggagttcgtcagtattatgaaacagaggctaatgcgggggttagaaaagcccaaagacatggggtttactaggctgatgcaggcgatgtggaaatgtgcccaggaaacagcttgggacttcgctttgcctaagcagtag

SEQ ID NO: 161648 - DNA, 1437 bp, Artificial Sequence
  derived and/or modified sequence
atgtttcggctgaactcccttagcgccttagccgagctcgccgtggggtcaagatggtatcacgggggtagtcaaccgattcagattcgcaggcggctgatgatggtcgctttcttgggtgcttcagcagtgactgcgtccaccggtctcctgtggaagagagcacacgccgagagccctccttgcgtcgacaatctgaagtctgacatcggcgacaagggaaagaataaggacgagggagacgtgtgcaatcatgagaaaaagaccgcagatcttgcccctcaccccgaggagaaaaaaaaaaaacgctccggcttccgcgatcgcaaagtgatggaatacgagaatcgtattcgggcatactctacaccagacaagattttcagatactttgccactctgaaggtgatctcagaacccggagaagcggaggtcttcatgacccctgaagattttgtcagaagcattacaccaaatgaaaagcagcccgagcaccttggcctcgatcagtatattatcaaacgcttcgacggaaaaaacaagaagatatcacaggagcgggaaaagttcgctgacgaggggtccattttctatacactcggggaatgcggactcatcagttttagcgactacatcttcctgacaaccgtgctgagcacacctcaacgcaatttcgagatcgcatttaaaatgtttgatctcaatggcgacggagaagttgatatggaggagttcgagcaggccatttccattatacgatcgcagactagtatggggatgcgccatcgggaccggccaacgactggcaacacacttaagagtggcctgtgttccgctcttactacctacttctttggagccgatcttaaaggaaaattgactatcaagaactttttagaattccagaggaagttgcagcacgacgtgctgaaactagagtttgaacgtcacgacccagtggacggcagaattaccgagaggcagtttgggggaatgctgcttgcctattcgggagtgcagtcgaaaaagctgactgccatgcaacgccagctgaaaaaacattttaaagaaggtaagggtctgactttccaggaagtcgagaacttcttcacctttctgaagaatattaacgatgtcgacaccgctctcagcttttaccatatggctggcgcaagcttggacaaggtaaccatgcagcaggtggccaggaccgtcgccaaagtcgaactgagcgaccacgtgtgcgacgtggtgtttgcactgttcgattgtgatggcaatggggagttgtcaaacaaggaattcgtgtctattatgaagcagcgtctcatgcgcggattagagaagccaaaggacatgggtttcactcggttgatgcaagctatgtggaaatgcgcccaggagacagcctgggacttcgcccttccgaagcagtag

SEQ ID NO: 161649 - protein, 323 aa, Artificial Sequence
  derived and/or modified sequence
MGLFDRGVQMLLTTVGAFAAFSLMTIAVGTDYWLYSRGVCKTKSVSENETSKKNEEVMTHSGLWRTCCLEGNFKGLCKQIDHFPEDADYEADTAEYFLRAVRASSIFPILSVILLFMGGLCIAASEFYKTRHNIILSAGIFFVSAGLSNIIGIIVYISANAGDPSKSDSKKNSYSYGWSFYFGALSFIIAEMVGVLAVHMFIDRHKQLRATARATDYLQASAITRIPSYRYRYQRRSRSSSRSTEPSHSRDASPVGIKGFNTLPSTEISMYTLSRDPLKAATTPTATYNSDRDNSFLQVHNCIQKENKDSLHSNTANRRTTPV

SEQ ID NO: 161650 - DNA, 66 bp, Artificial Sequence
  derived and/or modified sequence
atgacccacgacaagagctggagaagatgcagcatcagcggcagcaccaagtgcagatgcggctag

SEQ ID NO: 161651 - DNA, 63 bp, Artificial Sequence
  derived and/or modified sequence
atgacccacgacaagagctggagaagatgcagcatcagcggcagcaccaagtgcagatgctag

SEQ ID NO: 161652 - DNA, 66 bp, Artificial Sequence
  derived and/or modified sequence
atgacccacgataagtcctggaggcgctgcagcatatctgggtcaacaaagtgtagatgcggttag

SEQ ID NO: 161653 - DNA, 63 bp, Artificial Sequence
  derived and/or modified sequence
atgacacacgacaaaagctggcggaggtgctccataagtgggtcgacaaaatgtagatgttag

SEQ ID NO: 161654 - DNA, 66 bp, Artificial Sequence
  derived and/or modified sequence
atgacccatgacaagtcctggaggcgctgcagcatcagcggcagcaccaagtgccgctgtggctag

SEQ ID NO: 161655 - DNA, 63 bp, Artificial Sequence
  derived and/or modified sequence
atgacccatgacaagtcctggaggcgctgcagcatcagcggcagcaccaagtgccgctgctag

SEQ ID NO: 161656 - DNA, 66 bp, Artificial Sequence
  derived and/or modified sequence
atgacccacgacaagagctggcggcggtgcagcatcagcggcagcaccaagtgccgatgcggatag

SEQ ID NO: 161657 - DNA, 63 bp, Artificial Sequence
  derived and/or modified sequence
atgacccacgacaagagctggcggcggtgcagcatcagcggcagcactaaatgcaggtgctag

SEQ ID NO: 161658 - DNA, 66 bp, Artificial Sequence
  derived and/or modified sequence
atgacacacgataaatcatggcggagatgctctatatcagggtctactaaatgtaggtgcggatag

SEQ ID NO: 161659 - DNA, 63 bp, Artificial Sequence
  derived and/or modified sequence
atgacccatgacaagtcatggcgtcgctgtagtataagcgggagtactaagtgcaggtgctag

SEQ ID NO: 161660 - DNA, 972 bp, Artificial Sequence
  derived and/or modified sequence
atggggctatttgatagaggcgtgcaaatgttgctgacaacagtcggagcatttgccgccttttcactaatgactatagctgtgggaacggactactggctttactctcgaggcgtctgcaaaaccaagagcgttagcgagaatgaaactagcaaaaaaaacgaagaagtgatgacccactccggactttggaggacatgttgtctcgagggaaatttcaagggcctctgtaaacagatcgaccacttcccagaagatgctgactacgaggcagataccgcagagtatttcttgagagccgtgcgcgcctcgagcatctttcctatcctttccgttatcctgctcttcatggggggcctttgcatcgcagcttcggaattctacaagacgcgccataacatcatactctctgcaggcattttctttgtcagtgcgggactctctaacatcatcggaataatagtgtacatcagcgccaatgccggagacccctccaaaagcgacagcaagaagaatagttactcttacggctggagcttctatttcggggccctttcttttatcattgcggaaatggtgggggttctcgctgtacatatgttcatcgatcgccataagcagctgcgcgcaactgctcgcgctacggactatcttcaggccagcgccataaccagaattccttcctatcgctatagataccagcgtcggagtagatcaagttcccggagcacagagccatcccacagcagggatgccagcccagtgggcataaagggctttaatactctccctagtacagagatatccatgtatacacttagtcgagatcctttgaaggcagccacgacgcctaccgccacgtataattccgacagagacaatagctttctgcaggtgcacaactgtatccaaaaagaaaataaggattcgttgcacagcaatacagcaaaccggcggacaacccccgtttag

SEQ ID NO: 161661 - DNA, 972 bp, Artificial Sequence
  derived and/or modified sequence
atgggcctgtttgacagaggagtgcagatgctgctgaccaccgtgggcgcctttgctgccttcagcctgatgaccatcgctgtgggcacagactactggctgtacagccggggcgtgtgcaagaccaagtctgtgtctgaaaatgagaccagcaagaagaatgaggaggtgatgacccacagcggcctgtggaggacctgctgcctggagggcaacttcaagggcctgtgcaagcagattgaccacttcccagaagatgctgactatgaagctgacacagctgagtacttcctgcgggctgtgcgggccagcagcatcttccccatcctgagcgtcatcctgctcttcatgggcggcctgtgcatcgccgccagcgagttctacaagaccaggcacaacatcatcctgtctgctggcatcttctttgtgtctgctggcctgagcaacatcatcggcatcatcgtgtacatcagcgccaatgctggggaccccagcaagagtgacagcaagaagaacagctacagctatggctggagcttctactttggagccctgtccttcatcatcgccgagatggtgggcgtgctggccgtgcacatgttcatcgacagacacaagcagctgcgggccacagcccgggccacagactacctgcaggccagcgccatcacccgcatccccagctaccgctaccgctaccagaggaggagccgcagcagcagccgcagcacagagcccagccacagcagagatgccagccctgtgggcatcaagggcttcaacaccctgcccagcacagagatctccatgtacaccctgagccgggaccccctgaaggccgccaccacccccacagccacctacaacagcgaccgggacaacagcttcctgcaggtgcacaactgcatccagaaggagaacaaggacagcctgcacagcaacacagccaacagaaggaccacccctgtgtag

SEQ ID NO: 161662 - DNA, 972 bp, Artificial Sequence
  derived and/or modified sequence
atgggcctgttcgaccggggcgtgcagatgctgctgaccaccgtgggcgcgtttgctgcattcagcctgatgaccattgcagttggaacagactattggctgtatagcagaggcgtatgtaagactaaaagcgtgtccgagaatgagacaagcaagaaaaatgaggaggttatgacccattcgggtctgtggagaacctgctgcttggagggaaacttcaaagggctctgcaagcaaatcgaccacttccccgaggacgctgactatgaggctgataccgcagaatacttcctgcgggccgttcgggctagctcgatcttccctattttgagcgtcatcctcttattcatgggcggcttgtgcatcgctgcatcagagttttataaaacaagacacaatataattctgagtgccgggattttcttcgttagtgccgggctaagcaatatcatcggcatcattgtgtacatctcagctaacgccggagatccgtcaaaaagtgattccaagaagaacagttatagctatggctggagcttctattttggtgccctttccttcatcatcgcagagatggttggggttctcgccgtgcacatgtttattgatcgccacaagcaattaagggccaccgcaagagcaaccgactatttgcaggcatcagctatcacgcgaataccctcatatcggtaccgctaccagaggcggagtcgatctagcagtcggtcaacagaaccttctcattcccgggatgcgtcacccgtgggtattaagggtttcaataccctgccctcgactgaaattagtatgtacaccctgtcccgtgacccgcttaaggcggccactactcctactgccacctataactccgaccgagataactccttcctgcaggtccacaattgcatacaaaaggaaaacaaagactcactgcactctaacaccgctaacaggagaactacacctgtttag

SEQ ID NO: 161663 - DNA, 972 bp, Artificial Sequence
  derived and/or modified sequence
atgggactcttcgatcggggagtgcagatgttactcaccacagttggcgctttcgccgcttttagtctcatgaccatcgctgttgggaccgattattggctctattcccgcggtgtctgtaagacaaagagcgttagcgaaaacgagacctctaagaagaatgaggaagtgatgacccacagtggactttggagaacatgctgcctcgaaggcaacttcaaggggctctgtaaacaaattgatcacttccccgaggatgcagattatgaggcagacacagccgaatacttcctcagagctgtcagggcgtcttccattttcccaatactaagtgtcattctgctgttcatggggggtttgtgtattgctgcttctgagttctataaaacccggcacaacatcattctgtctgcgggtatttttttcgtttcagctgggctgtccaatatcatcggcatcatcgtgtacatcagtgccaacgcgggagatccttccaaaagcgactctaagaaaaatagctacagctatgggtggtccttctattttggagctttgagcttcattattgcagagatggtgggcgtgctggctgtgcacatgttcattgatcgccacaaacagctgcgggcaactgctagggcgacagactacttgcaagccagcgcgattactaggatcccatcatatagatatcgataccagcgcagatcacggtcctcttcccggagtacggagcccagccactcaagagacgcatctcctgtgggtattaaagggtttaacactctgccctccacggagatcagtatgtatactctgtccagggatcccttaaaggcggctactacgccaacagccacatacaacagtgacagagataatagtttcctgcaagtgcacaattgcatacagaaggaaaacaaagactcattgcattccaataccgctaaccgcaggacaacacccgtgtag

SEQ ID NO: 161664 - DNA, 2384 bp, Artificial Sequence
  derived and/or modified sequence
gcggcgcagggagctgtccggttcagcaccacccgtaatgcagtaggtgggagcgcctccgcgggcgcccagccggtagcgagtggggggcaggcgcgcggcccaccctgcagcaagacgccggctccctcgtttccaggagctttgcagatagggggagggaaatccgcctcgattctccaggagaaaccccctctctcccccacttcgccaacactacccccgccaccaacaacaataaccgccgccgctgctcgtcctgctgccgccgccgccgccgcgcctgcccgccctgccgccgccgccgccgccgccgccgctgcccgggcaaaaccatggaaagcgagacccccgcacctgtgcagctgagctcaagggcttacagaatactgggaagtctggtctgaaacgaaagcgccgagaccccccaaggaagagaactggcgaagcaaaggattttcatggcgcaggccgcagagccgagaacgaagaccgaaggttgcatctcggctctcacagtctctaactgtctaggtcccgaccatgagaaatggtgttgagaattcggctgttccctggttcactgtggaagccatctccaaattaactatcacatatggaaactggagaccagaattttagaaaaagagattaaggcatctcacttgggggggtggggggtgtctttttattttttttttccttttctttttaaaaaaaaaacactgcaactggaacagtttctgatctcaaaaggcaagcctcttcccgtgtgatctttataatttacactcttttccgtgagctttcttacctccctttttttataactctccatattctctattcatacatatatccattatattagtagtggaataatttttatttttatttattttttttggctttagtacttgcaccctcacacacactctcccgagaaccagaagtcggttgggtgtttatataatgaagaattatggggctgtttgatcgaggtgttcaaatgcttttaaccaccgttggtgctttcgctgccttcagcctgatgaccatagctgtgggaaccgactattggctctactccagaggggtttgcaagaccaaaagtgtcagtgagaatgaaaccagcaaaaagaacgaggaagttatgacccattccggattatggagaacctgctgcctagaagggaatttcaaaggtctgtgcaagcaaattgatcacttcccagaggatgcagattacgaagctgacacagcagaatatttcctccgggccgtgagggcctccagcattttcccaatcctgagtgtgattctgcttttcatgggtggcctctgcatcgcagccagcgagttctacaaaactcgacacaacatcatcctgagtgccggcatcttcttcgtgtctgcaggtctgagtaacatcattggcatcatagtgtacatatctgccaatgccggagacccctccaagagcgactccaaaaagaatagttactcatacggctggtccttctacttcggggccctgtccttcatcatcgccgagatggtcggggtgctggcggtgcacatgtttatcgaccggcacaaacagctgcgggccacggcccgcgccacggactacctccaggcctctgccatcacccgcatccccagctaccgctaccgctaccagcgccgcagccgctccagctcgcgctccacggagccctcacactccagggacgcctcccccgtgggcatcaagggcttcaacaccctgccgtccacggagatctccatgtacacgctcagcagggaccccctgaaggccgccaccacgcccaccgccacctacaactccgacagggataacagcttcctccaggttcacaactgtatccagaaggagaacaaggactctctccactccaacacagccaaccgccggaccacccccgtataaagaccgcgggcctcgccagaagaccgcgggaggagggcgcggtccccgggggcggggcggggcggggagacccagaccctccgctgggagaccttccaaaagcaaaaacaaaaaacaaaaaaaacaaaaaaacaaaaaacaaaaaaacacacacacacaaaaaaagagaaaaaacataacaagtaaattttaaaaaaaagaacaaaatataagaggaacaaagaagcaaaacaacaggaaatgtgggaaaatataaacgagggaagaaaacaaactttaaaaaaaagcgagagggataaaaaattaaaaatagaaaataaatctaaaagaaaatgcatgatttcccatgtaccattattttaacatttaataaaaatcaatttaaatgaaaaaataaaagggaaccaagataacattaaagcaaaaaaaa

SEQ ID NO: 161665 - DNA, 972 bp, Artificial Sequence
  derived and/or modified sequence
atgggcctgttcgacagaggcgtgcagatgctgctgaccaccgtgggcgccttcgccgccttcagcctgatgaccatcgccgtgggcaccgactactggctgtacagcagaggcgtgtgcaagaccaagagcgtgagcgagaacgagaccagcaagaagaacgaggaggtgatgacccacagcggcctgtggagaacctgctgcctggagggcaacttcaagggcctgtgcaagcagatcgaccacttccccgaggacgccgactacgaggccgacaccgccgagtacttcctgagagccgtgagagccagcagcatcttccccatcctgagcgtgatcctgctgttcatgggcggcctgtgcatcgccgccagcgagttctacaagaccagacacaacatcatcctgagcgccggcatcttcttcgtgagcgccggcctgagcaacatcatcggcatcatcgtgtacatcagcgccaacgccggcgaccccagcaagagcgacagcaagaagaacagctacagctacggctggagcttctacttcggcgccctgagcttcatcatcgccgagatggtgggcgtgctggccgtgcacatgttcatcgacagacacaagcagctgagagccaccgccagagccaccgactacctgcaggccagcgccatcaccagaatccccagctacagatacagataccagagaagaagcagaagcagcagcagaagcaccgagcccagccacagcagagacgccagccccgtgggcatcaagggcttcaacaccctgcccagcaccgagatcagcatgtacaccctgagcagagaccccctgaaggccgccaccacccccaccgccacctacaacagcgacagagacaacagcttcctgcaggtgcacaactgcatccagaaggagaacaaggacagcctgcacagcaacaccgccaacagaagaaccacccccgtgtag

SEQ ID NO: 161666 - protein, 451 aa, Artificial Sequence [sequence omitted]

SEQ ID NO: 161667 - DNA, 1356 bp, Artificial Sequence
  derived and/or modified sequence
atgagagagtgcatcagcatccacgtgggccaggccggcgtgcagatcggcaacgcctgctgggagctgtactgcctggagcacggcatccagcccgacggccagatgcccagcgacaagaccatcggcggcggcgacgacagcttcaacaccttcttcagcgagaccggcgccggcaagcacgtgcccagagccgtgttcgtggacctggagcccaccgtgatcgacgaggtgagaaccggcacctacagacagctgttccaccccgagcagctgatcaccggcaaggaggacgccgccaacaactacgccagaggccactacaccatcggcaaggagatcatcgacctggtgctggacagaatcagaaagctggccgaccagtgcaccggcctgcagggcttcctggtgttccacagcttcggcggcggcaccggcagcggcttcaccagcctgctgatggagagactgagcgtggactacggcaagaagagcaagctggagttcagcatctaccccgccccccaggtgagcaccgccgtggtggagccctacaacagcatcctgaccacccacaccaccctggagcacagcgactgcgccttcatggtggacaacgaggccatctacgacatctgcagaagaaacctggacatcgagagacccacctacaccaacctgaacagactgatcagccagatcgtgagcagcatcaccgccagcctgagattcgacggcgccctgaacgtggacctgaccgagttccagaccaacctggtgccctaccccagaatccacttccccctggccacctacgcccccgtgatcagcgccgagaaggcctaccacgagcagctgagcgtggccgagatcaccaacgcctgcttcgagcccgccaaccagatggtgaagtgcgaccccagacacggcaagtacatggcctgctgcctgctgtacagaggcgacgtggtgcccaaggacgtgaacgccgccatcgccaccatcaagaccaagagaagcatccagttcgtggactggtgccccaccggcttcaaggtgggcatcaactaccagccccccaccgtggtgcccggcggcgacctggccaaggtgcagagagccgtgtgcatgctgagcaacaccaccgccatcgccgaggcctgggccagactggaccacaagttcgacctgatgtacgccaagagagccttcgtgcactggtacgtgggcgagggcatggaggagggcgagttcagcgaggccagagaggacatggccgccctggagaaggactacgaggaggtgggcgtggacagcgtggagggcgagggcgaggaggagggcgaggagtactag

SEQ ID NO: 161668 - DNA, 1627 bp, Artificial Sequence
  derived and/or modified sequence
agtgcgttacttacctcgactcttagcttgtcggggacggtaaccgggacccggtgtctgctcctgtcgccttcgcctcctaatccctagccactatgcgtgagtgcatctccatccacgttggccaggctggtgtccagattggcaatgcctgctgggagctctactgcctggaacacggcatccagcccgatggccagatgccaagtgacaagaccattgggggaggagatgactccttcaacaccttcttcagtgagacgggcgctggcaagcacgtgccccgggctgtgtttgtagacttggaacccacagtcattgatgaagttcgcactggcacctaccgccagctcttccaccctgagcagctcatcacaggcaaggaagatgctgccaataactatgcccgagggcactacaccattggcaaggagatcattgaccttgtgttggaccgaattcgcaagctggctgaccagtgcaccggtcttcagggcttcttggttttccacagctttggtgggggaactggttctgggttcacctccctgctcatggaacgtctctcagttgattatggcaagaagtccaagctggagttctccatttacccagcaccccaggtttccacagctgtagttgagccctacaactccatcctcaccacccacaccaccctggagcactctgattgtgccttcatggtagacaatgaggccatctatgacatctgtcgtagaaacctcgatatcgagcgcccaacctacactaaccttaaccgccttattagccagattgtgtcctccatcactgcttccctgagatttgatggagccctgaatgttgacctgacagaattccagaccaacctggtgccctacccccgcatccacttccctctggccacatatgcccctgtcatctctgctgagaaagcctaccatgaacagctttctgtagcagagatcaccaatgcttgctttgagccagccaaccagatggtgaaatgtgaccctcgccatggtaaatacatggcttgctgcctgttgtaccgtggtgacgtggttcccaaagatgtcaatgctgccattgccaccatcaaaaccaagcgcagcatccagtttgtggattggtgccccactggcttcaaggttggcatcaactaccagcctcccactgtggtgcctggtggagacctggccaaggtacagagagctgtgtgcatgctgagcaacaccacagccattgctgaggcctgggctcgcctggaccacaagtttgacctgatgtatgccaagcgtgcctttgttcactggtacgtgggtgaggggatggaggaaggcgagttttcagaggcccgtgaagatatggctgcccttgagaaggattatgaggaggttggtgtggattctgttgaaggagagggtgaggaagaaggagaggaatactaattatccattccttttggccctgcagcatgtcatgctcccagaatttcagcttcagcttaactgacagacgttaaagctttctggttagattgttttcacttggtgatcatgtcttttccatgtgtacctgtaatatttttccatcatatctcaaagtaaagtcattaacatcaaaa

SEQ ID NO: 161669 - DNA, 1356 bp, Artificial Sequence
  derived and/or modified sequence
atgcgcgaatgtataagcatccacgtcgggcaggctggtgtgcaaattggaaacgcctgctgggagctttattgtcttgagcatgggatacagcctgatggccagatgccttccgacaaaaccattgggggaggagatgatagtttcaacaccttctttagcgaaaccggagcaggcaagcacgtgccacgggccgtctttgtggacctagaaccgacagtcatcgatgaggtgagaacgggcacctaccggcagttatttcaccccgagcagctgattacgggaaaggaggacgcagcaaacaattacgcccgcggacactacactatcgggaaggaaattattgatcttgtgttagatcggatccggaaactggctgaccaatgcaccggcctgcagggctttctagttttccattcgttcgggggtggcacagggtcagggttcactagcttactcatggagcggcttagcgtagattacggcaaaaagagcaaacttgagttcagcatttatcccgctcctcaagtaagcacagcagtggtggaaccttataattctatcttaaccacccacacgacacttgagcacagcgattgcgcatttatggttgacaatgaagctatctatgacatctgtcgcagaaacttggatattgagaggcctacttacaccaatctaaacaggctgatctctcagatcgtgagctccattactgctagcctgaggtttgatggcgcccttaatgtcgacttgaccgaattccaaacaaacctggttccttacccaaggatccatttcccccttgccacatacgcccctgtcatctcggcggaaaaggcctatcatgaacaactgtccgtcgccgagatcacaaatgcctgttttgagcctgccaatcagatggtcaagtgcgatcccaggcatggaaaatatatggcctgttgtttactgtataggggtgacgtggttcctaaagatgtgaacgccgctattgctactattaaaacgaagcgctccatccagtttgtcgactggtgtcccactggtttcaaagtgggcatcaattaccagcctccaactgtcgtcccgggcggcgacttggccaaggtgcaaagagctgtgtgtatgttgagcaacaccacagcgatcgcagaggcctgggcccgcctcgatcacaaatttgacttgatgtacgctaagagggcttttgttcattggtacgtcggcgaaggaatggaggaaggagaatttagtgaagctcgcgaagacatggctgccctcgagaaagattacgaagaagtaggggtggactctgtggagggcgagggtgaagaggagggagaagaatactag

SEQ ID NO: 161670 - DNA, 1356 bp, Artificial Sequence
  derived and/or modified sequence
atgagggagtgcatcagcatccacgtgggccaggccggcgtgcagattggaaatgcctgctgggagctgtactgcctggagcacggcatccagccagatggccagatgcccagcgacaagaccatcggcggcggagatgacagcttcaacaccttcttcagcgagaccggggccggcaagcacgtgcccagggctgtgtttgtggacctggagcccaccgtgattgatgaggtgaggacaggcacctaccggcagctgttccaccctgagcagctgatcaccgggaaggaggatgctgccaacaactatgcccggggccactacaccatcggcaaggagatcatcgacctggtgctggaccgcatcaggaagctggccgaccagtgcaccggcctgcagggcttcctggtgttccacagctttggaggcggcactggaagtggcttcaccagcctgctgatggagcggctgtctgtggactatggcaagaagagcaagctggagttcagcatctacccagccccccaggtgtccacagctgtggtggagccctacaacagcatcctgaccacccacaccaccctggagcacagcgactgtgccttcatggtggacaatgaggccatctatgacatctgcagaagaaacctggacatcgagcggcccacctacaccaacctgaacagactcatcagccagatcgtgagcagcatcacagccagcctgcgctttgatggagccctgaatgtggacctgacagagttccagaccaacctggtgccctacccccgcatccacttccccctggccacctacgcccctgtgatctctgctgagaaggcctaccacgagcagctgtctgtggccgagatcaccaatgcctgctttgagcccgccaaccagatggtgaagtgtgaccccaggcatggcaagtacatggcctgctgcctgctgtacagaggagatgtggtgcccaaggatgtgaatgctgccatcgccaccatcaagaccaagaggagcatccagtttgtggactggtgccccaccggcttcaaggtgggcatcaactaccagcccccaacagtggtgcctggaggagacctggccaaggtgcagagagctgtgtgcatgctgagcaacaccacagccatcgccgaggcctgggcccggctggaccacaagtttgacctgatgtatgccaagagggcctttgtgcactggtacgtgggggagggcatggaggagggggagttcagcgaggcccgggaggacatggccgccctggagaaggactatgaggaggtgggcgtggacagcgtggagggggagggggaggaggagggggaggagtactag

SEQ ID NO: 161671 - DNA, 1356 bp, Artificial Sequence
  derived and/or modified sequence
atgcgggagtgcatcagcatccacgtgggccaggccggcgtgcagatcggcaatgcctgctgggagctgtactgcctggagcacggcatccagcccgacggtcagatgccttcagacaagactatcggaggaggagatgactccttcaacacctttttctcagagacaggcgcggggaagcatgtgccccgcgcagttttcgttgatttagagccaaccgtgattgacgaagtcaggactggaacatatagacagctatttcatcctgagcagctaataaccggaaaagaagatgccgctaataactacgcaagaggccattacaccattggcaaggagatcatcgatctggtgctggatagaatcaggaaactggcagatcagtgcactggattgcaaggattcctggtcttccacagcttcggaggcggaactggctccggcttcactagtctacttatggaaaggctgagcgtcgactatggaaagaaatccaagctcgagttctctatctacccagcaccccaggtgagtactgcagtagttgaaccatacaactctatcctgaccacgcatacaacactggaacatagcgattgcgcatttatggtggacaacgaagcaatttatgatatctgtcggcgaaatctggatattgagaggccaacctatactaatttgaatcgattgataagccaaatcgtgtcaagcattacagcttccttgcgattcgatggtgcactcaatgttgatctgaccgagttccagacaaaccttgtgccttacccccgcattcacttcccactggccacctacgcacccgtcatctctgccgagaaggcctaccacgaacagttatccgttgccgaaatcactaacgcttgtttcgagccggctaatcagatggtgaaatgtgatccccgccacggtaaatacatggcctgttgtctgctttacaggggggatgtagtccctaaagatgtcaatgccgccatcgctacaataaaaacaaaaaggtcgatacagttcgtggactggtgtcctaccggattcaaagtcggtattaactaccaacctcctaccgtcgtgcctggaggcgacttagccaaggtgcagagggctgtgtgcatgctgtccaacaccacggcaatcgctgaggcttgggcaaggttggatcataaatttgatctgatgtacgctaaaagggcatttgtccattggtacgtgggagagggtatggaggagggggagttctctgaggctcgcgaagacatggctgctctcgagaaggactatgaggaggtgggagttgactcagtggaaggggagggagaggaggagggagaggaatactag

SEQ ID NO: 161672 - DNA, 1356 bp, Artificial Sequence
  derived and/or modified sequence
atgcgggaatgcatctccattcatgtcggtcaggccggagttcagattggcaatgcctgttgggagctttactgtctggaacacggcattcagcctgacggacagatgcctagcgataagaccattggcggaggagacgattcgttcaacacctttttctctgagacaggagcagggaagcatgtgcccagagcagtatttgttgacttggagccgactgtcatcgacgaagtcaggacaggcacgtaccgccagctctttcaccccgaacaattgataaccgggaaagaggacgcagcaaacaattatgcccgagggcactatacaatcggcaaagaaatcatagatcttgtcctggaccgaattcgcaaactggcagaccaatgtacaggcctccagggattcctggtattccacagtttcgggggaggaaccgggtccggattcacatcactcctgatggaaaggttgagcgtggactacggcaagaaatccaagttggaattttcaatctatcccgcaccccaggtgagcaccgcggttgttgaaccttataacagcatcctcacgacccatacgactctcgagcattcagactgtgcatttatggtggataatgaagctatctacgacatatgccggcgaaaccttgatatcgagcgacccacatataccaacctcaatcggctgatatctcaaattgtctcatcaataactgcttccctgaggtttgacggtgctctcaatgtcgacctcactgaattccagactaatttagtcccttaccctaggatacattttccactggccacatatgccccagtgatctccgcggagaaggcctaccacgaacagctgtcggtcgccgagatcaccaatgcctgcttcgagcccgctaatcaaatggtgaaatgtgatcccaggcacggcaagtacatggcatgctgtttgctgtaccggggagacgtggtgcccaaggatgtcaatgccgctatcgccacaattaagaccaagcggtccattcaattcgttgattggtgcccgactggcttcaaggtcgggataaattatcagccacctaccgtagttccgggtggggatttagccaaagtacagcgtgcggtatgcatgctcagtaatactacagctattgctgaagcttgggcaagactggaccacaagttcgatctgatgtatgcaaaaagggctttcgtgcattggtatgtgggagagggaatggaggaaggggagttttccgaagcccgagaggacatggccgcactggaaaaagattatgaggaggtcggggtcgactccgtcgagggcgaaggtgaagaggagggagaggagtactag

SEQ ID NO: 161673 - protein, 240 aa, Artificial Sequence [sequence omitted]

SEQ ID NO: 161674 - protein, 557 aa, Artificial Sequence
  derived and/or modified sequence
MPERDSEPFSNPLAPDGHDVDDPHSFHQSKLTNEDFRKLLMTPRAAPTSAPPSKSRHHEMPREYNEDEDPAARRRKKKSYYAKLRQQEIERERELAEKYRDRAKERRDGVNKDYEETELISTTANYRAVGPTAEADKSAAEKRRQLIQESKFLGGDMEHTHLVKGLDFALLQKVRAEIASKEKEEEELMEKPQKETKKDEDPENKIEFKTRLGRNVYRMLFKSKAYERNELFLPGRMAYVVDLDDEYADTDIPTTLIRSKADCPTMEAQTTLTTNDIVISKLTQILSYLRQGTRNKKLKKKDKGKLEEKKPPEADMNIFEDIGDYVPSTTKTPRDKERERYRERERDRERDRDRDRERERERDRERERERDREREEEKKRHSYFEKPKVDDEPMDVDKGPGSTKELIKSINEKFAGSAGWEGTESLKKPEDKKQLGDFFGMSNSYAECYPATMDDMAVDSDEEVDYSKMDQGNKKGPLGRWDFDTQEEYSEYMNNKEALPKAAFQYGIKMSEGRKTRRFKETNDKAELDRQWKKISAIIEKRKKMEADGVEVKRPKY

SEQ ID NO: 161675 - DNA, 723 bp, Artificial Sequence
  derived and/or modified sequence
atgccagaacgcgactctgagcccttctccaatcctctggcgcctgacggccacgacgtggacgacccccacagtttccaccagtctaagctcacaaatgaggacttccggaagctcctgatgaccccgagggcagcaccaacgtcggcgcccccgagcaaatccaggcatcacgagatgccccgcgagtacaatgaggacgaagacccggctgctcgacgtaggaagaagaagtcgtattacgctaagctgcggcagcaggagatcgaacgagagcgagagctagctgagaagtatcgtgatcgggccaaggagcggagggatggagtcaataaggattacgaagaaaccgaattaatctccaccacagccaactatagggctgtgggccctactgctgaagccgataaatcggccgctgagaaaagaaggcaattgattcaggagtccaagtttctcggcggcgacatggaacatacgcacctggtgaaaggactggatttcgcactgctgcagaaagtgcgcgctgaaatcgcaagtaaagagaaagaagaagaagaactgatggagaagccgcagaaagagacaaagaaagatgaggatccagaaaacaagatcgaattcaagacaaggctcgggcgtaacgtttatagaatgctatttaagtccaaggcttacgagcgaaacgaactattcttgccaggaagaatggctatgtggtag

SEQ ID NO: 161676 - DNA, 1674 bp, Artificial Sequence
  derived and/or modified sequence
atgccagagagagatagcgagcctttctccaatcccctggcacccgatgggcacgatgtggatgaccctcactcttttcaccaaagtaagcttaccaacgaggactttcgaaaactgctgatgaccccaagagcggcacccacttctgcaccccccagcaagtctcgccatcacgagatgcccagggagtataatgaagacgaggaccctgccgctcggcgtcgaaagaaaaagagctactatgcaaaactgaggcagcaggaaatcgagcgggagagggagctggccgagaaatatcgcgaccgcgcaaaagaacggagagacggagttaataaggactatgaagagaccgagctgatcagcacaaccgcgaattacagagccgtgggtcccacagccgaggcagacaagtcagccgccgaaaagagaagacagctgatccaggagtctaaattcctgggaggagatatggaacacacgcaccttgtaaaagggttagattttgccctcctccaaaaggtgagagctgaaatcgcaagtaaagagaaggaggaggaggagttgatggaaaaaccccagaaagagaccaagaaggacgaagatccagagaataagattgagtttaaaactagactgggcagaaatgtctaccgcatgctctttaaatccaaagcatacgagcggaacgaactcttcttgccaggacgcatggcttacgtggttgacctggatgatgaatacgcagacacagatatcccgacgaccctcatccgcagcaaagcggactgtcccactatggaggcacaaactacactcacaacaaatgacatcgtgatctccaagttaacgcagatactgagctacctgcgccagggcacacgtaacaaaaaattgaaaaagaaggataagggcaagctggaggaaaaaaaaccacctgaggctgacatgaacatcttcgaagatatcggggactacgtcccctccaccactaaaacgccacgcgataaagagcgcgagaggtaccgggaaagagagagagaccgcgagcgtgacagggatcgcgacagggagcgcgagagagaacgggatcgggagagggaaagagagcgagatcgagagagggaagaggagaaaaagcggcactcttatttcgaaaaacccaaggtggatgatgaacccatggatgtggacaaaggtccgggcagcactaaggaactcattaagtcaatcaatgaaaagtttgccggctccgcagggtgggaaggtaccgagtcactgaaaaaacctgaggataaaaaacagcttggcgactttttcggcatgagcaattcttatgctgagtgttaccccgccacgatggatgacatggcagttgactctgacgaggaagtagattactccaaaatggaccaaggaaataaaaaaggcccgctaggaaggtgggatttcgatactcaggaagaatactcggaatatatgaataacaaggaggctctgcccaaggccgccttccagtatggcattaaaatgagcgagggtcgaaagacgaggcgattcaaggaaaccaatgataaagccgagcttgaccgccagtggaaaaaaatctcagctatcattgaaaaaaggaagaagatggaggcagacggcgttgaggtgaagaggcccaagtactag

SEQ ID NO: 161677 - DNA, 1857 bp, Artificial Sequence
  derived and/or modified sequence
cgattgttggtgacagcgaaagaacgataacaaaatgccggagcgagatagtgagccgttctccaaccctttggcccccgatggccacgatgtggatgatcctcactccttccaccaatcaaaactcaccaatgaagacttcaggaaacttctcatgacccccagggctgcacctacctctgcaccaccttctaagtcacgtcaccatgagatgccaagggagtacaatgaggatgaagacccagctgcacgaaggaggaaaaagaaaagttattatgccaagctacgccaacaagaaattgagagagagagagagctagcagagaagtaccgggatcgtgccaaggaacggagagatggagtgaacaaagattatgaagaaaccgagcttatcagcaccacagctaactatagggctgttggccccactgctgaggcggacaaatcagctgcagagaagagaagacagttgatccaggagtccaaattcttgggtggtgacatggaacacacccatttggtgaaaggcttggattttgctctgcttcaaaaggtacgagctgagattgccagcaaagagaaagaggaagaggaactgatggaaaagccccagaaagaaaccaagaaagatgaggatcctgaaaataaaattgaatttaaaacacgtctgggccgcaatgtttaccgaatgctttttaagagcaaagcatatgagcggaatgagttgttcctgccgggccgcatggccatgtggtagacctggatgatgagtatgctgacacagatatccccaccactcttatccgcagcaaggctgattgccccaccatggaggcccagaccacactgaccacaaatgacattgtcattagcaagctgacccagatcctttcatacctgaggcagggaacccgtaacaagaagcttaagaagaaggataaagggaagctggaagagaagaaacctcctgaggctgacatgaatatttttgaagacattggggattacgtaccctccacaaccaagacacctcgggacaaggagcgggagagatatcgggaacgggagcgtgatcgggaaagagacagagaccgtgaccgagagcgagagcgagaacgagatcgggaacgagagcgagagcgggaccgagagagagaagaggaaaagaagagacacagctactttgagaagccaaaagtagatgatgagcccatggacgttgacaaaggacctgggtctaccaaggagttgatcaagtccatcaatgaaaagtttgctgggtctgctggctgggaaggcacagaatcgctgaagaagccagaagacaaaaagcagctgggagatttctttggcatgtccaacagttatgcagagtgctacccagccacgatggatgacatggctgtggatagtgatgaggaggtggattatagcaaaatggaccagggtaacaagaaggggcccttaggccgttgggactttgatacccaggaagaatacagcgagtatatgaacaacaaagaagctttgcccaaggctgcattccagtatggtatcaaaatgtctgaagggcggaaaaccaggcgcttcaaggaaaccaatgacaaagcagagcttgatcgccagtggaagaagattagtgcaatcattgagaagaggaagaagatggaagctgatggggttgaagtcaaaagaccaaaatactaatcactagttacaaccagagatgctccacaaggatatgctccccactgttttctttctacaatttccaaaggttgcaagatgtttttttgtggatgaatataaaattttattgtgtaattacttggttccattaaaattggttaacttgct

SEQ ID NO: 161678 - DNA, 1962 bp, Artificial Sequence
  derived and/or modified sequence
gggaaaaacaggaagcggaaaggctgcgaacgcaaagcagtgtgggttgattctgaggtgcactgtgggaaagagcttgtcgctgcggtgttgctgttggagactcgattgttggtgacagcgaaagaacgataacaaaatgccggagcgagatagtgagccgttctccaaccctttggcccccgatggccacgatgtggatgatcctcactccttccaccaatcaaaactcaccaatgaagacttcaggaaacttctcatgacccccagggctgcacctacctctgcaccaccttctaagtcacgtcaccatgagatgccaagggagtacaatgaggatgaagacccagctgcacgaaggaggaaaaagaaaagttattatgccaagctacgccaacaagaaattgagagagagagagagctagcagagaagtaccgggatcgtgccaaggaacggagagatggagtgaacaaagattatgaagaaaccgagcttatcagcaccacagctaactatagggctgttggccccactgctgaggcggacaaatcagctgcagagaagagaagacagttgatccaggagtccaaattcttgggtggtgacatggaacacacccatttggtgaaaggcttggattttgctctgcttcaaaaggtacgagctgagattgccagcaaagagaaagaggaagaggaactgatggaaaagccccagaaagaaaccaagaaagatgaggatcctgaaaataaaattgaatttaaaacacgtctgggccgcaatgtttaccgaatgctttttaagagcaaagcatatgagcggaatgagttgttcctgccgggccgcatggcctatgtggtagacctggatgatgagtatgctgacacagatatccccaccactcttatccgcagcaaggctgattgccccaccatggaggcccagaccacactgaccacaaatgacattgtcattagcaagctgacccagatcctttcatacctgaggcagggaacccgtaacaagaagcttaagaagaaggataaagggaagctggaagagaagaaacctcctgaggctgacatgaatatttttgaagacattggggattacgtaccctccacaaccaagacacctcgggacaaggagcgggagagatatcgggaacgggagcgtgatcgggaaagagacagagaccgtgaccgagagcgagagcgagaacgagatcgggaacgagagcgagagcgggaccgagagagagaagaggaaaagaagagacacagctactttgagaagccaaaagtagatgatgagcccatggacgttgacaaaggacctgggtctaccaaggagttgatcaagtccatcaatgaaaagtttgctgggtctgctggctgggaaggcacagaatcgctgaagaagccagaagacaaaaagcagctgggagatttctttggcatgtccaacagttatgcagagtgctacccagccacgatggatgacatggctgtggatagtgatgaggaggtggattatagcaaaatggaccagggtaacaagaaggggcccttaggccgttgggactttgatacccaggaagaatacagcgagtatatgaacaacaaagaagctttgcccaaggctgcattccagtatggtatcaaaatgtctgaagggcggaaaaccaggcgcttcaaggaaaccaatgacaaagcagagcttgatcgccagtggaagaagattagtgcaatcattgagaagaggaagaagatggaagctgatggggttgaagtcaaaagaccaaaatactaatcactagttacaaccagagatgctccacaaggatatgctccccactgttttctttctacaatttccaaaggttgcaagatgtttttttgtggatgaatataaaattttattgtgtaattacttggttccattaaaattggttaacttgc

SEQ ID NO: 161679 - DNA, 723 bp, Artificial Sequence
  derived and/or modified sequence
atgcctgagcgggacagcgagcccttcagcaaccccctggccccagatggccatgatgtggatgacccccacagcttccaccagagcaagctgaccaatgaagacttcaggaagctgctgatgacccccagggctgcccccaccagcgccccacccagcaagagccgccaccacgagatgccccgggagtacaatgaagatgaggaccctgctgcccggcggaggaagaagaagagctactatgccaagctgcggcagcaggagattgagcgggagcgggagctggccgagaagtacagagaccgggccaaggagaggagagatggagtgaacaaggactatgaggagacagagctgatcagcaccacagccaactacagagctgtgggccccacagctgaggccgacaagtctgctgctgagaagaggcggcagctgatccaggagagcaagttcctgggcggggacatggagcacacccacctggtgaagggcctggactttgccctgctgcagaaggtgcgggcagagatcgccagcaaggagaaggaggaggaggagctgatggagaagccccagaaggagaccaagaaggatgaggaccctgagaacaagattgagttcaagacccggctgggcagaaatgtgtacaggatgctgttcaagagcaaggcctatgaaagaaatgaactcttcctgcccggccgcatggccatgtggtag

SEQ ID NO: 161680 - DNA, 1674 bp, Artificial Sequence
  derived and/or modified sequence
atgcctgagcgggacagcgagcccttcagcaaccccctggccccagatggccatgatgtggatgacccccacagcttccaccagagcaagctgaccaatgaagacttcaggaagctgctgatgacccccagggctgcccccaccagcgccccacccagcaagagccgccaccacgagatgccccgggagtacaatgaagatgaggaccctgctgcccggcggaggaagaagaagagctactatgccaagctgcggcagcaggagattgagcgggagcgggagctggccgagaagtacagagaccgggccaaggagaggagagatggagtgaacaaggactatgaggagacagagctgatcagcaccacagccaactacagagctgtgggccccacagctgaggccgacaagtctgctgctgagaagaggcggcagctgatccaggagagcaagttcctgggcggggacatggagcacacccacctggtgaagggcctggactttgccctgctgcagaaggtgcgggcagagatcgccagcaaggagaaggaggaggaggagctgatggagaagccccagaaggagaccaagaaggatgaggaccctgagaacaagattgagttcaagacccggctgggcagaaatgtgtacaggatgctgttcaagagcaaggcctatgaaagaaatgaactcttcctgcccggccgcatggcctacgtggtggacctggatgatgaatatgctgacacagacatccccaccaccctcatccgcagcaaggctgactgccccaccatggaggcccagaccaccctgaccaccaatgacatcgtcatcagcaagctgacccagatcctgagctacctgcggcagggcaccaggaacaagaagctgaagaagaaggacaagggcaagctggaggagaagaagcccccagaggccgacatgaacatctttgaggacatcggggactatgtgcccagcaccaccaagaccccccgggacaaggagcgggagcgctaccgggagcgggagcgggaccgggagcgggaccgggaccgggaccgggagcgggagcgggagcgggaccgggagcgggagcgggagcgggaccgggagcgggaggaggagaagaagaggcacagctactttgagaagcccaaggtggatgatgagcccatggatgtggacaagggccctggcagcaccaaggagctgatcaagagcatcaatgagaagtttgctggcagcgctggctgggagggcacagagagcctgaagaagccagaggacaagaagcagctgggggacttcttcggcatgagcaacagctatgcagagtgctacccagccaccatggatgacatggctgtggacagtgatgaggaggtggactacagcaagatggaccagggcaacaagaagggccccctgggccgctgggactttgacacccaggaggagtacagcgagtacatgaacaacaaggaggccctgcccaaggccgccttccagtatggcatcaagatgtctgagggcaggaagacccggcgcttcaaggagaccaatgacaaggccgagctggaccggcagtggaagaagatcagcgccatcatcgagaagaggaagaagatggaggctgatggagtggaggtgaagaggcccaagtactag

SEQ ID NO: 161681 - DNA, 723 bp, Artificial Sequence
  derived and/or modified sequence
atgcccgagcgggacagcgagcccttcagcaaccccctggcccccgatggtcacgacgtggacgatccacattcctttcaccagtccaagctgaccaacgaggattttcggaagttgctaatgacaccccgggccgccccaacttctgctcccccgtccaaatcccgtcaccacgaaatgccccgtgagtacaatgaggatgaggaccctgccgccaggcgtagaaagaaaaaatcctattacgccaagttgcggcagcaggagatcgaacgggaaagagagctggctgagaaataccgtgaccgcgcaaaagagcgcagggatggtgtgaacaaggactatgaagagacagaacttatatctacgactgccaattacagagctgttgggcccaccgctgaagctgacaaatctgcagctgaaaaacggcggcagttgattcaagagtctaagtttctgggcggggatatggagcatacccacctagtcaaggggttggactttgcactgctccagaaagtgcgggccgaaatcgccagcaaggagaaagaagaggaggaactgatggagaaaccccaaaaagaaacaaagaaagacgaagaccccgaaaataaaatagagtttaaaacccgcctgggtagaaacgtgtaccggatgttgtttaaatccaaggcctacgaacgaaacgagttgttcctcccgggtcggatggctatgtggtag

SEQ ID NO: 161682 - DNA, 1674 bp, Artificial Sequence
  derived and/or modified sequence
atgcccgagcgggacagcgagcccttcagcaaccccctggcccccgatgggcacgacgtcgatgatccccactcttttcaccagagtaaattgaccaacgaggacttccgtaagctcctcatgaccccgcgcgcagcgcctacatcagcccctcctagtaagagtcggcaccatgaaatgcccagggaatacaacgaagacgaagatcccgcagctaggcggaggaaaaagaagtcatattacgcgaagttgcgacagcaagaaattgaacgagagcgcgaactcgcagagaagtaccgcgatagagccaaggagaggcgcgatggcgtcaacaaagactatgaggagactgagctgatatctaccactgccaactaccgtgccgtcggccccacggccgaggccgacaaatctgcggccgaaaaacggcgtcagttgatccaggagtccaaatttttgggcggtgacatggagcacacacacctagtgaagggcttggattttgctctgctccagaaagtgagggccgagatcgctagcaaagaaaaagaggaggaagagttgatggaaaaacctcagaaagagaccaaaaaagatgaagacccagaaaataaaattgagtttaaaacacgcctgggaaggaacgtatatagaatgttgtttaagtcaaaagcttacgaaaggaatgagctttttcttcccggccgtatggcctatgtggttgacctggatgacgagtatgctgacactgacatacccacaacgctgatacgaagcaaagcagactgccccaccatggaggcgcagactacccttacaacgaatgatattgtcatctccaaacttacccagatcctgtcttatcttcggcagggcactcgaaacaaaaaactgaagaaaaaggacaaggggaagctggaggaaaagaaaccaccagaggccgacatgaacatctttgaggatatcggtgactatgtaccctccacgacaaaaacaccccgcgataaagagcgagagcggtatcgggaaagagagcgtgatcgggagagggaccgggaccgcgatagggaacgcgagcgcgagcgagacagagaacgcgaacgtgagcgggacagggaaagagaggaggaaaagaaacgtcacagctattttgagaagcccaaagtggacgacgagcccatggacgtggacaaggggcctgggagcactaaagagctcatcaaatcgatcaatgagaagttcgctggatctgcaggttgggaggggacagagtccctcaaaaagcctgaagacaaaaaacagttgggagatttcttcggtatgtcaaattcttacgctgaatgttaccctgctaccatggatgacatggccgtagactcagatgaagaagttgattacagtaagatggatcagggcaacaagaaggggcccctgggccggtgggattttgacacacaggaggaatactcggaatatatgaataacaaggaagctctgcccaaggcagccttccagtatggcatcaaaatgtcagagggccggaagacgcgcaggtttaaagagaccaacgataaggccgagttagaccgccagtggaagaagattagtgcgataatcgagaagagaaagaagatggaggcagatggggtggaagtcaaaagacctaagtactag

SEQ ID NO: 161683 - DNA, 723 bp, Artificial Sequence
  derived and/or modified sequence
atgccagagagagatagtgagccattttcaaaccctctcgcccctgatgggcatgacgtggacgacccgcactccttccaccagtccaagctgactaacgaggacttccggaaactgttgatgactcctagagcggctccgacctcggccccacctagcaaatctcggcaccacgaaatgccccgtgaatacaatgaagatgaggatccagctgctcggaggcgcaaaaaaaagagctattacgccaagttgaggcaacaagaaatcgagcgggaaagagagctcgctgaaaagtatcgagatcgggctaaggaacgtcgggatggtgtaaataaggactacgaggagactgagctgattagcacaaccgcaaactaccgcgctgtgggtccaactgccgaggccgataagtctgccgcagagaaacgacgccaactgatccaagagagcaagtttctggggggtgatatggaacacacccacctggtaaaaggtcttgatttcgccctactgcagaaggtccgtgccgaaatcgctagtaaggaaaaggaggaagaagaactgatggaaaagcctcagaaagaaacaaaaaaggatgaagatcccgagaataagattgagttcaagacaaggctgggtcgtaatgtctaccgcatgctgtttaaatccaaagcttacgagcgtaacgagctatttcttcctggccgaatggctatgtggtag

SEQ ID NO: 161684 - DNA, 1674 bp, Artificial Sequence
  derived and/or modified sequence
atgccagagcgggatagtgagcctttcagcaaccctcttgcccctgatggccatgacgtggacgatcctcactctttccaccagtccaagctgaccaatgaggacttccgcaaactcctgatgactccccgagcagctcctacaagcgcacctccaagcaagtctagacaccatgaaatgccccgagaatacaacgaggacgaagatccagcagccagaaggcggaaaaaaaaatcttactatgccaagctgaggcagcaggagattgaaagagagagggagctggctgaaaaataccgagatcgcgcaaaggagcgacgcgacggcgttaacaaggactacgaggaaactgagcttatctccactaccgccaactacagagctgtaggcccaacagcagaggccgacaaatccgctgctgagaagcgcagacagctgatacaggaatcgaaattcctggggggtgatatggagcacactcatctggttaagggccttgacttcgctttactccagaaggttcgagcggagattgcaagcaaagagaaagaagaggaagagctgatggagaagcctcagaaagagaccaaaaaagacgaggaccccgagaacaaaatagagtttaaaactcggctgggaaggaatgtgtaccggatgctgtttaaatctaaggcttacgagaggaacgagttgtttctccctggaagaatggcctacgttgtggaccttgacgatgagtatgctgatactgatattccaactacactaatccgcagcaaggctgattgtcctactatggaagcgcagaccacccttaccactaacgacatcgtgataagcaagttgacacagatccttagctacctgcgacaaggcacgaggaataaaaaactcaagaagaaggataaggggaaactggaggaaaagaagcctccggaggcagacatgaatattttcgaagatatcggcgattatgttccctccactaccaagactccacgcgacaaggaaagggaaaggtatagggaacgagagagggaccgcgagagggatagagatcgggaccgcgaaagagagcgcgaacgagatcgtgagcgcgaacgcgaaagagacagggaacgggaggaggagaagaaacgccactcctacttcgagaagcccaaagtggatgatgagccaatggacgttgacaagggcccaggatcaacaaaggaactcatcaagtcgatcaatgagaagttcgccggtagcgccggttgggaaggtacagagagcctgaagaaacctgaggataagaagcagctgggtgattttttcggaatgagcaactcatacgctgaatgctacccagccactatggacgatatggcagtcgattctgacgaagaagttgactattcaaagatggatcaggggaacaagaaaggacctctcggcagatgggatttcgatacgcaggaagagtattccgagtatatgaataataaggaggctctgcccaaagccgcatttcagtatggcatcaaaatgtcagaaggaagaaaaacgaggaggtttaaggagaccaacgacaaagctgagctggacaggcagtggaaaaaaatcagcgccatcatcgagaaacgcaagaagatggaggccgatggcgttgaggtgaaacggcctaagtactag

SEQ ID NO: 161685 - DNA, 723 bp, Artificial Sequence
  derived and/or modified sequence
atgcccgagagagacagcgagcccttcagcaaccccctggcccccgacggccacgacgtggacgacccccacagcttccaccagagcaagctgaccaacgaggacttcagaaagctgctgatgacccccagagccgcccccaccagcgccccccccagcaagagcagacaccacgagatgcccagagagtacaacgaggacgaggaccccgccgccagaagaagaaagaagaagagctactacgccaagctgagacagcaggagatcgagagagagagagagctggccgagaagtacagagacagagccaaggagagaagagacggcgtgaacaaggactacgaggagaccgagctgatcagcaccaccgccaactacagagccgtgggccccaccgccgaggccgacaagagcgccgccgagaagagaagacagctgatccaggagagcaagttcctgggcggcgacatggagcacacccacctggtgaagggcctggacttcgccctgctgcagaaggtgagagccgagatcgccagcaaggagaaggaggaggaggagctgatggagaagccccagaaggagaccaagaaggacgaggaccccgagaacaagatcgagttcaagaccagactgggcagaaacgtgtacagaatgctgttcaagagcaaggcctacgagagaaacgagctgttcctgcccggcagaatggccatgtggtag

SEQ ID NO: 161686 - DNA, 1674 bp, Artificial Sequence
  derived and/or modified sequence
atgcccgagagagacagcgagcccttcagcaaccccctggcccccgacggccacgacgtggacgacccccacagcttccaccagagcaagctgaccaacgaggacttcagaaagctgctgatgacccccagagccgcccccaccagcgccccccccagcaagagcagacaccacgagatgcccagagagtacaacgaggacgaggaccccgccgccagaagaagaaagaagaagagctactacgccaagctgagacagcaggagatcgagagagagagagagctggccgagaagtacagagacagagccaaggagagaagagacggcgtgaacaaggactacgaggagaccgagctgatcagcaccaccgccaactacagagccgtgggccccaccgccgaggccgacaagagcgccgccgagaagagaagacagctgatccaggagagcaagttcctgggcggcgacatggagcacacccacctggtgaagggcctggacttcgccctgctgcagaaggtgagagccgagatcgccagcaaggagaaggaggaggaggagctgatggagaagccccagaaggagaccaagaaggacgaggaccccgagaacaagatcgagttcaagaccagactgggcagaaacgtgtacagaatgctgttcaagagcaaggcctacgagagaaacgagctgttcctgcccggcagaatggcctacgtggtggacctggacgacgagtacgccgacaccgacatccccaccaccctgatcagaagcaaggccgactgccccaccatggaggcccagaccaccctgaccaccaacgacatcgtgatcagcaagctgacccagatcctgagctacctgagacagggcaccagaaacaagaagctgaagaagaaggacaagggcaagctggaggagaagaagccccccgaggccgacatgaacatcttcgaggacatcggcgactacgtgcccagcaccaccaagacccccagagacaaggagagagagagatacagagagagagagagagacagagagagagacagagacagagacagagagagagagagagagagagacagagagagagagagagagagagacagagagagagaggaggagaagaagagacacagctacttcgagaagcccaaggtggacgacgagcccatggacgtggacaagggccccggcagcaccaaggagctgatcaagagcatcaacgagaagttcgccggcagcgccggctgggagggcaccgagagcctgaagaagcccgaggacaagaagcagctgggcgacttcttcggcatgagcaacagctacgccgagtgctaccccgccaccatggacgacatggccgtggacagcgacgaggaggtggactacagcaagatggaccagggcaacaagaagggccccctgggcagatgggacttcgacacccaggaggagtacagcgagtacatgaacaacaaggaggccctgcccaaggccgccttccagtacggcatcaagatgagcgagggcagaaagaccagaagattcaaggagaccaacgacaaggccgagctggacagacagtggaagaagatcagcgccatcatcgagaagagaaagaagatggaggccgacggcgtggaggtgaagagacccaagtactag

SEQ ID NO: 161687 - protein, 393 aa, Artificial Sequence
  derived and/or modified sequence
MASGRARCTRKLRNWVVEQVESGQFPGVCWDDTAKTMFRIPWKHAGKQDFREDQDAAFFKAWAIFKGKYKEGDTGGPAVWKTRLRCALNKSSEFKEVPERGRMDVAEPYKVYQLLPPGIVSGQPGTQKVPSKRQHSSVSSERKEEEDAMQNCTLSPSVLQDSLNNEEEGASGGAVHSDIGSSSSSSSPEPQEVTDTTEAPFQGDQRSLEFLLPPEPDYSLLLTFIYNGRVVGEAQVQSLDCRLVAEPSGSESSMEQVLFPKPGPLEPTQRLLSQLERGILVASNPRGLFVQRLCPIPISWNAPQAPPGPGPHLLPSNECVELFRTAYFCRDLVRYFQGLGPPPKFQVTLNFWEESHGSSHTPQNLITVKMEQAFARYLLEQTPEQQAAILSLV

SEQ ID NO: 161688 - DNA, 1182 bp, Artificial Sequence
  derived and/or modified sequence
atggccagcggcagagccagatgcaccagaaagctgagaaactgggtggtggagcaggtggagagcggccagttccccggcgtgtgctgggacgacaccgccaagaccatgttcagaatcccctggaagcacgccggcaagcaggacttcagagaggaccaggacgccgccttcttcaaggcctgggccatcttcaagggcaagtacaaggagggcgacaccggcggccccgccgtgtggaagaccagactgagatgcgccctgaacaagagcagcgagttcaaggaggtgcccgagagaggcagaatggacgtggccgagccctacaaggtgtaccagctgctgccccccggcatcgtgagcggccagcccggcacccagaaggtgcccagcaagagacagcacagcagcgtgagcagcgagagaaaggaggaggaggacgccatgcagaactgcaccctgagccccagcgtgctgcaggacagcctgaacaacgaggaggagggcgccagcggcggcgccgtgcacagcgacatcggcagcagcagcagcagcagcagccccgagccccaggaggtgaccgacaccaccgaggcccccttccagggcgaccagagaagcctggagttcctgctgccccccgagcccgactacagcctgctgctgaccttcatctacaacggcagagtggtgggcgaggcccaggtgcagagcctggactgcagactggtggccgagcccagcggcagcgagagcagcatggagcaggtgctgttccccaagcccggccccctggagcccacccagagactgctgagccagctggagagaggcatcctggtggccagcaaccccagaggcctgttcgtgcagagactgtgccccatccccatcagctggaacgccccccaggccccccccggccccggcccccacctgctgcccagcaacgagtgcgtggagctgttcagaaccgcctacttctgcagagacctggtgagatacttccagggcctgggccccccccccaagttccaggtgaccctgaacttctgggaggagagccacggcagcagccacaccccccagaacctgatcaccgtgaagatggagcaggccttcgccagatacctgctggagcagacccccgagcagcaggccgccatcctgagcctggtgtag

SEQ ID NO: 161689 - DNA, 1182 bp, Artificial Sequence
  derived and/or modified sequence
atggcttctggacgggctaggtgtacgaggaaattgcggaattgggtggtagaacaggtagagtccggacagttcccgggtgtctgctgggatgataccgcaaaaaccatgttccgcataccatggaaacacgctggcaaacaggattttcgtgaggaccaggatgcagcattttttaaggcttgggcaatattcaaaggaaagtacaaggagggcgatacggggggccccgccgtttggaagacccgactgcggtgtgctctgaataaaagtagtgaattcaaggaagttcctgagagaggccgaatggacgtcgccgaaccctataaggtttatcaattacttccaccagggatagtgagcggtcaaccgggaacacagaaagttccctcaaaacggcaacatagttcagtttcaagcgagcgtaaggaggaagaagatgcgatgcagaattgtactctgtcaccaagcgtgctgcaagactccctgaataacgaggaggaaggagcctctggaggggccgtgcattccgacataggaagcagcagttctagttcctctccagagccacaggaagttacggatactacagaggcccccttccagggagaccagcgcagtctggaattcctccttcctcccgaacccgattacagtctactcttaacctttatctataatgggagagtggtgggcgaggcacaggtgcagagtctggactgcaggcttgttgcggaaccttccggaagcgagtcttccatggaacaggtgctgtttccaaaaccagggccgctggagcctactcagagactgctctctcagctggagaggggtatcctagtggcttccaatccaagggggctatttgtgcaaagactgtgccccattcctatatcgtggaacgcaccccaggcaccccccggccctggtccccatctcctgccttctaacgaatgcgtggagctgttccggacagcttatttctgccgggatctggtacggtattttcagggattgggacccccaccaaaattccaagtaactcttaatttttgggaggaatcccacggctcatcacatacaccacagaatctcatcaccgtgaaaatggaacaggcttttgctagatatctgcttgagcagacaccagagcagcaggccgccatcctctctttagtgtag

SEQ ID NO: 161690 - DNA, 1182 bp, Artificial Sequence
  derived and/or modified sequence
atggccagcggccgggcccgctgcaccaggaagctgaggaactgggtggtggagcaggtggagagcggccagtttcctggggtgtgctgggatgacacagccaagaccatgttccgcatcccctggaagcatgctgggaagcaggacttccgggaggaccaggatgctgccttcttcaaggcctgggccatcttcaagggcaagtacaaggagggggacaccggcggccctgctgtgtggaagacccggctgcgctgtgccctgaacaagagcagcgagttcaaggaggtgcctgagcggggccgcatggatgtggccgagccctacaaggtgtaccagctgctgcccccaggcatcgtgtctggccagcccggcacccagaaggtgcccagcaagaggcagcacagctctgtgagcagcgagaggaaggaggaggaggatgccatgcagaactgcaccctgagccccagcgtgctgcaggacagcctgaacaatgaggaggagggcgccagcggcggcgctgtgcacagcgacatcggcagcagcagcagcagcagcagccctgagccccaggaggtgacagacaccacagaggcccccttccagggcgaccagaggagcctggagttcctgctgcccccagagccagactacagcctgctgctgaccttcatctacaacggccgggtggtgggggaggcccaggtgcagagcctggactgccgcctggtggccgagcccagcggcagcgagagctccatggagcaggtgctcttccccaagccaggccccctggagcccacccagaggctgctgagccagctggagcggggcatcctggtggccagcaacccccggggcctgtttgtgcagaggctgtgccccatccccatctcctggaatgccccccaggcccctcctggccctggcccccacctgctgcccagcaatgaatgtgtggagctgttcagaacagcctacttctgccgggacctggtgcgctacttccagggcctgggccccccacccaagttccaggtgaccctgaacttctgggaggagagccacggcagcagccacaccccccagaacctgatcaccgtgaagatggagcaggcctttgcccgctacctgctggagcagaccccagagcagcaggccgccatcctgagcctggtgtag

SEQ ID NO: 161691 - DNA, 1838 bp, Artificial Sequence
  derived and/or modified sequence
atctgagggaggcaggggaatgagccaggctggagctgagccagcagggcagggcccccctgctgcgacagtggcatcctgatagtgagatgctcagatgctgctgccctctagtggccgccagttccctgcaactcagaccacgtgatttctgggaaaaggccctccctggaggagaactgaaacttagggtggggactgtagaaaggggcggagagatcagccgcccagccaggagttaagctgaggtcgtctgagccctgcgacagcctggacagcaactcaggatggcatcaggcagggcacgctgcacccgaaaactccggaactgggtggtggagcaagtggagagtgggcagtttcccggagtgtgctgggatgatacagctaagaccatgttccggattccctggaaacatgcaggcaagcaggacttccgggaggaccaggatgctgccttcttcaaggcctgggcaatatttaagggaaagtataaggagggggacacaggaggtccagctgtctggaagactcgcctgcgctgtgcactcaacaagagttctgaatttaaggaggttcctgagaggggccgcatggatgttgctgagccctacaaggtgtatcagttgctgccaccaggaatcgtctctggccagccagggactcagaaagtaccatcaaagcgacagcacagttctgtgtcctctgagaggaaggaggaagaggatgccatgcagaactgcacactcagtccctctgtgctccaggactccctcaataatgaggaggagggggccagtgggggagcagtccattcagacattgggagcagcagcagcagcagcagccctgagccacaggaagttacagacacaactgaggccccctttcaaggggatcagaggtccctggagtttctgcttcctccagagccagactactcactgctgctcaccttcatctacaacgggcgcgtggtgggcgaggcccaggtgcaaagcctggattgccgccttgtggctgagccctcaggctctgagagcagcatggagcaggtgctgttccccaagcctggcccactggagcccacgcagcgcctgctgagccagcttgagaggggcatcctagtggccagcaacccccgaggcctcttcgtgcagcgcctttgccccatccccatctcctggaatgcaccccaggctccacctgggccaggcccgcatctgctgcccagcaacgagtgcgtggagctcttcagaaccgcctacttctgcagagacttggtcaggtactttcagggcctgggccccccaccgaagttccaggtaacactgaatttctgggaagagagccatggctccagccatactccacagaatcttatcacagtgaagatggagcaggcctttgcccgatacttgctggagcagactccagagcagcaggcagccattctgtccctggtgtagagcctgggggacccatcttccacctcacctctttgttcttcctgtctcctttgaagtagactcattcttcacacgattgacctgtcctctttgtgataattctcagtagttgtccgtgataatcgtgtcctgaaaatcctcgcacacactggctggtggagaactcaaggctaattttttatccttttttttttttaattttgagatatacgccctctttcatctgtaagggactaggaaattccaaatggtgtgaacccagggggcctttccctcttccctgacctcccaactctaaagccaagcactttatattttcctcttagatattcactaaggacttaaaataaaattttattgaaagaggaa

SEQ ID NO: 161692 - DNA, 1182 bp, Artificial Sequence
  derived and/or modified sequence
atggccagcggccgggcccggtgcacccggaagctgcggaactgggtcgtcgaacaggtcgagagcggccaattcccgggagtttgttgggatgataccgcaaagacgatgttccgaattccgtggaagcacgctgggaaacaggactttcgggaagaccaggacgccgcgttctttaaagcatgggcaatttttaaaggaaaatacaaggaaggggacaccgggggccccgctgtgtggaagacgcgtctgaggtgtgcactgaacaagtctagcgagtttaaggaagttcctgaacgcggaaggatggacgtggccgagccctataaggtttatcagctgctgcccccaggaattgtgagtggccaacccggaacacagaaagtccccagcaaacgccagcactcgagcgtcagctctgagagaaaagaggaggaagacgccatgcaaaattgcacactcagcccgtctgtgctgcaggattctctgaacaacgaggaggagggcgctagtggcggcgccgtccacagcgacattgggtcttcttccagctcaagttcaccagagcctcaggaagtaaccgacaccactgaagccccatttcagggtgatcagcgcagcttggagtttctgctccctccagaacccgattattcccttctgttgacctttatctacaatggccgcgtagtgggcgaagctcaggtacaatccctcgattgtcgccttgttgctgagcccagcggatccgaatcgtccatggagcaagtcctgtttccaaagcccggaccattagagcccacacagaggttgctctcacaattggagcgcgggatccttgttgcgtctaacccaaggggattgtttgttcagagattatgccctatccctatatcttggaatgctccccaggcaccacccgggcctggaccacacctactcccgtctaatgaatgcgttgagctttttagaacggcctacttctgtcgagacctcgtaaggtattttcagggtctgggacccccgcccaagtttcaggtgacactgaacttttgggaggagtctcacggctcatctcacacgccgcagaatcttatcacagtgaaaatggaacaagcctttgcgcggtacttattagagcagacacccgaacaacaggccgctattctcagcctggtatag

SEQ ID NO: 161693 - DNA, 1182 bp, Artificial Sequence
  derived and/or modified sequence
atggcttcaggcagagctagatgcacgcggaagttgagaaattgggtcgtggaacaagttgagagcggtcagtttcctggtgtatgttgggacgacacagcaaaaaccatgtttaggattccctggaaacatgctggaaagcaagacttccgtgaggaccaggacgcagctttcttcaaagcctgggccatcttcaaagggaagtacaaggagggggataccggcggacccgctgtttggaaaacccggctgcgctgtgcattaaataaatcctccgagttcaaggaggttccagagcgcggacgcatggatgtggccgaaccttacaaggtttatcagctgttgcctccgggaatcgtgtccggacagcccggaacccaaaaagtgcctagcaaacggcagcatagtagtgtgtcttccgagaggaaagaagaggaggacgccatgcagaattgtacactaagccccagtgtcctgcaggattccctcaacaatgaggaggagggcgcaagcggcggagccgtccatagcgacattggcagcagtagttcctcgagcagcccggagccacaagaagtgacagataccacagaggctcccttccagggcgaccagaggagtctggagttcttattgcctccggaacccgattactcactgctcttgacctttatctacaatggtagggttgttggcgaagcgcaggtgcaatctctcgattgcagactggtggctgagcccagtgggtctgaaagttccatggaacaggtgctcttccctaaacccggtccacttgagcccacccagcgcctcctcagccagctggaaaggggcattttggtggcctcgaacccaagggggctgtttgtccagcggttatgccctatccccattagttggaacgcaccccaggcgcctccgggacccggaccccacctcctaccttccaatgaatgcgtcgagctctttaggactgcttatttctgcagagacctggtccgctatttccagggcctgggccctccccctaagtttcaggtgacgttaaacttttgggaggagtcccacgggagcagtcacactcctcagaaccttatcactgttaaaatggagcaggctttcgctcgctatctgttggagcaaacgcccgagcaacaggccgctattctttccctagtttag

SEQ ID NO: 161694 - protein, 324 aa, Artificial Sequence
  derived and/or modified sequence
MASSNTVLMRLVASAYSIAQKAGMIVRRVIAEGDLGIVEKTCATDLQTKADRLAQMSICSSLARKFPKLTIIGEEDLPSEEVDQELIEDSQWEEILKQPCPSQYSAIKEEDLVVWVDPLDGTKEYTEGLLDNVTVLIGIAYEGKAIAGVINQPYYNYEAGPDAVLGRTIWGVLGLGAFGFQLKEVPAGKHIITTTRSHSNKLVTDCVAAMNPDAVLRVGGAGNKIIQLIEGKASAYVFASPGCKKWDTCAPEVILHAVGGKLTDIHGNVLQYHKGVSHRTWPKPDFFRAQFFLESHSCFSNFKNVSTPIKNIYDVIIYAYETDL

SEQ ID NO: 161695 - protein, 308 aa, Artificial Sequence
  derived and/or modified sequence
MASSNTVLMRLVASAYSIAQKAGMIVRRVIAEGDLGIVEKTCATDLQTKADRLAQMSICSSLARKFPKLTIIGEEDLPSEEVDQELIEDSQWEEILKQPCPSQYSAIKEEDLVVWVDPLDGTKEYTEGLLDNVTVLIGIAYEGKAIAGVINQPYYNYEAGPDAVLGRTIWGVLGLGAFGFQLKEVPAGKHIITTTRSHSNKLVTDCVAAMNPDAVLRVGGAGNKIIQLIEGKASAYVFASPGCKKWDTCAPEVILHAVGGKLTDIHGNVLQYHKDVKHMNSAGVLATLRNYDYYASRVPESIKNALVP

SEQ ID NO: 161696 - protein, 253 aa, Artificial Sequence
  derived and/or modified sequence
MSICSSLARKFPKLTIIGEEDLPSEEVDQELIEDSQWEEILKQPCPSQYSAIKEEDLVVWVDPLDGTKEYTEGLLDNVTVLIGIAYEGKAIAGVINQPYYNYEAGPDAVLGRTIWGVLGLGAFGFQLKEVPAGKHIITTTRSHSNKLVTDCVAAMNPDAVLRVGGAGNKIIQLIEGKASAYVFASPGCKKWDTCAPEVILHAVGGKLTDIHGNVLQYHKDVKHMNSAGVLATLRNYDYYASRVPESIKNALVP

SEQ ID NO: 161697 - DNA, 975 bp, Artificial Sequence
  derived and/or modified sequence
atggcatctagcaacaccgtgctgatgcgacttgtcgctagtgcctattccattgcccagaaggccgggatgatcgtgcggagggtgatcgcagaaggggatttgggcatcgtggagaagacatgtgctaccgatctgcagacaaaagcggatcgattggcacagatgtccatctgcagttctctggcaagaaaattccccaagctcactatcattggcgaggaagacctgccctcggaagaggtggatcaggagcttatcgaagattcccagtgggaggaaattctgaagcagccttgccctagtcagtactctgctatcaaggaggaagacctagttgtttgggtagaccccttggacggtaccaaagagtacactgaaggactgctcgataacgtaactgtcctcatcggaattgcttacgagggcaaggccatcgctggggttattaaccaaccctattataactatgaagccgggccggatgccgtgctcggtcgcacaatttggggtgtgctcggccttggagctttcggctttcagctcaaggaagtcccagccggcaaacacattatcacaacaaccaggagtcactccaacaaattagtgacggattgtgtagcggccatgaaccccgatgccgtgcttcgggtgggaggggctggcaacaagatcattcagctgattgaaggaaaagctagcgcttatgtattcgccagccccggatgcaagaaatgggatacatgcgccccggaagtgatcctccacgcggtggggggtaagttaacagatatccacggcaatgtgctgcagtatcacaagggcgtctcccaccgcacatggcccaaacccgacttctttagggcccaattcttcctggagtcgcactcttgtttttccaactttaagaatgtttcaacccctattaagaacatctacgacgttatcatttacgcatatgagacggatttgtag

SEQ ID NO: 161698 - DNA, 927 bp, Artificial Sequence
  derived and/or modified sequence
atggcttctagcaacaccgttttaatgcgcttagtggccagcgcatactctatagctcagaaggcaggcatgattgtgaggagggtaattgccgagggggatttgggcatcgttgagaaaacatgtgcaacggacctacagacgaaggcggaccggctggctcagatgtcaatctgtagctctctcgcgaggaaatttcccaagctgaccatcatcggcgaggaagacctgccctcggaggaggtcgatcaagagttgatcgaggatagccaatgggaggaaatcctgaaacagccgtgtccatcacagtatagcgcaatcaaagaggaggaccttgtggtgtgggtggaccctcttgacgggactaaagagtatacagaaggcctgctggacaacgtcactgtccttatcgggattgcctacgagggaaaagccattgccggcgttattaatcaaccgtactataactatgaggcagggcccgacgccgtattaggccgaacgatttggggtgtacttggcctaggcgccttcggcttccagttgaaggaggttcctgccggtaagcacattatcaccacaaccagaagccattccaataagctggttacagactgcgtggccgcaatgaatcccgatgccgttctcagggtggggggggcgggaaacaaaattatccagttaatcgaggggaaagccagcgcttatgtgtttgcctctccaggttgcaaaaagtgggacacatgtgcacctgaggtgattctccacgctgtcggagggaagttgacagacatacatggcaacgtcctgcagtaccacaaagacgtgaagcacatgaattccgccggcgtcttggccacattaaggaattacgattactatgccagccgagtgcccgaatccataaagaatgcgctggtaccctag

SEQ ID NO: 161699 - DNA, 927 bp, Artificial Sequence
  derived and/or modified sequence
atggccagttctaatacggtgcttatgcggcttgtggcctctgcatacagcattgctcaaaaggctggcatgatcgtccgccgcgtaattgccgagggcgacctgggtatcgttgagaagacatgtgccacagatctccaaaccaaagctgatcggctggcccaaatgtctatttgttccagcctggcccgaaaatttcccaagctgacaataattggggaagaagaccttccgagcgaagaggtggaccaggagctgatagaggattcacaatgggaggagattctcaagcaaccctgtccttcgcagtacagtgctatcaaagaggaggacctggtcgtctgggttgaccccttagacggcactaaggaatacacagagggcctgttagataacgtgacagttctgatcggcatcgcctatgaaggcaaagcgatcgctggagtgatcaaccagccctattacaattacgaggccggacctgacgcagtgttgggtcgaactatatggggcgtgctggggttaggggcctttggctttcagctgaaggaagtacctgcaggcaaacatattatcacaaccacaaggtctcatagcaacaaacttgtaaccgactgtgtggcagcaatgaacccagatgccgtccttagggtcggcggagcaggaaataaaataatccaactaattgaaggaaaggcctccgcctatgtgtttgcctctcctggctgcaaaaaatgggacacatgcgccccagaggtcatcctgcacgcagtggggggaaaactgaccgacattcatggcaatgttctccaataccataaggatgtcaaacacatgaacagtgcaggcgtcctcgccactctacgcaactatgactattatgcctctcgtgtgcctgagtcaattaaaaacgcattagttccttag

SEQ ID NO: 161700 - DNA, 975 bp, Artificial Sequence
  derived and/or modified sequence
atggccagcagcaacacagtgctgatgaggctggtggccagcgcctacagcatcgcccagaaggccggcatgattgtgagaagagtgattgctgagggggacctgggcatcgtggagaagacctgtgccacagacctgcagaccaaggctgaccggctggcccagatgagcatctgcagcagcctggccaggaagttccccaagctgaccatcatcggggaggaggacctgcccagcgaggaggtggaccaggagctgattgaggacagccagtgggaggagatcctgaagcagccctgccccagccagtacagcgccatcaaggaggaggacctggtggtgtgggtggaccccctggatggcaccaaggagtacacagagggcctgctggacaacgtgacagtgctgattggaattgcctatgagggcaaggccatcgccggggtcatcaaccagccctactacaactatgaagctggcccagatgctgtgctgggccgcaccatctggggcgtgctgggcctgggcgccttcggcttccagctgaaggaggtgcctgctgggaagcacatcatcaccaccaccaggagccacagcaacaagctggtgacagactgtgtggccgccatgaacccagatgctgtgctgcgggtgggcggggccggcaacaagatcatccagctgattgagggcaaggccagcgcctacgtgtttgccagccctggctgcaagaagtgggacacctgtgcccctgaggtgatcctgcatgctgtgggcggcaagctgacagacatccacggcaatgtgctgcagtaccacaagggcgtgagccacaggacctggcccaagccagacttcttccgggcccagttcttcctggagagccacagctgcttcagcaacttcaagaatgtgtccacccccatcaagaacatctatgatgtgatcatctatgcctatgaaacagacctgtag

SEQ ID NO: 161701 - DNA, 927 bp, Artificial Sequence
  derived and/or modified sequence
atggccagcagcaacacagtgctgatgaggctggtggccagcgcctacagcatcgcccagaaggccggcatgattgtgagaagagtgattgctgagggggacctgggcatcgtggagaagacctgtgccacagacctgcagaccaaggctgaccggctggcccagatgagcatctgcagcagcctggccaggaagttccccaagctgaccatcatcggggaggaggacctgcccagcgaggaggtggaccaggagctgattgaggacagccagtgggaggagatcctgaagcagccctgccccagccagtacagcgccatcaaggaggaggacctggtggtgtgggtggaccccctggatggcaccaaggagtacacagagggcctgctggacaacgtgacagtgctgattggaattgcctatgagggcaaggccatcgccggggtcatcaaccagccctactacaactatgaagctggcccagatgctgtgctgggccgcaccatctggggcgtgctgggcctgggcgccttcggcttccagctgaaggaggtgcctgctgggaagcacatcatcaccaccaccaggagccacagcaacaagctggtgacagactgtgtggccgccatgaacccagatgctgtgctgcgggtgggcggggccggcaacaagatcatccagctgattgagggcaaggccagcgcctacgtgtttgccagccctggctgcaagaagtgggacacctgtgcccctgaggtgatcctgcatgctgtgggcggcaagctgacagacatccacggcaatgtgctgcagtaccacaaggatgtgaagcacatgaacagcgctggggtgctggccaccctgagaaattatgactactatgccagccgggtgcctgagagcatcaagaatgccctggtgccctag

SEQ ID NO: 161702 - DNA, 975 bp, Artificial Sequence
  derived and/or modified sequence
atggccagcagcaacaccgtgctgatgcggctggtggccagcgcctatagcatcgcccagaaggcagggatgattgtgaggcgcgtgatcgccgaaggcgacctcggtattgttgagaaaacatgtgccaccgatctccaaactaaggccgaccggcttgcccagatgtcgatctgctcttccctggcgcgaaagttcccgaagttaacaatcataggggaggaggatctacccagtgaagaagtggatcaggagctgatcgaagattcccaatgggaggagatcctgaaacaaccctgtccatcgcagtacagcgccatcaaagaagaggatctcgtggtctgggtggaccctctagatggaactaaggagtataccgagggactgctggacaatgtaacagtcctgattggtatagcctatgaaggcaaggccatcgctggggtcattaaccagccttattacaattacgaagctggtccagatgctgttctcggaagaaccatttggggggtgctcgggctaggggcatttggtttccagttgaaagaggtgccagcagggaagcatataatcacaaccacaagatcccatagcaacaagcttgtcaccgattgcgtggccgctatgaaccctgacgccgtcctcagagtcggaggtgcaggcaataaaattattcagctgattgaaggtaaagctagcgcttacgtgtttgctagcccaggctgcaagaagtgggatacctgcgcccccgaagtcatactacacgccgtcggtgggaagttgaccgatatccacggcaacgtcctccagtaccacaagggggtgtcgcatcgaacatggccaaaaccagactttttccgagctcagttcttcctggaatcgcattcatgctttagcaactttaagaacgtttcaacacctataaaaaatatctatgatgtcatcatttacgcctacgaaacagacctatag

SEQ ID NO: 161703 - DNA, 927 bp, Artificial Sequence
  derived and/or modified sequence
atggccagcagcaacaccgtgctgatgcggctggtggccagcgcctactcaattgcacagaaggctgggatgatcgtccggcgggtgattgccgagggggacctgggtattgtggagaaaacctgtgccaccgatctgcagactaaggcagacaggctggcccagatgagcatttgcagctcactggcaagaaagttccctaagttgaccatcatcggtgaagaagatttgcctagcgaggaggtagaccaggaacttatcgaggacagccagtgggaggagatcctcaaacagccttgccctagtcagtactcggctattaaagaggaagatctggttgtatgggtggatcctttggatggaaccaaggaatataccgagggcctgctggacaacgtcaccgtcctaattggtattgcctatgagggcaaggcaatcgctggggtaatcaatcagccttattacaactatgaggctggccccgatgccgtcctggggcggactatatggggcgtcctaggcctgggtgcatttggtttccagctcaaggaggttcccgccggcaaacacattattaccactacccgctcacattctaataaacttgtcactgattgcgtggctgcgatgaatcccgacgcagtgttaagagtgggtggcgccggaaataagattattcagctgatcgaaggtaaggcgtctgcctatgtttttgccagccctggctgtaaaaaatgggacacttgcgctcccgaggttatcctgcacgccgtgggaggcaagctcacagatatccatgggaacgtgctgcaatatcacaaggacgttaaacacatgaacagcgccggggtgctcgcaaccctgagaaactacgattattatgctagccgtgtgcctgaaagcatcaaaaatgctctcgtgccatag

SEQ ID NO: 161704 - DNA, 927 bp, Artificial Sequence
  derived and/or modified sequence
atggccagcagcaacaccgtgctgatgcggctggtggccagcgcctactcaatcgctcagaaggctgggatgatagttcgacgcgttatcgctgagggggacctgggaattgtagagaaaacctgcgccacagacctccagactaaggcagatcggctggcccagatgagcatatgcagtagccttgcccgtaaattccccaagttaaccataatcggagaagaagacctcccaagcgaggaagtggaccaggaactgattgaagactcccagtgggaggaaatcctgaagcagccatgtccatcacagtattcagcaattaaagaggaagatcttgtggtctgggttgatcctctcgatggtaccaaagagtataccgagggcctgcttgacaacgtcaccgtgctgattggtattgcctatgagggaaaggctatagccggcgtcatcaatcagccatattataattacgaggctgggccggacgccgtgttgggcagaaccatttggggagtactgggtctgggggctttcggattccagcttaaggaagtgcctgcagggaagcatatcattaccaccactcgctcccatagtaacaaactggtgacagactgcgtcgccgctatgaatccagacgcggtgctccgggtgggcggggcaggcaataaaattatacagctgattgaaggcaaagcttcagcttatgtgttcgccagcccaggatgcaagaagtgggatacatgtgcgcccgaggtcatcttgcatgcagtcggaggaaaactcactgacattcatgggaatgtgcttcagtaccataaagatgtaaagcacatgaattctgctggcgtgttggctacgctgagaaactatgactactacgccagtcgcgtgcccgaaagcatcaagaatgcccttgtgccttag

SEQ ID NO: 161705 - DNA, 975 bp, Artificial Sequence
  derived and/or modified sequence
atggcctcttccaacaccgtgcttatgcgcctggtggcgagcgcctattccatcgcccagaaggccggaatgattgtgaggagagtaattgcggaaggagacctaggaattgtggaaaaaacatgtgccacagacctgcagacaaaggcggacagattggctcagatgagcatatgctcatcacttgcgaggaagttccctaagctcacgattattggagaggaggatcttccgtctgaggaggtggatcaggagcttatcgaggactctcagtgggaggagatcctcaaacaaccgtgtccctcccaatacagcgccattaaagaggaagaccttgtcgtatgggtcgatcctctcgatggcactaaagagtacaccgaagggctgctggataacgttacagtattgataggcatagcctatgagggcaaggcaatcgctggagtgatcaaccagccatactacaactacgaagcagggccagacgcggtgctcgggcgaactatttggggggtgttaggcctaggagcatttggctttcaactgaaggaagtccccgcaggcaagcatatcattactactacaaggtcccatagcaacaagctcgtgaccgattgcgttgcagcaatgaaccccgatgctgttctaagggtaggaggggcaggtaataagattatccagctcatcgaaggcaaagcatctgcatacgtgttcgccagccctgggtgcaagaagtgggacacatgcgcacccgaggtcatcctacacgctgtcggtgggaaactcacagacattcatgggaacgtgctgcaataccacaagggtgtctctcatcggacatggcccaagcccgactttttccgtgcgcagttcttcctggaatctcattcttgcttcagtaacttcaaaaacgtgtccacaccaattaagaatatttacgatgttattatctatgcctacgagactgatttatag

SEQ ID NO: 161706 - DNA, 927 bp, Artificial Sequence
  derived and/or modified sequence
atggccagctctaatacagttctcatgagattagtggcttcagcctactccattgcccagaaggcaggcatgattgtgcgacgagtgatcgcggagggcgatctagggatcgtggaaaagacttgtgctacagacctccagactaaggctgaccgtctagctcagatgagcatttgctcgtccttggctcgtaagtttccaaagctgacaatcataggcgaggaggatttgccatcagaagaagtggaccaggaactgattgaggattcacagtgggaagaaatattgaagcagccgtgtccctcgcaatacagtgcaataaaagaggaagatctcgtggtttgggtggatccactcgacggcacaaaggaatacaccgaaggtcttttggacaatgtcactgtgttgatcggaatagcttacgaaggaaaagccatagccggtgtgatcaaccagccctattacaactacgaggcagggcctgacgctgttctcgggaggactatctggggggtgcttggattaggggcttttggatttcagttgaaagaggtgccagcaggaaagcatataattacgaccaccagaagtcatagcaataagctcgtgacagattgtgttgccgcaatgaaccctgacgctgttcttcgagtaggtggggcaggcaataaaattattcagctcatcgaaggcaaagcctctgcttacgtgttcgctagccctggctgtaaaaagtgggacacctgtgcccctgaggtgattctgcatgcggtcgggggaaagctgaccgacatccatgggaatgtccttcagtaccacaaagacgtcaagcacatgaacagtgcgggtgttctggcaaccttaagaaactatgactactatgcgtctcgggtccctgaatccataaagaatgccctggtgccatag

SEQ ID NO: 161707 - DNA, 927 bp, Artificial Sequence
  derived and/or modified sequence
atggcaagtagcaacacagtccttatgagactggtggccagcgcttatagtattgctcagaaagcaggcatgatagtaaggcgcgtgattgctgagggggatttagggatagtggaaaagacttgtgctactgatctacaaactaaggccgacaggctagcccagatgtcaatatgttcttcactcgccaggaagtttccgaaattgaccatcataggcgaggaggatctgccatctgaggaagtcgaccaggagcttatcgaagatagccaatgggaggagattctcaaacagccttgtcctagtcagtatagcgccatcaaggaggaggacctggttgtgtgggtggatccactggatggtaccaaagaatacaccgaggggctgttggacaacgtgactgtccttatcggtattgcttatgaagggaaagccatagccggagtcatcaaccagccatattataactacgaagctggtcctgacgctgtgttaggcaggaccatatggggcgtgctgggactgggtgcctttggattccagctaaaggaagtcccagccggtaagcacattatcacaaccacaagaagtcacagtaataaactggttaccgactgtgtcgctgccatgaatcctgatgctgttctgagagttggaggagcaggcaataagattattcagctaatcgaagggaaagcctccgcctacgtctttgcgtctcctgggtgcaaaaagtgggatacttgtgcccctgaggttattctccatgctgtgggtggcaagttgactgatatacacgggaacgtgctgcaataccacaaggatgtcaagcacatgaactcagccggtgtgctggccacactgagaaactacgattattacgctagccgcgtgccagaatccattaaaaacgcactggtgccttag

SEQ ID NO: 161708 - DNA, 2737 bp, Artificial Sequence
  derived and/or modified sequence
attagctgggtgtggtggcgcgcacctccaccagtagtcccagctacacggaaggctgaggcgggaggatggcttgagcctagaagtgggaaggcagcagtgagccgtaatcgactctgggcgacagagcaagctatctatcgcttaaaaaaaaaaaaaaaaaaaaaaaaaaaaaggtgacttgcacctacggagagcttggagaaaacacggacaagtggaattttcccgcggatcaggagtctaaagaggcagtgtgaaatcgctgttgtgcgcttgcgcgcagtttcccgcatgctcagtagctgaggtagggatgccatccttctcaaaagacttattgacagtgccaaagctcggtactggacacaacgagggacctgggtctacgataacgcgcttttgctcctcctgaagtgtctttggtccaacgttgttccagagtgtaccatggcttccagtaacactgtgttgatgcggttggtagcctccgcatattctattgctcaaaaggcaggaatgatagtcagacgtgttattgctgaaggagacctgggtattgtggagaagacctgtgcaacagacctgcagaccaaagctgaccgattggcacagatgagcatatgttcttcattggcccggaaattccccaaactcacaattataggggaagaggatctgccttctgaggaagtggatcaagagctgattgaagacagtcagtgggaagaaatactgaagcaaccatgcccatcgcagtacagtgctattaaagaagaagatctcgtggtctgggttgatcctctggatggaaccaaggaatataccgaaggtcttcttgacaatgtaacagttcttattggaattgcttatgaaggaaaagccatagcaggagttattaaccagccatattacaactatgaggcaggaccagatgctgtgttggggaggacaatctggggagttttaggtttaggcgcctttgggtttcagctgaaagaagtccctgctgggaaacacattatcacaactactcgatcccatagcaacaagttggttactgactgtgttgctgctatgaaccccgatgctgtgctgcgagtaggaggagcaggaaataagattattcagctgattgaaggcaaagcctctgcttatgtatttgcaagtcctggttgtaagaagtgggatacttgtgctccagaagttattttacatgctgtgggaggcaagttaaccgatatccatgggaatgttcttcagtaccacaaggatgtgaagcatatgaactctgcaggagtcctggccacactgaggaattatgactactatgcaagccgagttccagaatctattaaaaatgcacttgttccttaaaggaaagtttcatttggccgggcgcggtggctcatgcctgtaatcccagcactttgggaggccgaggcaggtggatcacttgagctcaggagtttgagaccagcctgggcaatatcgtgagaccccatctctacaaaaatacaaattaactgggcatcctgtcatgcgcctgtcatcccagctacttgagaggctgaagcagaagaatctcttgagcccggaaggcagaggttgcagtgagctgagatcgtgccactgcactccagcctgagtgacaggagttaagccctgtctcagaaaaaaaaaaaacaaaaacccaaaaagtacttaaagtttcatttacttagctaggagaaagacttggttctcaaaataatacattttaagattaattgggtagaattagagttccacctttattcattgttgagcagtgatttatatttagttattatatttaggaatagaaaatagaattaaataatttaacttgattaatcaaccagaccaattttgacgtctggagaacttataaactcaatatgttatatttgttttcctgtatttaggtggagaaatgagaaaaagctttagttccaattgacagttcaggtcaatgttcaatgaacattcctatcttctaaaccagatttctctttttttttcctgagacggagtctcgctctgtagcctaggctagaatgtagtggcgtgatctcggctcactgcaagctccgcctcccgggttcatgccattctcctgcctcagcctcccgagtagctgggactgcaggcaccgccaccacgcctggctaattttttgtatttttagtagagaaggtgtttcaccgtgttagccaggatggtcttgatctcctgacatcgtgatctgtctgcctcggactcccaaagtgctgggattacaggtgtgagccaccgcacctggcctaaaccagatttctttagggcacaattttttctggaatctcactcttgtttttcacagtaattttaaaaacgtttctactccaattaagaatatatatgatgttattatatatgcttatgaaacagatttatgagaaaagttttttttaaataaattatttaatcctagctctttgttattcaccagctttttaaaaaagtgtttgaaaattatacattctcgactttggggattagtttattcttgtggcatcattataaggcttaattgtggaaagctaagtacttgcttctattccttccaatgagagattataacataaactattaaaattattctgctaatatacctagatttttatttttaggtctctgtccattgcttttaattaaaattatctgttttcaaatc

SEQ ID NO: 161709 - DNA, 1391 bp, Artificial Sequence
  derived and/or modified sequence
atgctcagtagctgaggtagggatgccatccttctcaaaagacttattgacagtgccaaagctcggtactggacacaacgagggacctgggtctacgataacgcgcttttgctcctcctgaagtgtctttggtccaacgttgttccaggtttgtcaccgtttctctccggccggtcagggcaagagccagacctgtgcaacagacctgcagaccaaagctgaccgattggcacagatgagcatatgttcttcattggcccggaaattccccaaactcacaattataggggaagaggatctgccttctgaggaagtggatcaagagctgattgaagacagtcagtgggaagaaatactgaagcaaccatgcccatcgcagtacagtgctattaaagaagaagatctcgtggtctgggttgatcctctggatggaaccaaggaatataccgaaggtcttcttgacaatgtaacagttcttattggaattgcttatgaaggaaaagccatagcaggagttattaaccagccatattacaactatgaggcaggaccagatgctgtgttggggaggacaatctggggagttttaggtttaggcgcctttgggtttcagctgaaagaagtccctgctgggaaacacattatcacaactactcgatcccatagcaacaagttggttactgactgtgttgctgctatgaaccccgatgctgtgctgcgagtaggaggagcaggaaataagattattcagctgattgaaggcaaagcctctgcttatgtatttgcaagtcctggttgtaagaagtgggatacttgtgctccagaagttattttacatgctgtgggaggcaagttaaccgatatccatgggaatgttcttcagtaccacaaggatgtgaagcatatgaactctgcaggagtcctggccacactgaggaattatgactactatgcaagccgagttccagaatctattaaaaatgcacttgttccttaaaggaaagtttcatttggccgggcgcggtggctcatgcctgtaatcccagcactttgggaggccgaggcaggtggatcacttgagctcaggagtttgagaccagcctgggcaatatcgtgagaccccatctctacaaaaatacaaattaactgggcatcctgtcatgcgcctgtcatcccagctacttgagaggctgaagcagaagaatctcttgagcccggaaggcagaggttgcagtgagctgagatcgtgccactgcactccagcctgagtgacaggagttaagccctgtctcagaaaaaaaaaaaacaaaaacccaaaaagtacttaaagtttcatttacttagctaggagaaagacttggttctcaaaataatacattttaagattaatt

SEQ ID NO: 161710 - DNA, 1147 bp, Artificial Sequence
  derived and/or modified sequence
gcgcgcagtttcccgcatgctcagtagctgaggtagggatgccatccttctcaaaagacttattgacagtgccaaagctcggtactggacacaacgagggacctgggtctacgataacgcgcttttgctcctcctgaagtgtctttggtccaacgttgttccagagtgtaccatggcttccagtaacactgtgttgatgcggttggtagcctccgcatattctattgctcaaaaggcaggaatgatagtcagacgtgttattgctgaaggagacctgggtattgtggagaagacctgtgcaacagacctgcagaccaaagctgaccgattggcacagatgagcatatgttcttcattggcccggaaattccccaaactcacaattataggggaagaggatctgccttctgaggaagtggatcaagagctgattgaagacagtcagtgggaagaaatactgaagcaaccatgcccatcgcagtacagtgctattaaagaagaagatctcgtggtctgggttgatcctctggatggaaccaaggaatataccgaaggtcttcttgacaatgtaacagttcttattggaattgcttatgaaggaaaagccatagcaggagttattaaccagccatattacaactatgaggcaggaccagatgctgtgttggggaggacaatctggggagttttaggtttaggcgcctttgggtttcagctgaaagaagtccctgctgggaaacacattatcacaactactcgatcccatagcaacaagttggttactgactgtgttgctgctatgaaccccgatgctgtgctgcgagtaggaggagcaggaaataagattattcagctgattgaaggcaaagcctctgcttatgtatttgcaagtcctggttgtaagaagtgggatacttgtgctccagaagttattttacatgctgtgggaggcaagttaaccgatatccatgggaatgttcttcagtaccacaagggtgtgagccaccgcacctggcctaaaccagatttctttagggcacaattttttctggaatctcactcttgtttttcaaattttaaaaacgtttctactccaattaagaatatatatgatgttattatatatgcttatgaaacagatttatga

SEQ ID NO: 161711 - DNA, 2461 bp, Artificial Sequence
  derived and/or modified sequence
gcgcgcagtttcccgcatgctcagtagctgaggtagggatgccatccttctcaaaagacttattgacagtgccaaagctcggtactggacacaacgagggacctgggtctacgataacgcgcttttgctcctcctgaagtgtctttggtccaacgttgttccagagtgtaccatggcttccagtaacactgtgttgatgcggttggtagcctccgcatattctattgctcaaaaggcaggaatgatagtcagacgtgttattgctgaaggagacctgggtattgtggagaagacctgtgcaacagacctgcagaccaaagctgaccgattggcacagatgagcatatgttcttcattggcccggaaattccccaaactcacaattataggggaagaggatctgccttctgaggaagtggatcaagagctgattgaagacagtcagtgggaagaaatactgaagcaaccatgcccatcgcagtacagtgctattaaagaagaagatctcgtggtctgggttgatcctctggatggaaccaaggaatataccgaaggtcttcttgacaatgtaacagttcttattggaattgcttatgaaggaaaagccatagcaggagttattaaccagccatattacaactatgaggcaggaccagatgctgtgttggggaggacaatctggggagttttaggtttaggcgcctttgggtttcagctgaaagaagtccctgctgggaaacacattatcacaactactcgatcccatagcaacaagttggttactgactgtgttgctgctatgaaccccgatgctgtgctgcgagtaggaggagcaggaaataagattattcagctgattgaaggcaaagcctctgcttatgtatttgcaagtcctggttgtaagaagtgggatacttgtgctccagaagttattttacatgctgtgggaggcaagttaaccgatatccatgggaatgttcttcagtaccacaaggatgtgaagcatatgaactctgcaggagtcctggccacactgaggaattatgactactatgcaagccgagttccagaatctattaaaaatgcacttgttccttaaaggaaagtttcatttggccgggcgcggtggctcatgcctgtaatcccagcactttgggaggccgaggcaggtggatcacttgagctcaggagtttgagaccagcctgggcaatatcgtgagaccccatctctacaaaaatacaaattaactgggcatcctgtcatgcgcctgtcatcccagctacttgagaggctgaagcagaagaatctcttgagcccggaaggcagaggttgcagtgagctgagatcgtgccactgcactccagcctgagtgacaggagttaagccctgtctcagaaaaaaaaaaaacaaaaacccaaaaagtacttaaagtttcatttacttagctaggagaaagacttggttctcaaaataatacattttaagattaattgggtagaattagagttccacctttattcattgttgagcagtgatttatatttagttattatatttaggaatagaaaatagaattaaataatttaacttgattaatcaaccagaccaattttgacgtctggagaacttataaactcaatatgttatatttgttttcctgtatttaggtggagaaatgagaaaaagctttagttccaattgacagttcaggtcaatgttcaatgaacattcctatcttctaaaccagatttctctttttttttcctgagacggagtctcgctctgtagcctaggctagaatgtagtggcgtgatctcggctcactgcaagctccgcctcccgggttcatgccattctcctgcctcagcctcccgagtagctgggactgcaggcaccgccaccacgcctggctaattttttgtatttttagtagagaaggtgtttcaccgtgttagccaggatggtcttgatctcctgacatcgtgatctgtctgcctcggactcccaaagtgctgggattacaggtgtgagccaccgcacctggcctaaaccagatttctttagggcacaattttttctggaatctcactcttgtttttcacagtaattttaaaaacgtttctactccaattaagaatatatatgatgttattatatatgcttatgaaacagatttatgagaaaagttttttttaaataaattatttaatcctagctctttgttattcaccagctttttaaaaaagtgtttgaaaattatacattctcgactttggggattagtttattcttgtggcatcattataaggcttaattgtggaaagctaagtacttgcttctattccttccaatgagagattataacataaactattaaaattattctgctaatatacctagatttttatttttaggtctctgtccattgcttttaattaaaattatctgttttcaaatcaa

SEQ ID NO: 161712 - DNA, 975 bp, Artificial Sequence
  derived and/or modified sequence
atggccagcagcaacaccgtgctgatgagactggtggccagcgcctacagcatcgcccagaaggccggcatgatcgtgagaagagtgatcgccgagggcgacctgggcatcgtggagaagacctgcgccaccgacctgcagaccaaggccgacagactggcccagatgagcatctgcagcagcctggccagaaagttccccaagctgaccatcatcggcgaggaggacctgcccagcgaggaggtggaccaggagctgatcgaggacagccagtgggaggagatcctgaagcagccctgccccagccagtacagcgccatcaaggaggaggacctggtggtgtgggtggaccccctggacggcaccaaggagtacaccgagggcctgctggacaacgtgaccgtgctgatcggcatcgcctacgagggcaaggccatcgccggcgtgatcaaccagccctactacaactacgaggccggccccgacgccgtgctgggcagaaccatctggggcgtgctgggcctgggcgccttcggcttccagctgaaggaggtgcccgccggcaagcacatcatcaccaccaccagaagccacagcaacaagctggtgaccgactgcgtggccgccatgaaccccgacgccgtgctgagagtgggcggcgccggcaacaagatcatccagctgatcgagggcaaggccagcgcctacgtgttcgccagccccggctgcaagaagtgggacacctgcgcccccgaggtgatcctgcacgccgtgggcggcaagctgaccgacatccacggcaacgtgctgcagtaccacaagggcgtgagccacagaacctggcccaagcccgacttcttcagagcccagttcttcctggagagccacagctgcttcagcaacttcaagaacgtgagcacccccatcaagaacatctacgacgtgatcatctacgcctacgagaccgacctgtag

SEQ ID NO: 161713 - DNA, 927 bp, Artificial Sequence
  derived and/or modified sequence
atggccagcagcaacaccgtgctgatgagactggtggccagcgcctacagcatcgcccagaaggccggcatgatcgtgagaagagtgatcgccgagggcgacctgggcatcgtggagaagacctgcgccaccgacctgcagaccaaggccgacagactggcccagatgagcatctgcagcagcctggccagaaagttccccaagctgaccatcatcggcgaggaggacctgcccagcgaggaggtggaccaggagctgatcgaggacagccagtgggaggagatcctgaagcagccctgccccagccagtacagcgccatcaaggaggaggacctggtggtgtgggtggaccccctggacggcaccaaggagtacaccgagggcctgctggacaacgtgaccgtgctgatcggcatcgcctacgagggcaaggccatcgccggcgtgatcaaccagccctactacaactacgaggccggccccgacgccgtgctgggcagaaccatctggggcgtgctgggcctgggcgccttcggcttccagctgaaggaggtgcccgccggcaagcacatcatcaccaccaccagaagccacagcaacaagctggtgaccgactgcgtggccgccatgaaccccgacgccgtgctgagagtgggcggcgccggcaacaagatcatccagctgatcgagggcaaggccagcgcctacgtgttcgccagccccggctgcaagaagtgggacacctgcgcccccgaggtgatcctgcacgccgtgggcggcaagctgaccgacatccacggcaacgtgctgcagtaccacaaggacgtgaagcacatgaacagcgccggcgtgctggccaccctgagaaactacgactactacgccagcagagtgcccgagagcatcaagaacgccctggtgccctag

SEQ ID NO: 161714 - protein, 450 aa, Artificial Sequence
  derived and/or modified sequence
MREIVHIQAGQCGNQIGAKFWEVISDEHGIDPSGNYVGDSDLQLERISVYYNEASSHKYVPRAILVDLEPGTMDSVRSGAFGHLFRPDNFIFGQSGAGNNWAKGHYTEGAELVDSVLDVVRKECENCDCLQGFQLTHSLGGGTGSGMGTLLISKVREEYPDRIMNTFSVVPSPKVSDTVVEPYNATLSIHQLVENTDETYCIDNEALYDICFRTLKLATPTYGDLNHLVSATMSGVTTSLRFPGQLNADLRKLAVNMVPFPRLHFFMPGFAPLTARGSQQYRALTVPELTQQMFDAKNMMAACDPRHGRYLTVATVFRGRMSMKEVDEQMLAIQSKNSSYFVEWIPNNVKVAVCDIPPRGLKMSSTFIGNSTAIQELFKRISEQFTAMFRRKAFLHWYTGEGMDEMEFTEAESNMNDLVSEYQQYQDATAEEEGEMYEDDEEESEAQGPK

SEQ ID NO: 161715 - protein, 797 aa, Artificial Sequence
  derived and/or modified sequence
MAVQGSQRRLLGSLNSTPTAIPQLGLAANQTGARCLEVSISDGLFLSLGLVSLVENALVVATIAKNRNLHSPMYCFICCLALSDLLVSGSNVLETAVILLLEAGALVARAAVLQQLDNVIDVITCSSMLSSLCFLGAIAVDRYISIFYALRYHSIVTLPRARRAVAAIWVASVVFSTLFIAYYDHVAVLLCLVVFFLAMLVLMAVLYVHMLARACQHAQGIARLHKRQRPVHQGFGLKGAVTLTILLGIFFLCWGPFFLHLTLIVLCPEHPTCGCIFKNFNLFLALIICNAIIDPLIYAFHSQELRRTLKEVLTCSCSQDRALVSWDVKSLGGSVCQELLPQQPQEKGLCDQKASSTALQRLLQKEFWEVISDEHGIDPSGNYVGDSDLQLERISVYYNEASSHKYVPRAILVDLEPGTMDSVRSGAFGHLFRPDNFIFGQSGAGNNWAKGHYTEGAELVDSVLDVVRKECENCDCLQGFQLTHSLGGGTGSGMGTLLISKVREEYPDRIMNTFSVVPSPKVSDTVVEPYNATLSIHQLVENTDETYCIDNEALYDICFRTLKLATPTYGDLNHLVSATMSGVTTSLRFPGQLNADLRKLAVNMVPFPRLHFFMPGFAPLTARGSQQYRALTVPELTQQMFDAKNMMAACDPRHGRYLTVATVFRGRMSMKEVDEQMLAIQSKNSSYFVEWIPNNVKVAVCDIPPRGLKMSSTFIGNSTAIQELFKRISEQFTAMFRRKAFLHWYTGEGMDEMEFTEAESNMNDLVSEYQQYQDATAEEEGEMYEDDEEESEAQGPK

SEQ ID NO: 161716 - DNA, 1353 bp, Artificial Sequence
  derived and/or modified sequence
atgagagagatcgtgcacatccaggccggccagtgcggcaaccagatcggcgccaagttctgggaggtgatcagcgacgagcacggcatcgaccccagcggcaactacgtgggcgacagcgacctgcagctggagagaatcagcgtgtactacaacgaggccagcagccacaagtacgtgcccagagccatcctggtggacctggagcccggcaccatggacagcgtgagaagcggcgccttcggccacctgttcagacccgacaacttcatcttcggccagagcggcgccggcaacaactgggccaagggccactacaccgagggcgccgagctggtggacagcgtgctggacgtggtgagaaaggagtgcgagaactgcgactgcctgcagggcttccagctgacccacagcctgggcggcggcaccggcagcggcatgggcaccctgctgatcagcaaggtgagagaggagtaccccgacagaatcatgaacaccttcagcgtggtgcccagccccaaggtgagcgacaccgtggtggagccctacaacgccaccctgagcatccaccagctggtggagaacaccgacgagacctactgcatcgacaacgaggccctgtacgacatctgcttcagaaccctgaagctggccacccccacctacggcgacctgaaccacctggtgagcgccaccatgagcggcgtgaccaccagcctgagattccccggccagctgaacgccgacctgagaaagctggccgtgaacatggtgcccttccccagactgcacttcttcatgcccggcttcgcccccctgaccgccagaggcagccagcagtacagagccctgaccgtgcccgagctgacccagcagatgttcgacgccaagaacatgatggccgcctgcgaccccagacacggcagatacctgaccgtggccaccgtgttcagaggcagaatgagcatgaaggaggtggacgagcagatgctggccatccagagcaagaacagcagctacttcgtggagtggatccccaacaacgtgaaggtggccgtgtgcgacatcccccccagaggcctgaagatgagcagcaccttcatcggcaacagcaccgccatccaggagctgttcaagagaatcagcgagcagttcaccgccatgttcagaagaaaggccttcctgcactggtacaccggcgagggcatggacgagatggagttcaccgaggccgagagcaacatgaacgacctggtgagcgagtaccagcagtaccaggacgccaccgccgaggaggagggcgagatgtacgaggacgacgaggaggagagcgaggcccagggccccaagtag

SEQ ID NO: 161717 - DNA, 2394 bp, Artificial Sequence
  derived and/or modified sequence
atggccgtgcagggcagccagagaagactgctgggcagcctgaacagcacccccaccgccatcccccagctgggcctggccgccaaccagaccggcgccagatgcctggaggtgagcatcagcgacggcctgttcctgagcctgggcctggtgagcctggtggagaacgccctggtggtggccaccatcgccaagaacagaaacctgcacagccccatgtactgcttcatctgctgcctggccctgagcgacctgctggtgagcggcagcaacgtgctggagaccgccgtgatcctgctgctggaggccggcgccctggtggccagagccgccgtgctgcagcagctggacaacgtgatcgacgtgatcacctgcagcagcatgctgagcagcctgtgcttcctgggcgccatcgccgtggacagatacatcagcatcttctacgccctgagataccacagcatcgtgaccctgcccagagccagaagagccgtggccgccatctgggtggccagcgtggtgttcagcaccctgttcatcgcctactacgaccacgtggccgtgctgctgtgcctggtggtgttcttcctggccatgctggtgctgatggccgtgctgtacgtgcacatgctggccagagcctgccagcacgcccagggcatcgccagactgcacaagagacagagacccgtgcaccagggcttcggcctgaagggcgccgtgaccctgaccatcctgctgggcatcttcttcctgtgctggggccccttcttcctgcacctgaccctgatcgtgctgtgccccgagcaccccacctgcggctgcatcttcaagaacttcaacctgttcctggccctgatcatctgcaacgccatcatcgaccccctgatctacgccttccacagccaggagctgagaagaaccctgaaggaggtgctgacctgcagctgcagccaggacagagccctggtgagctgggacgtgaagagcctgggcggcagcgtgtgccaggagctgctgccccagcagccccaggagaagggcctgtgcgaccagaaggccagcagcaccgccctgcagagactgctgcagaaggagttctgggaggtgatcagcgacgagcacggcatcgaccccagcggcaactacgtgggcgacagcgacctgcagctggagagaatcagcgtgtactacaacgaggccagcagccacaagtacgtgcccagagccatcctggtggacctggagcccggcaccatggacagcgtgagaagcggcgccttcggccacctgttcagacccgacaacttcatcttcggccagagcggcgccggcaacaactgggccaagggccactacaccgagggcgccgagctggtggacagcgtgctggacgtggtgagaaaggagtgcgagaactgcgactgcctgcagggcttccagctgacccacagcctgggcggcggcaccggcagcggcatgggcaccctgctgatcagcaaggtgagagaggagtaccccgacagaatcatgaacaccttcagcgtggtgcccagccccaaggtgagcgacaccgtggtggagccctacaacgccaccctgagcatccaccagctggtggagaacaccgacgagacctactgcatcgacaacgaggccctgtacgacatctgcttcagaaccctgaagctggccacccccacctacggcgacctgaaccacctggtgagcgccaccatgagcggcgtgaccaccagcctgagattccccggccagctgaacgccgacctgagaaagctggccgtgaacatggtgcccttccccagactgcacttcttcatgcccggcttcgcccccctgaccgccagaggcagccagcagtacagagccctgaccgtgcccgagctgacccagcagatgttcgacgccaagaacatgatggccgcctgcgaccccagacacggcagatacctgaccgtggccaccgtgttcagaggcagaatgagcatgaaggaggtggacgagcagatgctggccatccagagcaagaacagcagctacttcgtggagtggatccccaacaacgtgaaggtggccgtgtgcgacatcccccccagaggcctgaagatgagcagcaccttcatcggcaacagcaccgccatccaggagctgttcaagagaatcagcgagcagttcaccgccatgttcagaagaaaggccttcctgcactggtacaccggcgagggcatggacgagatggagttcaccgaggccgagagcaacatgaacgacctggtgagcgagtaccagcagtaccaggacgccaccgccgaggaggagggcgagatgtacgaggacgacgaggaggagagcgaggcccagggccccaagtag

SEQ ID NO: 161718 - DNA, 1353 bp, Artificial Sequence
  derived and/or modified sequence
atgagagaaatcgtccacatccaggcaggccaatgtggcaatcaaatcggagcaaagttctgggaggtgatcagcgatgaacatggaatcgatccaagtggaaactatgtaggtgactcagatctccagctggaaagaattagtgtttactacaatgaagcttctagtcataagtatgtcccgagggcaattctcgtcgacctggaaccgggaactatggacagcgtgcggtctggcgcgttcggtcacctgtttcgccctgataacttcatttttgggcaatctggagctggcaacaattgggcgaagggccattacaccgagggggccgagttggttgactctgttcttgatgtggttcggaaggaatgcgagaattgcgactgtctgcagggatttcagctcacacactcactgggaggaggcactggatcgggaatggggaccctattgatcagcaaagttagggaggagtatccagatcggataatgaacactttctctgtggtgccctcacccaaggtgtcagatacagtggtggaaccctacaatgctaccctgagcattcaccaattagtggagaacactgatgaaacctattgtatcgacaatgaggcactttacgacatctgtttccgtaccctcaagctggcaacccccacgtacggcgatctaaaccatctagttagtgctactatgagcggggtgactaccagtctccggtttccggggcagctcaatgctgacctcaggaagctggcagttaatatggtgcccttccccagacttcacttcttcatgcccggctttgcccctctgactgcacggggttctcagcaataccgcgccctcaccgtgcccgaactcacccagcagatgttcgatgcaaagaatatgatggccgcctgcgaccctagacacgggagataccttaccgttgccactgtgtttagaggccgcatgtctatgaaagaggtggacgaacagatgctggctatacagtctaagaattccagctattttgtcgagtggatcccaaataacgtgaaggtagccgtatgcgatatcccaccccggggtcttaagatgtcatcaacatttatcgggaacagcaccgctatccaggaactgtttaagagaatttcagaacagtttacggcaatgtttcgtcgcaaagcttttctgcattggtatactggggagggcatggatgagatggaattcaccgaagcagagtcgaatatgaacgatctcgtgtcagagtaccaacagtatcaagatgcaaccgccgaggaggaaggcgaaatgtacgaggatgatgaagaagagagcgaggcgcaggggcccaagtag

SEQ ID NO: 161719 - DNA, 2394 bp, Artificial Sequence
  derived and/or modified sequence
atggctgtgcagggaagccaacgcaggctcttgggctccctaaacagtacaccaaccgcgattcctcaacttggactggcggccaatcagaccggcgcacggtgcttggaggtgagcattagcgatggtctgtttctcagtctgggcctggtgagtctggtcgaaaacgctctggtggtggctactatcgctaagaacagaaatctgcatagcccaatgtattgcttcatctgctgtctggccctgtccgatctcttggtgtcagggtctaacgttctggagaccgctgtgattctgctgctggaggctggcgccctggtcgccagggcagccgtcttgcagcagttagataatgtgatcgatgttattacatgctcaagtatgttgagctcattgtgcttcctgggagccatcgccgtcgatcgctacattagcatattttacgccctgagataccatagtatcgttaccttgcccagagcaagacgagcagtggctgccatttgggtggcatctgttgtgtttagtaccttattcatcgcttattacgaccacgtggccgtgctgctttgcctggttgtttttttcctagccatgctggtcctgatggcagtcttgtacgtgcacatgctagcacgcgcttgccagcacgcccagggtattgcccggcttcacaagaggcagcgacctgtacatcaagggttcggattgaaaggagccgtgaccttgaccatactccttggcatcttcttcctctgttggggtccattctttttgcacctgaccctgatcgttctgtgcccagaacatcccacttgtggatgcatctttaaaaatttcaacttatttctcgctctgatcatctgcaatgctatcattgacccactgatatatgcatttcattctcaggagctgcggcgcaccctgaaagaggtgcttacttgctcctgcagccaagacagggccctggttagttgggacgttaaaagcttgggaggctcagtgtgtcaggagctgttgccacagcagccacaggagaagggactgtgtgaccagaaggcgtcctctacggccttacagaggctacttcagaaggaattttgggaggtgatctctgacgagcacgggatagatccttcaggaaattatgtgggcgactcggatcttcagctggagcgcatctccgtgtattacaatgaagcaagctcacacaagtacgtgcctagggcgatcctggtggacctagagccaggaacaatggacagtgtgcggagtggtgctttcgggcacctcttccgaccagataatttcatctttgggcagagcggagctggaaataattgggcaaagggccattacacagagggggctgagctggtggactccgtcctggacgtcgtcagaaaggagtgtgagaactgcgattgtctgcagggttttcagttgactcactccttggggggcggaactggcagtggaatgggaactctgctcatcagtaaggtgagggaggaatatccagatcggatcatgaacacgtttagtgtggtcccaagccccaaagtgtctgacacagttgtggagccctacaacgccaccctgtctatccaccagctcgtggaaaacactgacgaaacctattgcatcgataacgaggccctctacgacatatgttttcgaacactaaagctggccaccccaacctatggcgacctcaatcatctggtaagcgccaccatgtccggagtcacgaccagcctgaggtttcctgggcagcttaacgccgatctaaggaagctcgcagtcaatatggtgccattcccacggttacatttctttatgcccggatttgcccctctcaccgcccgcggttcacagcagtatcgcgccttgaccgtgccagagctgacccaacagatgttcgacgccaaaaacatgatggccgcatgtgacccccggcacggaagatatctgacggtcgccaccgtattcaggggccggatgtccatgaaggaagtggatgagcagatgctggctattcaaagcaaaaattccagctactttgtcgaatggataccaaataacgtgaaggtcgccgtgtgcgatattccacccagaggactgaaaatgagctcaacatttattggcaatagcaccgcgatccaggaactgttcaagcgaattagcgaacagtttacagccatgttccggaggaaggcattcctgcactggtacactggggaaggcatggatgaaatggagttcacagaagccgaaagcaatatgaatgacctggtctcagagtatcagcaatatcaggacgcaacagcagaggaggaaggagagatgtacgaggatgacgaagaggaaagcgaggcccagggaccaaaatag

SEQ ID NO: 161720 - DNA, 1353 bp, Artificial Sequence
  derived and/or modified sequence
atgagggagatcgtgcacatccaggccggccagtgtggcaaccagatcggggccaagttctgggaggtgatcagtgatgagcacggcatcgaccccagcggcaactacgtgggggacagcgacctgcagctggagcgcatctctgtgtactacaatgaggccagcagccacaagtatgtgccccgggccatcctggtggacctggagcccggcaccatggattctgtgcgcagcggggccttcggccacctgttccggccagacaacttcatcttcggccagagcggggccggcaacaactgggccaagggccactacacagaaggagctgagctggtggacagcgtgctggatgtggtgaggaaagaatgtgagaactgtgactgcctgcagggcttccagctgacccacagcctgggcggcggcactggaagtggcatgggcaccctgctgatcagcaaggtgcgggaggagtacccagaccgcatcatgaacaccttctctgtggtgcccagccccaaggtgtctgacacagtggtggagccctacaatgccaccctgagcatccaccagctggtggagaacacagatgagacctactgcatcgacaatgaggccctgtatgacatctgcttccgcaccctgaagctggccacccccacctacggggacctgaaccacctggtgtctgccaccatgtctggagtgaccaccagcctgcgcttccctggccagctgaatgctgacctgaggaagctggccgtgaacatggtgcccttcccccggctgcacttcttcatgcctggctttgcccccctgacagcccggggcagccagcagtaccgggccctgactgtgcctgagctgacccagcagatgtttgatgccaagaacatgatggccgcctgtgaccccaggcatggccgctacctgactgtggccaccgtcttccggggccgcatgtccatgaaggaggtggatgagcagatgctggccatccagagcaagaacagcagctactttgtggagtggatccccaacaacgtgaaggtggccgtgtgtgacatccccccccggggcctgaagatgagcagcaccttcatcggcaacagcacagccatccaggagctgttcaagaggatcagcgagcagttcaccgccatgttccggaggaaggccttcctgcactggtacacaggagagggcatggatgagatggagttcacagaagctgagagcaacatgaatgacctggtgtctgagtaccagcagtaccaggatgccacagctgaggaggagggggagatgtatgaagatgatgaggaggagagcgaggcccagggccccaagtag

SEQ ID NO: 161721 - DNA, 2394 bp, Artificial Sequence
  derived and/or modified sequence
atggctgtgcagggcagccagaggcggctgctgggcagcctgaacagcacccccacagccatcccccagctgggcctggccgccaaccagacaggagcccgctgcctggaggtgtccatcagtgatggcctcttcctgagcctgggcctggtgtccctggtggagaatgccctggtggtggccaccatcgccaagaacagaaacctgcacagccccatgtactgcttcatctgctgcctggccctgagtgacctgctggtgtctggcagcaatgtgctggagacagctgtgatcctgctgctggaggccggggccctggtggcccgggctgctgtgctgcagcagctggacaacgtgattgatgtgatcacctgcagctccatgctgagcagcctgtgcttcctgggcgccatcgctgtggaccgctacatcagcatcttctacgccctgcgctaccacagcatcgtgaccctgccccgggcccggcgggctgtggccgccatctgggtggcctctgtggtgttcagcaccctcttcatcgcctactatgaccacgtggccgtgctgctgtgcctggtggtgttcttcctggccatgctggtgctgatggctgtgctgtatgtgcacatgctggcccgggcctgccagcacgcccagggcatcgcccggctgcacaagaggcagaggcctgtgcaccagggcttcggcctgaagggagctgtgaccctgaccatcctgctgggcatcttcttcctgtgctggggccccttcttcctgcacctgaccctcatcgtgctgtgcccagagcaccccacctgtggctgcatcttcaagaacttcaacctcttcctggccctgatcatctgcaatgccatcatcgaccccctcatctatgccttccacagccaggagctgcggaggaccctgaaggaggtgctgacctgcagctgcagccaggaccgggccctggtgtcctgggatgtgaagagcctgggcggctctgtgtgccaggagctgctgccccagcagccccaggagaagggcctgtgtgaccagaaggccagcagcacagccctgcagaggctgctgcagaaggagttctgggaggtgatcagtgatgaacatggaattgaccccagcggcaactacgtgggggacagcgacctgcagctggagcgcatctctgtgtactacaatgaggccagcagccacaagtatgtgccccgggccatcctggtggacctggagcccggcaccatggacagcgtgcgcagcggggccttcggccacctgttccggccagacaacttcatcttcggccagagcggggccggcaacaactgggccaagggccactacacagagggcgctgagctggtggacagcgtgctggatgtggtgaggaaagaatgtgagaactgtgactgcctgcagggcttccagctgacccacagcctgggcggcggcaccggcagcggcatgggcaccctgctgatcagcaaggtgcgggaggagtacccagaccgcatcatgaacaccttctctgtggtgcccagccccaaggtgtctgacacagtggtggagccctacaatgccaccctgagcatccaccagctggtggagaacacagatgagacctactgcatcgacaatgaggccctgtatgacatctgcttccgcaccctgaagctggccacccccacctatggagacctgaaccacctggtgtctgccaccatgtctggagtgaccaccagcctgcgcttccctggccagctgaatgctgacctgaggaagctggccgtgaacatggtgcccttcccccggctgcacttcttcatgcctggctttgcccccctgacagcccggggcagccagcagtaccgggccctgactgtgcctgagctgacccagcagatgtttgatgccaagaacatgatggccgcctgtgaccccaggcatggccgctacctgactgtggccaccgtcttccggggccgcatgtccatgaaggaggtggatgagcagatgctggccatccagagcaagaacagcagctactttgtggagtggatccccaacaacgtgaaggtggccgtgtgtgacatccccccccggggcctgaagatgagcagcaccttcatcggcaacagcacagccatccaggagctgttcaagaggatcagcgagcagttcaccgccatgttccggaggaaggccttcctgcactggtacaccggggagggcatggatgagatggagttcacagaggccgagagcaacatgaatgacctggtgtctgagtaccagcagtaccaggatgccacagctgaggaggagggggagatgtatgaagatgatgaggaggagagcgaggcccagggccccaagtag

SEQ ID NO: 161722 - DNA, 1353 bp, Artificial Sequence
  derived and/or modified sequence
atgcgggagatcgtgcacatccaggccggccagtgcggcaaccagataggtgcaaaattttgggaggtgatctcagatgaacacggcatagaccctagcggaaattacgtcggcgattccgacctgcagttggagcgcattagcgtttattacaatgaggcgtcatcacacaagtatgtgccccgcgccatcctggtggatctagaacctgggacaatggactccgtccggtctggcgcctttggtcacctgtttagacctgataatttcattttcggtcagtcaggggctggcaataattgggctaaggggcattacacagaaggggctgagttggtggactctgtattagatgtggtaaggaaggagtgcgagaattgcgattgccttcagggatttcagcttacacacagcctggggggcggcaccgggtctggcatgggcaccctgctcataagcaaggttagggaggaatacccggatcggattatgaataccttctccgttgtgccctcacctaaagtttcggatactgtggtggaaccgtataacgccacactctccatccaccaactcgtggaaaacacagacgaaacctattgcattgacaacgaggcgttgtacgacatttgcttccggaccctgaagctcgcaaccccaacctatggggaccttaatcacctcgtgagcgccacaatgagcggcgtaacaacatcgctgagatttcctggacagctaaacgctgatctcaggaaattagcggttaacatggtgccgttcccccggctgcactttttcatgcccggctttgccccactgaccgcgcgcgggagtcagcagtaccgtgcgctgacggtgcccgagttaacccagcagatgtttgacgctaagaatatgatggctgcctgtgacccgagacatggtcggtatttgaccgtggccactgtgtttcggggtaggatgtcaatgaaggaagtagatgaacagatgctggcaattcagtcaaaaaattcgtcatatttcgtggagtggattccaaacaatgtgaaagttgctgtttgtgatataccccctaggggacttaaaatgtcttctacgtttattggaaactccaccgcgattcaggaattatttaagaggatctcagagcaatttacagcaatgtttaggcggaaggcatttctgcactggtatacaggagaaggaatggacgagatggaatttaccgaagcggagtccaacatgaatgacttggtgagcgaatatcaacagtaccaggacgctactgcagaagaagaaggcgagatgtatgaggacgacgaggaagaaagtgaagcccaggggccgaaatag

SEQ ID NO: 161723 - DNA, 2394 bp, Artificial Sequence
  derived and/or modified sequence
atggccgtgcagggcagccagcggcggctgctgggcagcctgaacagcaccccaacagcaattccgcagctgggtctcgctgccaaccagactggtgcccggtgcctggaagttagtatctccgatggactcttcctctcattgggtctggtgagtctcgtggagaacgccctggtggtggctaccattgctaaaaaccgtaatctgcacagcccaatgtactgcttcatttgctgtctggcactttccgacttgctggttagcggctcgaacgtgctggaaacagcagtcatcctactgctggaggctggggccctcgtggcgcgcgccgcagtgctgcagcagctggataacgtcattgacgtcataacctgttccagtatgttatcttcactttgctttctgggtgctatcgctgtcgatcgctacatcagcatattctatgccttgcgctaccattcaatagtgacgctgcctcgcgcccgaagagcagtcgccgcaatctgggtagcttctgttgtgttttcaaccctgtttattgcttactacgatcacgtggcggttctgttatgtctggtcgtgttttttctggcgatgctggttcttatggccgtgctgtacgtgcatatgttagccagggcctgccaacacgctcagggaatcgcgcgactccacaagagacaaaggcctgtgcaccaggggttcggactgaagggtgccgtcactctgaccattcttctcggcatttttttcctgtgctggggccccttctttctgcatttgacactcatagttctatgccctgaacatcccacatgtgggtgcatctttaagaactttaatctctttctggcgttgataatctgcaatgcaatcattgaccccttgatctacgccttccactcccaagagctccggcgcactcttaaagaggtgctgacttgtagctgcagtcaggatagggccctcgtctcctgggatgtgaagagcttgggtggaagcgtttgccaggagttgttgccacaacagccccaggagaaaggactgtgtgaccaaaaggcatcgagcaccgccctgcaacgccttttacagaaggaattttgggaggttataagcgatgagcatggcatcgacccctctggcaattacgttggggacagcgatctccagctagagcggatctctgtgtattacaacgaggccagcagccataagtatgtcccccgtgcaatcctggtggacctggagcctggaaccatggatagcgtgaggagcggtgctttcggccacctgttcagaccagataatttcatctttggacaaagcggtgccggaaacaattgggctaagggacattacacagaaggggcagagttggttgattcggtgcttgatgtggtaagaaaagagtgcgaaaactgtgactgtctgcaaggttttcagctgacacatagcctgggaggaggaactggaagcggaatggggacccttctgatctcaaaggtgcgagaagaatacccagacaggatcatgaacactttcagtgtggtccccagcccaaaggtctctgacaccgttgtggagccttataatgccacactctctatccaccagctggtcgagaatacagacgagacctattgcattgataatgaggcactatacgacatctgttttcgcactttgaaactggcaacaccgacctacggtgatctcaaccacttggtgagtgctacgatgagcggcgtgacaacttctttacggtttcccggacaactaaacgctgacctgaggaagcttgccgttaacatggttccatttccccggctgcacttttttatgcccggattcgcccccctgacagctcgcggctcacagcaatacagggctcttacagtgccggagctgacacagcaaatgttcgacgcaaagaacatgatggccgcctgtgacccgcgtcacggtaggtaccttactgtggccaccgtatttaggggtagaatgagcatgaaagaggtggatgaacaaatgctggctatccagtcaaaaaattcctcttacttcgtcgagtggatccccaacaacgtcaaggtagccgtgtgtgacattcccccgagaggtctcaaaatgtcatctacattcataggcaattcaactgctatccaggagttatttaagcggatttccgagcaatttactgctatgtttcgcagaaaggcgttccttcactggtataccggagaagggatggacgagatggaattcaccgaggccgagtccaacatgaacgacctcgtgagcgagtatcagcagtaccaagatgccacagccgaagaggaaggtgaaatgtatgaggatgatgaagaagagtcagaagcacaggggcccaagtag

SEQ ID NO: 161724 - DNA, 1353 bp, Artificial Sequence
  derived and/or modified sequence
atgagagagatcgtgcacatccaggctggccaatgtggtaatcaaattggtgcaaagttctgggaggtcatatccgacgaacacgggattgacccttccggcaattatgtgggagatagtgaccttcaactggagcgcataagcgtatattacaatgaggcgtccagtcacaaatacgtcccccgagcaatcctggtggacctagaacccggtactatggatagcgtaaggtcaggagcatttggacatttatttaggcccgacaactttattttcggccagtccggtgccggaaacaattgggctaaaggacattatacagagggagcggagctggttgattcagtgttggacgtagttcggaaagagtgcgagaattgcgactgtttacagggattccagctgactcactctctgggagggggtacaggctccggaatgggcactctcctaattagcaaagtacgggaggagtaccccgaccgcattatgaacaccttctcagtggtgccctcacccaaggtgtctgatacggtcgtggagccatacaacgcaacgctcagcatccaccagctggtcgagaacacagatgagacgtactgtatcgataacgaagccctctacgatatttgttttcggacactcaagctggccactccaacctacggcgatttgaaccacttagtctcagcgactatgtcaggcgtgacgacatcgcttcgctttccaggacagctgaatgcagatctcaggaagcttgctgtgaatatggtcccattccctagattgcatttttttatgcctgggtttgcccctctgaccgcgcgaggatcacaacaatatagggctctgaccgttccagaactgacccagcagatgtttgacgccaaaaatatgatggcagcttgtgaccccaggcatggacggtacctgactgtggcaacagttttccgaggtcggatgagtatgaaggaggttgatgagcagatgctggctattcagtctaagaatagctcatatttcgtcgaatggattcccaacaatgtcaaggtggctgtatgcgatattcccccacgtggattgaaaatgagttccaccttcattggtaactctaccgcaatccaagagttgttcaagcgcatcagtgagcagttcacggccatgtttcggcgaaaggcattcctgcactggtatacaggagaaggcatggacgaaatggagttcaccgaggccgagagtaatatgaacgacctggtgagcgagtatcagcaataccaggacgcaactgctgaagaggagggtgaaatgtatgaggacgatgaggaagaatccgaagcacagggacccaagtag

SEQ ID NO: 161725 - DNA, 2394 bp, Artificial Sequence
  derived and/or modified sequence
atggccgtgcaggggtctcagcgtcggttgctcgggtctctgaacagcacgccgacagcaatccctcagctgggactcgctgcgaaccagactggggcacgttgccttgaggtttccattagcgacggccttttcctgagcctaggactcgtgtcacttgtggaaaatgctctggtggttgccactattgctaaaaataggaatcttcattccccgatgtactgtttcatctgttgtcttgctcttagtgacctccttgttagcggcagcaacgtcctggaaactgctgtcatcctgctgctggaggcaggggctctggtggctagggcagctgtgctgcagcagttagataatgtgattgacgtcattacgtgtagttccatgttgagcagcctatgtttcctcggtgccatcgcagtcgatagatacatttctattttctacgctcttcgctaccacagtatcgtcactttgccgagagccagacgtgcagtcgccgctatctgggtggcctctgtggtgtttagtactctttttatagcctattacgaccacgttgcagtgctgctgtgcctggtggtttttttcctggccatgttagtgttgatggccgtgctctatgtgcacatgctggcaagagcatgtcaacacgcccaggggatcgccaggctccacaagcggcagcgtccagttcatcagggctttggcctgaagggggcagtgaccttaactattctgctgggaatcttcttcctttgctggggaccattttttctgcatttaacactgattgtactgtgcccagagcaccccacatgtggctgcatctttaagaactttaatctctttttagcccttataatatgcaatgccatcatcgacccccttatctacgctttccattctcaagaactgcggagaaccctaaaggaggtcctgacctgttcatgttctcaggacagagctctggtcagttgggacgtcaagtccctggggggtagcgtgtgtcaggagttgctccctcagcaaccgcaggagaaaggactctgcgaccagaaagcctcatccacggctcttcagcgattgctgcagaaggagttttgggaagtgatctcggatgagcacggcatcgacccctctgggaattatgtgggggacagcgatcttcaactggaacgcatcagtgtgtactacaatgaggctagtagtcacaaatatgtccctcgagccatcctggttgatctcgagcctggaaccatggacagcgtgcgatccggagcattcggacacctcttccgacccgataattttatcttcggccagtctggagcaggaaataactgggccaagggtcattatacggaaggcgctgagctggtcgatagtgtcctagacgtcgtgaggaaggagtgtgaaaattgtgattgcttacaaggattccagttaacccacagcctgggagggggtacaggttcaggcatgggcacattgttaatctctaaagttcgcgaggagtaccctgaccgcattatgaacaccttttcagttgtgccgagtccaaaggtatccgacacagttgttgaaccatataacgccaccttatctattcaccagctagtcgaaaacactgatgagacatactgcattgataacgaggccctctatgatatatgtttcagaactttgaaactggcgacgccaacgtacggcgatctgaatcacctcgtcagcgcaactatgtctggcgtaacgaccagcttgcgattcccgggacagctgaacgcggatctgcgtaagctggccgtcaacatggtgccattccctagacttcactttttcatgcctggctttgccccactgactgccagaggaagccaacagtaccgcgcactgactgtgcccgaattgacacagcagatgttcgatgccaaaaatatgatggccgcatgcgaccctagacatggcagatacctcacagttgccacagtattccggggtcgtatgtccatgaaggaggtagacgaacagatgttggctattcagtctaagaatagtagctacttcgtggagtggatccccaataacgtgaaggttgctgtgtgcgacatcccacctaggggactgaagatgtctagcacctttatcggtaacagcacagcgatccaggagcttttcaaacgcatctccgagcagtttaccgctatgttcaggcgcaaggctttcctccattggtatactggagaaggaatggatgagatggaattcaccgaagctgagagtaacatgaacgacttagtttcagaataccagcaataccaggatgcaacagccgaagaagaaggcgagatgtatgaggatgacgaagaggagtccgaagctcagggacccaaatag

SEQ ID NO: 161726 - DNA, 1711 bp, Artificial Sequence
  derived and/or modified sequence
cgaccctcagcagccagcccggcccgcccgcgcccgtccgcagccgcccgccagacgcgcccagtatgagggagatcgtgcacatccaggccggccagtgcggcaaccagatcggggccaagttctgggaagtcatcagtgatgagcatggcatcgaccccagcggcaactacgtgggcgactcggacttgcagctggagcggatcagcgtctactacaacgaggcctcttctcacaagtacgtgcctcgagccattctggtggacctggaacccggaaccatggacagtgtccgctcaggggcctttggacatctcttcaggcctgacaatttcatctttggtcagagtggggccggcaacaactgggccaagggtcactacacggagggggcggagctggtggattcggtcctggatgtggtgcggaaggagtgtgaaaactgcgactgcctgcagggcttccagctgacccactcgctggggggcggcacgggctccggcatgggcacgttgctcatcagcaaggtgcgtgaggagtatcccgaccgcatcatgaacaccttcagcgtcgtgccctcacccaaggtgtcagacacggtggtggagccctacaacgccacgctgtccatccaccagctggtggagaacacggatgagacctactgcatcgacaacgaggcgctctacgacatctgcttccgcaccctcaagctggccacgcccacctacggggacctcaaccacctggtatcggccaccatgagcggagtcaccacctccttgcgcttcccgggccagctcaacgctgacctgcgcaagctggccgtcaacatggtgcccttcccgcgcctgcacttcttcatgcccggcttcgcccccctcacagcccggggcagccagcagtaccgggccctgaccgtgcccgagctcacccagcagatgttcgatgccaagaacatgatggccgcctgcgacccgcgccacggccgctacctgacggtggccaccgtgttccggggccgcatgtccatgaaggaggtggacgagcagatgctggccatccagagcaagaacagcagctacttcgtggagtggatccccaacaacgtgaaggtggccgtgtgtgacatcccgccccgcggcctcaagatgtcctccaccttcatcgggaacagcacggccatccaggagctgttcaagcgcatctccgagcagttcacggccatgttccggcgcaaggccttcctgcactggtacacgggcgagggcatggacgagatggagttcaccgaggccgagagcaacatgaacgacctggtgtccgagtaccagcagtaccaggacgccacggccgaggaagagggcgagatgtacgaagacgacgaggaggagtcggaggcccagggccccaagtgaagctgctcgcagctggagtgagaggcaggtggcggccggggccgaagccagcagtgtctaaacccccggagccatcttgctgccgacaccctgctttcccctcgccctagggctcccttgccgccctcctgcagtatttatggcctcgtcctccccacctaggccacgtgtgagctgctcctgtctctgtcttattgcagctccaggcctgacgttttacggttttgttttttactggtttgtgtttatattttcggggatacttaataaatctattgctgtcagataccctt

SEQ ID NO: 161727 - DNA, 2776 bp, Artificial Sequence
  derived and/or modified sequence
ggcagcaccatgaactaagcaggacacctggaggggaagaactgtggggacctggaggcctccaacgactccttcctgcttcctggacaggactatggctgtgcagggatcccagagaagacttctgggctccctcaactccacccccacagccatcccccagctggggctggctgccaaccagacaggagcccggtgcctggaggtgtccatctctgacgggctcttcctcagcctggggctggtgagcttggtggagaacgcgctggtggtggccaccatcgccaagaaccggaacctgcactcacccatgtactgcttcatctgctgcctggccttgtcggacctgctggtgagcgggagcaacgtgctggagacggccgtcatcctcctgctggaggccggtgcactggtggcccgggctgcggtgctgcagcagctggacaatgtcattgacgtgatcacctgcagctccatgctgtccagcctctgcttcctgggcgccatcgccgtggaccgctacatctccatcttctacgcactgcgctaccacagcatcgtgaccctgccgcgggcgcggcgagccgttgcggccatctgggtggccagtgtcgtcttcagcacgctcttcatcgcctactacgaccacgtggccgtcctgctgtgcctcgtggtcttcttcctggctatgctggtgctcatggccgtgctgtacgtccacatgctggcccgggcctgccagcacgcccagggcatcgcccggctccacaagaggcagcgcccggtccaccagggctttggccttaaaggcgctgtcaccctcaccatcctgctgggcattttcttcctctgctggggccccttcttcctgcatctcacactcatcgtcctctgccccgagcaccccacgtgcggctgcatcttcaagaacttcaacctctttctcgccctcatcatctgcaatgccatcatcgaccccctcatctacgccttccacagccaggagctccgcaggacgctcaaggaggtgctgacatgctcctgctctcaggaccgtgccctcgtcagctgggatgtgaagtctctgggtggaagtgtgtgccaagagctactcccacagcagccccaggagaaggggctttgtgaccagaaagcttcatccacagccttgcagcggctcctgcaaaaggagttctgggaagtcatcagtgatgagcatggcatcgaccccagcggcaactacgtgggcgactcggacttgcagctggagcggatcagcgtctactacaacgaggcctcttctcacaagtacgtgcctcgagccattctggtggacctggaacccggaaccatggacagtgtccgctcaggggcctttggacatctcttcaggcctgacaatttcatctttggtcagagtggggccggcaacaactgggccaagggtcactacacggagggggcggagctggtggattcggtcctggatgtggtgcggaaggagtgtgaaaactgcgactgcctgcagggcttccagctgacccactcgctggggggcggcacgggctccggcatgggcacgttgctcatcagcaaggtgcgtgaggagtatcccgaccgcatcatgaacaccttcagcgtcgtgccctcacccaaggtgtcagacacggtggtggagccctacaacgccacgctgtccatccaccagctggtggagaacacggatgagacctactgcatcgacaacgaggcgctctacgacatctgcttccgcaccctcaagctggccacgcccacctacggggacctcaaccacctggtatcggccaccatgagcggagtcaccacctccttgcgcttcccgggccagctcaacgctgacctgcgcaagctggccgtcaacatggtgcccttcccgcgcctgcacttcttcatgcccggcttcgcccccctcacagcccggggcagccagcagtaccgggccctgaccgtgcccgagctcacccagcagatgttcgatgccaagaacatgatggccgcctgcgacccgcgccacggccgctacctgacggtggccaccgtgttccggggccgcatgtccatgaaggaggtggacgagcagatgctggccatccagagcaagaacagcagctacttcgtggagtggatccccaacaacgtgaaggtggccgtgtgtgacatcccgccccgcggcctcaagatgtcctccaccttcatcgggaacagcacggccatccaggagctgttcaagcgcatctccgagcagttcacggccatgttccggcgcaaggccttcctgcactggtacacgggcgagggcatggacgagatggagttcaccgaggccgagagcaacatgaacgacctggtgtccgagtaccagcagtaccaggacgccacggccgaggaagagggcgagatgtacgaagacgacgaggaggagtcggaggcccagggccccaagtgaagctgctcgcagctggagtgagaggcaggtggcggccggggccgaagccagcagtgtctaaacccccggagccatcttgctgccgacaccctgctttcccctcgccctagggctcccttgccgccctcctgcagtatttatggcctcgtcctccccacctaggccacgtgtgagctgctcctgtctctgtcttattgcagctccaggcctgacgttttacggttttgttttttactggtttgtgtttatattttcggggatacttaataaatctattgctgtcagata

SEQ ID NO: 161728 - DNA, 3715 bp, Artificial Sequence
  derived and/or modified sequence
attctatgagacagagtctcactctgtcgcccacgctggagtacagtggtgcaatcttggcttactgcaacctccgtctcctgggttcaagcaattcttctgcctcagcttccggagtagctggaacgtgtgagccaccacccctggctaatttttgtatttttagtagagacaggctggtctcgaactcctgacttccggtgatctgcccacctcagcctcccaaattgttggtattacaggcgtgagccaccgcacctggcctctatttatttatttattttgagatggggtcttgatatgaattcctagactcatgcttctcatgcttgctaccacccagtcctgcctcctgcacagcagtttccactaaagtcacccctttacgagaggcatcttttttttttttttgagatggtgtctcactctgtcgcccaggctggagtgcaatggcatgatctcagctcactgcaagctccacctcctgggttcaagtgattctcctgcttcagcctcccgagtagctgggactacaggcacccgccaccattcccggctaattttttgtatctttagtagagacggggtttcaccatgttagccaggatggtctcgatctcctgacttcgtgatccacccgcctcggcctcccaaagtgttgggattacaggcatgagccactgtacctggcctactagaggcatcttaaaacacatctcctgtgtctccattccaaagcgcatctttgtctacactcctggggtcctcccacgtcagcctcccaaagtgctgggattacagtcatgagccactgtgcccggccccaccaaattgttttctaacctgcttttttcttgaggaatcttctgcagcacatgactcacatgtagagccccttgtttcttgaggccttcatacccgtcagctcatctaaaagtcactcctgaggagtaagggcaaggggcattgggagaggtcaggcagccctgggaagcctcccagcgtgtgtcccaggaggcctgctgcctgcagacactgctcccagacgcagcggcctcggccatcagagcgtgtcccacgatgaggtggcaacttccctgaagggcttgctctcacccaggggtgtggttctccgtgtgcacacagatagatagttctacgtttgccatataccatttatatgcctcacacagattaacccactttcatttcaaaaagacctcctgtcatcgtgcccattgtacagatgaggacactgagacacggaatcctagtgacctgtgcaaggtcacacagctgggaagggtgagggaagcgtctgtgaacccagcaggcccagcccctgagtctaggctccgctcggcagctgtcatgggagcagagtccgagaagcactgcaggcacctgctctagggggagagaggtggaggtggcaggtagagagaggacgacccctgggagctgagacgatgccagcctcacacggacaggctgggtgacctcaggcaagtcgcttcccatttgggaccccaaggacccttctgcagacccagctgggggtccccgatgagactggctctcagagtccctgtgagtcccgtcagctgaggccagtaatgtcctggcaccatcactggacatggtttgctctcccatggaggggcaggtgtagcagccaaaagcgatcctgagctctgggcctctgaaccctgctctgccagctactgtgggtgtctctacccgctctgtgtctcagttccctttcctgaaaagaggggatagtaaaaactaaccctcaaggtgtttattaccaatgcccttcatggaggaatccgctgctccaggcccttgccagcagctgcacagctgggcctggggacctgggtgtgggtctgttgaaccttggcccaccctggggctgtggtcggcctggacgtgtaggtgtggaggtgcatatttattatggcaattttctgacaggtaacagagtgtggggctctcttctgaatggggctcgtggaggccgtgggtcaaaagccctaattttgtagtgagggctaaaaggcttcacaagggaaagggcctggctggggctatgggccggtgccgaccccccctctcccactttgtttgcagttctgggaagtcatcagtgatgagcatggcatcgaccccagcggcaactacgtgggcgactcggacttgcagctggagcggatcagcgtctactacaacgaggcctcttctcacaagtacgtgcctcgagccattctggtggacctggaacccggaaccatggacagtgtccgctcaggggcctttggacatctcttcaggcctgacaatttcatctttggtcagagtggggccggcaacaactgggccaagggtcactacacggagggggcggagctggtggattcggtcctggatgtggtgcggaaggagtgtgaaaactgcgactgcctgcagggcttccagctgacccactcgctggggggcggcacgggctccggcatgggcacgttgctcatcagcaaggtgcgtgaggagtatcccgaccgcatcatgaacaccttcagcgtcgtgccctcacccaaggtgtcagacacggtggtggagccctacaacgccacgctgtccatccaccagctggtggagaacacggatgagacctactgcatcgacaacgaggcgctctacgacatctgcttccgcaccctcaagctggccacgcccacctacggggacctcaaccacctggtatcggccaccatgagcggagtcaccacctccttgcgcttcccgggccagctcaacgctgacctgcgcaagctggccgtcaacatggtgcccttcccgcgcctgcacttcttcatgcccggcttcgcccccctcacagcccggggcagccagcagtaccgggccctgaccgtgcccgagctcacccagcagatgttcgatgccaagaacatgatggccgcctgcgacccgcgccacggccgctacctgacggtggccaccgtgttccggggccgcatgtccatgaaggaggtggacgagcagatgctggccatccagagcaagaacagcagctacttcgtggagtggatccccaacaacgtgaaggtggccgtgtgtgacatcccgccccgcggcctcaagatgtcctccaccttcatcgggaacagcacggccatccaggagctgttcaagcgcatctccgagcagttcacggccatgttccggcgcaaggccttcctgcactggtacacgggcgagggcatggacgagatggagttcaccgaggccgagagcaacatgaacgacctggtgtccgagtaccagcagtaccaggacgccacggccgaggaagagggcgagatgtacgaagacgacgaggaggagtcggaggcccagggccccaagtgaagctgctcgcagctggagtgagaggcaggtggcggccggggccgaagccagcagtgtctaaacccccggagccatcttgctgccgacaccctgctttcccctcgccctagggctcccttgccgccctcctgcagtatttatggcctcgtcctccccacctaggccacgtgtgagctgctcctgtctctgtcttattgcagctccaggcctgacgttttacggttttgttttttactggtttgtgtttatattttcggggatacttaataaatctattgctgtc

SEQ ID NO: 161729 - DNA, 1353 bp, Artificial Sequence
  derived and/or modified sequence
atgagggaaattgtgcacatccaggcaggtcagtgtggaaaccaaataggtgccaaattctgggaggtgatttccgacgaacacggcatcgacccttctggaaattatgtgggggactccgatttacagctggaaagaatttctgtgtattacaacgaagcatcttctcataagtatgtgccccgcgcaatcctggtggatctggaaccaggaactatggactccgttagatcaggagccttcggtcacctgttcagacccgacaactttatcttcgggcaaagtggcgccgggaataactgggctaagggccattacacagaaggtgccgaactagtggattcggtgttggacgtggtccggaaggagtgcgaaaattgcgactgtctgcaaggctttcagctgactcacagcctaggaggaggtacggggtctgggatgggcacactgctcatcagcaaagtgagagaggaatatccagatcggatcatgaatacatttagcgttgttccgagtcccaaggtgtcagacactgtggtggagccttacaacgcaaccctgtcaattcaccagctagtcgaaaacacagatgagacctattgtatagacaacgaagcactgtatgatatttgcttcaggaccctaaagcttgccactccgacatacggcgacctgaaccacctggttagtgctactatgtcgggcgtcactacatcgcttaggtttcctggccagttaaatgccgatctacgtaaactggcagtgaatatggttccctttccgcggttgcacttctttatgccagggtttgccccactaaccgctaggggcagtcagcagtacagagccctgactgttccagaactcacccagcaaatgttcgatgcaaagaacatgatggcagcatgtgatccccggcatggccgttacttgacagttgcaaccgtcttcaggggtaggatgagcatgaaggaggtggatgaacagatgctggctattcagtcaaagaactccagctatttcgtggagtggatccccaataatgtcaaagtggccgtgtgtgatattccacctcgtggccttaaaatgtcctctaccttcattggaaattctacggctatccaggaattattcaagcgaatcagcgaacagttcacagctatgtttcggaggaaagcgtttctgcattggtataccggagaggggatggacgagatggaattcaccgaggctgaatcaaatatgaacgatctagtcagcgaataccaacagtatcaggatgcaaccgccgaagaggaaggagaaatgtatgaggacgacgaagaggaatcggaggcccagggtccaaaatag

SEQ ID NO: 161730 - DNA, 1353 bp, Artificial Sequence
  derived and/or modified sequence
atgcgggagatcgtgcacatccaggccggccagtgcggcaaccagatcggcgctaagttctgggaggttattagcgatgaacacggcattgatccctccggtaactacgtcggggactccgatttgcaactggaaaggatctcagtgtattacaacgaggcctcttcgcacaagtacgtaccccgagccattctcgttgacctcgaaccaggaactatggacagtgttcgctccggggcgttcggacacctgtttaggccagacaacttcattttcggacaatccggggccggaaataattgggccaaggggcactataccgagggcgcagaactggtggactcagtgctcgacgtggttcgcaaggagtgcgagaactgcgattgtctgcaggggttccagttaacccactctctgggagggggaactggttccggcatgggaaccctgctcatctcgaaggtgcgtgaggaataccctgacagaattatgaacaccttctccgtggtcccctctccgaaggtgtccgataccgtcgtggagccatacaatgcgacgttgtcgatccaccagctggtggaaaatacagatgaaacctattgtatcgacaatgaggccttgtatgatatctgttttcgaacccttaagctagcaacaccaacatacggcgatctaaaccatctggtgtcggcaacaatgtcaggggtcacaaccagcctgaggttccccggccagttaaatgctgatctcaggaagttagctgtgaatatggtgccttttccacggctgcatttcttcatgcctggcttcgcaccactcacggccaggggctctcagcagtaccgggccctgacggtacccgagctaacacaacagatgtttgatgccaaaaatatgatggctgcatgcgacccaaggcacggaagatacctaacagtcgcgactgtcttccgcggacgtatgtccatgaaggaggtggacgaacagatgcttgcgatccagtccaagaacagctcttactttgtggagtggatcccgaacaacgtcaaggtggccgtctgcgatatcccacccagaggattgaaaatgtcctcaacatttatcggcaactctaccgccattcaagagctgttcaagcgaatttctgagcaatttaccgctatgtttagaaggaaggccttcctgcactggtacactggcgaaggtatggatgaaatggagtttacagaggcagagtccaatatgaatgacttggtgtcggagtatcagcagtatcaggatgccacagcagaagaggaaggagagatgtacgaagatgacgaagaagagagcgaggcacaaggaccaaagtag

SEQ ID NO: 161731 - DNA, 1353 bp, Artificial Sequence
  derived and/or modified sequence
atgagagaaattgtgcacattcaggccggtcagtgcgggaatcagattggagccaagttttgggaggttatatcagacgagcacggaattgatccatctggtaattacgtaggcgattccgatctgcaactggaacggatcagtgtctactacaatgaggcctcgagccacaaatacgtgccccgtgccattttggtcgacctggagccgggtaccatggactcagtgaggtcgggcgcatttggccaccttttccggcctgataatttcatcttcggacaaagcggcgctgggaataactgggctaaagggcattataccgagggtgcggagttggtggattccgtcctcgatgtggtgaggaaagagtgcgaaaactgtgactgtctgcagggcttccaactcactcactctttaggcggtgggaccggcagcgggatgggcaccctgctaatttcaaaggtccgcgaggagtaccccgaccgaattatgaataccttctcagtcgtaccaagccctaaagtaagtgacacggtggtcgagccatacaacgctacactgtccattcaccagctggtcgagaacaccgatgaaacctactgcattgacaacgaagcactgtacgacatctgcttcagaacgctaaaacttgctacccctacatatggggatcttaaccaccttgtcagcgccaccatgtcgggcgtgacaacgtcgttgaggtttccagggcagcttaatgctgacctcaggaagcttgctgtcaacatggtcccgtttcctagactacactttttcatgcctggctttgctcctctaactgccagggggagccagcaatatagagctctcactgtacctgaattgacccagcagatgtttgatgccaaaaacatgatggccgcatgcgaccccagacacggacgctatctgactgtagccacagtgtttaggggcagaatgagcatgaaggaggttgacgagcaaatgctcgccatccaatctaagaatagcagctattttgttgagtggattcccaataacgtcaaggtcgcagtttgcgacatcccacccagaggtctgaagatgagcagcactttcattggaaacagtactgccatacaggagctgtttaaacgtatctctgagcagtttacagccatgttccgcaggaaggcctttttacattggtataccggggagggcatggacgagatggagttcacggaggcagagagcaatatgaatgatttagtgtcagagtatcagcagtaccaggatgccaccgctgaagaggaaggggagatgtacgaggacgacgaggaagagtcagaggcccaaggtccaaagtag

SEQ ID NO: 161732 - DNA, 1769 bp, Artificial Sequence
  derived and/or modified sequence
gacatcagccgatgcgaagggcggggccgcggctataagagcgcgcggccgcggtccccgaccctcagcagccagcccggcccgcccgcgcccgtccgcagccgcccgccagacgcgcccagtatgagggagatcgtgcacatccaggccggccagtgcggcaaccagatcggggccaagttctgggaagtcatcagtgatgagcatggcatcgaccccagcggcaactacgtgggcgactcggacttgcagctggagcggatcagcgtctactacaacgaggcctcttctcacaagtacgtgcctcgagccattctggtggacctggaacccggaaccatggacagtgtccgctcaggggcctttggacatctcttcaggcctgacaatttcatctttggtcagagtggggccggcaacaactgggccaagggtcactacacggagggggcggagctggtggattcggtcctggatgtggtgcggaaggagtgtgaaaactgcgactgcctgcagggcttccagctgacccactcgctggggggcggcacgggctccggcatgggcacgttgctcatcagcaaggtgcgtgaggagtatcccgaccgcatcatgaacaccttcagcgtcgtgccctcacccaaggtgtcagacacggtggtggagccctacaacgccacgctgtccatccaccagctggtggagaacacggatgagacctactgcatcgacaacgaggcgctctacgacatctgcttccgcaccctcaagctggccacgcccacctacggggacctcaaccacctggtatcggccaccatgagcggagtcaccacctccttgcgcttcccgggccagctcaacgctgacctgcgcaagctggccgtcaacatggtgcccttcccgcgcctgcacttcttcatgcccggcttcgcccccctcacagcccggggcagccagcagtaccgggccctgaccgtgcccgagctcacccagcagatgttcgatgccaagaacatgatggccgcctgcgacccgcgccacggccgctacctgacggtggccaccgtgttccggggccgcatgtccatgaaggaggtggacgagcagatgctggccatccagagcaagaacagcagctacttcgtggagtggatccccaacaacgtgaaggtggccgtgtgtgacatcccgccccgcggcctcaagatgtcctccaccttcatcgggaacagcacggccatccaggagctgttcaagcgcatctccgagcagttcacggccatgttccggcgcaaggccttcctgcactggtacacgggcgagggcatggacgagatggagttcaccgaggccgagagcaacatgaacgacctggtgtccgagtaccagcagtaccaggacgccacggccgaggaagagggcgagatgtacgaagacgacgaggaggagtcggaggcccagggccccaagtgaagctgctcgcagctggagtgagaggcaggtggcggccggggccgaagccagcagtgtctaaacccccggagccatcttgctgccgacaccctgctttcccctcgccctagggctcccttgccgccctcctgcagtatttatggcctcgtcctccccacctaggccacgtgtgagctgctcctgtctctgtcttattgcagctccaggcctgacgttttacggttttgttttttactggtttgtgtttatattttcggggatacttaataaatctattgctgtcagataccctt

SEQ ID NO: 161733 - DNA, 1978 bp, Artificial Sequence
  derived and/or modified sequence
agaactgggagctgcttcctggcagggcccgcctctgctgggagaccggacggtgagtcagccttaagcccggcaccagacccctctgaggatggagcaggagctggctgccctgaggctgcaaaacttcttccctcgtggagacagggaggcacctcagacactcaccccggactcccttgaacagggacagggaggaaccccaggcagctagaccccagcagcagccacacgagcacactgtggggcagggaggggcatctcttgagaacaaaagatccatttctcgactttccaaactggagagcttcttgagagaaaagagagagacaggtacaggtccacgccacccacacacagccctgtgcacacagaccggacacaggcgtccacagttctgggaagtcatcagtgatgagcatggcatcgaccccagcggcaactacgtgggcgactcggacttgcagctggagcggatcagcgtctactacaacgaggcctcttctcacaagtacgtgcctcgagccattctggtggacctggaacccggaaccatggacagtgtccgctcaggggcctttggacatctcttcaggcctgacaatttcatctttggtcagagtggggccggcaacaactgggccaagggtcactacacggagggggcggagctggtggattcggtcctggatgtggtgcggaaggagtgtgaaaactgcgactgcctgcagggcttccagctgacccactcgctggggggcggcacgggctccggcatgggcacgttgctcatcagcaaggtgcgtgaggagtatcccgaccgcatcatgaacaccttcagcgtcgtgccctcacccaaggtgtcagacacggtggtggagccctacaacgccacgctgtccatccaccagctggtggagaacacggatgagacctactgcatcgacaacgaggcgctctacgacatctgcttccgcaccctcaagctggccacgcccacctacggggacctcaaccacctggtatcggccaccatgagcggagtcaccacctccttgcgcttcccgggccagctcaacgctgacctgcgcaagctggccgtcaacatggtgcccttcccgcgcctgcacttcttcatgcccggcttcgcccccctcacagcccggggcagccagcagtaccgggccctgaccgtgcccgagctcacccagcagatgttcgatgccaagaacatgatggccgcctgcgacccgcgccacggccgctacctgacggtggccaccgtgttccggggccgcatgtccatgaaggaggtggacgagcagatgctggccatccagagcaagaacagcagctacttcgtggagtggatccccaacaacgtgaaggtggccgtgtgtgacatcccgccccgcggcctcaagatgtcctccaccttcatcgggaacagcacggccatccaggagctgttcaagcgcatctccgagcagttcacggccatgttccggcgcaaggccttcctgcactggtacacgggcgagggcatggacgagatggagttcaccgaggccgagagcaacatgaacgacctggtgtccgagtaccagcagtaccaggacgccacggccgaggaagagggcgagatgtacgaagacgacgaggaggagtcggaggcccagggccccaagtgaagctgctcgcagctggagtgagaggcaggtggcggccggggccgaagccagcagtgtctaaacccccggagccatcttgctgccgacaccctgctttcccctcgccctagggctcccttgccgccctcctgcagtatttatggcctcgtcctccccacctaggccacgtgtgagctgctcctgtctctgtcttattgcagctccaggcctgacgttttacggttttgttttttactggtttgtgtttatattttcggggatacttaataaatctattgctgtcagat

SEQ ID NO: 161734 - DNA, 1335 bp, Artificial Sequence
  derived and/or modified sequence
atgcgagagattgtgcacctccaggccggccaatgtggcaaccagattggggctaaattctgggaggttatatccgacgaacacggcatcgatccaacaggcacgtaccacggcgatagtgaccttcagctggaaagaattaatgtttattataacgaggctaccggcgggaactatgtgccccgggccgtccttgtcgacctggagcctggcacaatggactccgtgcgctccggcccatttggacagatatttcgtccagacaacttcgtcttcgggcagtctggcgctggcaacaattgggctaagggccattataccgagggcgctgagctggtagacgccgttttggatgtggtgagaaaagaggcagaatcctgtgactgcctgcaaggatttcagcttacacattcactgggcggaggcacgggctccggcatgggtaccttgctgatttccaagatccgcgaggaattccctgatagaattatgaatactttctcagtggtgccatctcccaaagtgtccgatactgtggttgagccctataacgccactcttagcgtgcaccaactggttgaaaatacagatgagacctattgtatagataacgaggctctatatgatatttgttttaggacgctaaaactgacaacccccacctatggggatctgaatcacctcgtcagcgcaacaatgtctggagtcaccacatgtctccggttccccggccagctgaacgccgatctgaggaaactagctgttaacatggtgccattccccagacttcactttttcatgccaggattcgcccctttgactagtcgaggttcccagcagtacagagctcttacagtgcctgagctgacccagcaaatgttcgacgcaaagaacatgatggccgcatgtgatccccggcatggcaggtatttgaccgtggccgcggtctttagggggcgcatgtctatgaaagaggtcgacgagcagatgttgtcagtccagtccaagaatagcagctacttcgtcgagtggattcctaataacgtcaagactgcagtctgcgatatcccaccgcgtggcctcaagatggccgccactttcatcggcaatagcacggctatacaggaacttttcaagagaatcagcgagcagttcacagccatgtttaggagaaaagctttcctgcattggtataccggagagggaatggacgagatggagtttacagaggcagagagcaacatgaatgatttagtctccgaataccagcagtatcaggatgccactgccgaagagggtgaattcgaggaagaagcggaggaggaagtggcttag

SEQ ID NO: 161735 - DNA, 1335 bp, Artificial Sequence
  derived and/or modified sequence
atgcgtgaaatagtgcacctccaggcaggacaatgcggaaatcagattggcgccaaattttgggaagttatttcagacgaacacgggatcgaccccactggaacttaccacggggactcagacctccagctggaaaggattaatgtttattataacgaggccacaggcggtaattacgtcccacgcgccgtcctggtggacctggaaccaggcaccatggattcggtacggtcaggcccctttggtcagatctttaggccagataacttcgtgttcgggcagagcggagctggtaataattgggctaagggccactataccgagggcgccgaactggtcgacgcagttcttgatgtagtgcgaaaagaggctgagtcatgtgattgcttgcaggggttccaactgacacattccctggggggcggaacagggagcggaatgggcaccctgttgatttcaaagatccgagaagagtttccggataggattatgaataccttttctgtggtgcccagcccgaaagtctccgacaccgtcgtcgagccatataacgctacactgagcgtccatcagctggttgaaaacaccgacgaaacctactgcatcgataacgaggccctgtatgatatatgctttaggaccctcaagctgacaacccccacatatggggacctcaaccacttggtcagtgctaccatgagcggcgtgacaacttgtttgcgctttccaggacagttaaatgccgatcttaggaagttggcagtgaatatggttccattcccacggctacatttctttatgcctggattcgctcctttgaccagccggggatcacaacagtatcgcgctctgacagtcccagagctcacacagcagatgtttgacgccaaaaacatgatggcagcctgcgaccctcggcatggtaggtacctgacagtggcagcggtgtttcgcggaaggatgtctatgaaagaagtggatgagcagatgctctcagttcaatcaaaaaactcatcctatttcgtggagtggattccgaacaacgtcaagaccgcagtttgcgacatcccaccaagagggctgaagatggccgctacctttatcggcaatagcaccgcaatacaggaattattcaagcggatttccgagcaattcacggctatgttcagacggaaggcctttctgcactggtacaccggcgaaggaatggatgaaatggagttcaccgaagcagagtccaacatgaatgaccttgtgagtgaatatcagcagtaccaggacgccacagcagaagagggcgaattcgaagaggaggcggaggaggaggtcgcatag

SEQ ID NO: 161736 - DNA, 1335 bp, Artificial Sequence
  derived and/or modified sequence
atgagggagatcgtgcacctgcaggccggccagtgtggcaaccagatcggggccaagttctgggaggtgatcagtgatgagcacggcatcgaccccaccggcacctaccatggagacagcgacctgcagctggagcgcatcaacgtgtactacaatgaggccactggaggcaactacgtgcccagggctgtgctggtggacctggagcccggcaccatggattctgtgcgcagcggccccttcggccagatcttccggccagacaactttgtgtttggccagagcggggccggcaacaactgggccaagggccactacacagaaggagctgagctggtggatgctgtgctggatgtggtgaggaaggaggccgagagctgtgactgcctgcagggcttccagctgacccacagcctgggcggcggcactggaagtggcatgggcaccctgctgatcagcaagatccgggaggagttcccagaccgcatcatgaacaccttctctgtggtgcccagccccaaggtgtctgacacagtggtggagccctacaatgccaccctgtctgtgcaccagctggtggagaacacagatgagacctactgcatcgacaatgaggccctgtatgacatctgcttccgcaccctgaagctgaccacccccacctacggggacctgaaccacctggtgtctgccaccatgtctggagtgaccacctgcctgcgcttccctggccagctgaatgctgacctgaggaagctggccgtgaacatggtgcccttcccccggctgcacttcttcatgcctggctttgcccccctgaccagccggggcagccagcagtaccgggccctgactgtgcctgagctgacccagcagatgtttgatgccaagaacatgatggccgcctgtgaccccaggcatggccgctacctgactgtggccgctgtgttccggggccgcatgtccatgaaggaggtggatgagcagatgctgtctgtgcagagcaagaacagcagctactttgtggagtggatccccaacaacgtgaagacagctgtgtgtgacatccccccccggggcctgaagatggccgccaccttcatcggcaacagcacagccatccaggagctgttcaagaggatcagcgagcagttcaccgccatgttccggaggaaggccttcctgcactggtacacaggagagggcatggatgagatggagttcacagaagctgagagcaacatgaatgacctggtgtctgagtaccagcagtaccaggatgccacagctgaggagggggagtttgaggaggaggccgaggaggaggtggcctag

SEQ ID NO: 161737 - DNA, 1335 bp, Artificial Sequence
  derived and/or modified sequence
atgcgggagatcgtgcacctgcaggccggccagtgcggcaaccagattggggcgaagttctgggaggtgatatctgacgagcatggtatcgacccaaccgggacttatcacggagacagcgacctgcagctcgagcgcatcaatgtctactataacgaggccaccggtgggaattatgttccccgggccgtcctggtggacctggagccaggcactatggactcagtgaggtctggccctttcggacagatatttcgcccagacaatttcgttttcgggcagtccggcgccgggaacaattgggccaaaggccactacacagagggtgctgaactggtcgatgctgtgctggacgtcgtgcggaaggaggccgaatcttgtgactgtctacagggattccagctaacccactccctgggtggggggacaggtagcggcatgggtaccctactgattagcaagataagagaggaatttcccgaccgaatcatgaatacatttagtgtggtgccctctccaaaggtgtccgacaccgtggtggagccctacaacgcaactttatccgttcaccaactagtcgaaaatacagacgaaacctactgcatagataatgaagctttgtatgacatctgtttcaggacgctgaagcttaccactcccacatacggcgatttaaaccaccttgtgagtgccaccatgtccggggtcacaacctgtctgagattccccgggcagcttaacgccgaccttaggaaactcgccgtgaacatggttccctttcctcgtctgcacttctttatgccagggtttgcacccctcacctccagggggtcccaacagtacagagcccttactgtccccgagctgactcaacaaatgttcgacgcgaagaatatgatggctgcctgcgaccccaggcacgggaggtatcttaccgtagctgctgtgttccgcggccgcatgtcaatgaaggaggtcgatgagcaaatgttgagcgtgcaatctaagaactcaagctatttcgtagagtggattccaaacaacgtcaagaccgctgtgtgcgacattccgccaagaggtttaaagatggctgctaccttcatcggcaattctactgcaattcaggaactgttcaaacgaatctccgagcagttcactgccatgttccgcagaaaggccttcctccactggtacacgggagagggcatggatgagatggagttcactgaggctgaatctaacatgaacgatttggtgagcgagtatcagcagtatcaggacgctactgctgaagagggagagtttgaagaggaagccgaggaggaagtagcatag

SEQ ID NO: 161738 - DNA, 1335 bp, Artificial Sequence
  derived and/or modified sequence
atgcgggagatcgtgcacctgcaggccggccagtgcggcaaccagatcggtgccaagttttgggaggttattagcgacgagcacggaattgacccgacaggtacctaccacggagactcagatcttcaactggagcggatcaatgtttattataatgaggcaaccggtggaaattacgtaccgagagcagtactagtagatctggagccagggactatggacagtgtccggtctgggccttttggacagatcttccgccctgataactttgtattcggtcagtccggcgctggcaacaattgggccaaaggacactacaccgaaggagctgagttggtcgatgcggtcctcgacgtggtgcgcaaggaggccgagagttgtgactgcctgcagggatttcagttgacacacagcctcggcggtggaacagggagcgggatgggaaccctgcttataagtaagatcagggaagaattccctgatagaataatgaacactttctccgttgttccctctcccaaggtgtccgataccgtggtcgaaccatacaacgctactttgtctgtccaccagctggtggagaacacagatgaaacctattgtatagacaacgaagcactctacgacatctgtttccgtacattgaagcttaccaccccaacttatggcgacctgaatcatctggtcagcgcaacgatgagtggggtcactacatgcctgaggttccccgggcaactgaatgctgatctgagaaaactcgctgtgaacatggtgccattcccacgtttacactttttcatgccaggattcgcgcctctaaccagccgcggcagtcagcagtacagagcactgacagtgcccgaactaacccagcagatgtttgatgcgaagaacatgatggctgcttgcgaccctcgtcacggacgttatctgactgtcgctgccgtgtttagaggccggatgagtatgaaagaagttgatgaacagatgctttctgttcagtccaagaacagctcgtattttgtggagtggatcccaaacaacgttaaaactgcggtatgcgacattcctcctcggggcctcaagatggcagccaccttcatcggcaatagcaccgctatccaggaactgttcaagcgtatcagcgagcagttcaccgcgatgtttaggaggaaggcttttctgcattggtataccggcgagggtatggacgagatggagtttacagaggcggaatcaaatatgaatgacctggtaagcgagtaccagcaataccaggatgctactgctgaggaaggagagtttgaggaagaagccgaggaagaggtggcctag

SEQ ID NO: 161739 - DNA, 1335 bp, Artificial Sequence
  derived and/or modified sequence
atgagggaaatcgtccacctgcaggccggacagtgtgggaaccaaatcggcgctaagttttgggaggtcatcagcgacgaacacggaattgaccccacaggaacttaccatggagatagcgatttacagcttgaacgcataaatgtctactacaatgaagcgaccggcggaaactacgttccacgagccgtcctggtagacctcgaacctggcaccatggatagcgtgcgctctgggccatttggacagatattccgcccagacaactttgtcttcggccagagtggtgcaggcaacaattgggccaagggccactacaccgagggagcagagctcgtcgatgccgtgctggatgtggtacgcaaagaggctgaatcatgtgactgtttgcaggggtttcaacttacacactcactgggcggaggcaccggcagcggcatggggactctcctcatcagtaaaatccgagaggaattcccagacagaattatgaacacattttccgtggtgcccagccctaaggtctccgataccgttgtcgaaccttacaacgccacactctctgtgcaccagctcgttgagaacactgacgaaacatattgtatcgataacgaagcattgtacgatatctgctttcgcactcttaaactgacaaccccgacctatggcgatctcaatcacctggtcagcgccaccatgtccggcgttacaacctgtctgcgctttcccggtcagctgaatgctgacctcagaaaactcgctgtgaatatggtgcctttccctagacttcatttctttatgccaggctttgcacccttgacctcgcggggttcccagcagtaccgagccctgactgtgccggagctgacccaacagatgttcgatgccaagaacatgatggccgcttgtgaccctcgacatggcagatatctgaccgttgcagcagtcttccgcggacgtatgtctatgaaggaagtggacgaacagatgctttccgtgcagtctaagaactcaagttatttcgtagaatggattcccaataatgtgaaaacagccgtctgtgatatccctcccaggggattgaaaatggcagctacattcattggcaactccactgctatacaggagttgttcaagcgtatttctgaacagtttaccgcaatgttccgtcgcaaagcgttcctacactggtacacaggggaaggcatggatgaaatggagtttactgaggcggagtccaatatgaacgacctggtctcagaatatcaacagtaccaggacgcaacggccgaagaaggagaatttgaggaagaagctgaggaggaagtagcctag

SEQ ID NO: 161740 - DNA, 1335 bp, Artificial Sequence
  derived and/or modified sequence
atgagggaaattgttcacctccaggccggacagtgtggaaaccagattggagcaaaattttgggaggtaatatccgacgaacacggcatagatcccaccggcacctaccacggggattcggatttacagttagagcgcattaacgtatactataacgaggccacggggggtaactatgtgccgcgagctgtgctggtcgatttggaacccggaaccatggacagtgtccgctccggaccttttggacagatctttcgacctgacaattttgtgttcggacagagtggggcagggaataattgggcaaagggacactacacagagggcgctgaactcgtggatgccgtgctcgatgtggtcagaaaagaagccgaatcctgcgactgtcttcagggattccagctgactcacagcctgggaggtggcactgggtccggcatgggaactttgctaatcagtaagattcgcgaggagttcccagatcgaattatgaacaccttttccgtcgtccctagccccaaggtatcggacacagtggtggaaccttacaatgccaccctgagtgtgcatcagctggtagaaaataccgacgagacttattgtatcgacaacgaggctctgtacgacatctgttttcgtacactcaagttgactacccccacatatggggatctaaaccacctggtttcagccaccatgtccggggtgacaacatgtctcaggtttccaggtcaactcaacgctgacctgcgcaaactggctgtcaacatggtcccttttcccaggctgcacttctttatgcccggattcgcgcctttaacttccaggggaagtcagcagtacagggctcttacagtgcccgagctcacgcaacagatgtttgacgccaagaatatgatggccgcttgcgatcccaggcatggaagatatctgaccgtagctgccgtgtttaggggccgaatgtctatgaaggaggtcgacgagcagatgctctctgtacagagtaaaaactcatcttatttcgtcgagtggatcccgaacaatgtcaagacagccgtgtgcgacattccacccagaggtctaaagatggcagcgacattcattggtaatagtactgccatccaggagctgttcaagcgaatcagtgagcagtttacagccatgttcaggagaaaagcgttcctacactggtatactggcgaaggtatggacgaaatggaatttaccgaagcagagagcaatatgaacgatttagtgtcagaataccagcagtaccaggacgctacggctgaggaaggcgagttcgaagaggaagcggaggaggaggtggcctag

SEQ ID NO: 161741 - DNA, 2286 bp, Artificial Sequence
  derived and/or modified sequence
cgcagggaccgtgctccgccgtctccgccgcatcttccaccctcgccgccgccgcagctccccgcgctcgtgccaccgccgccgcgtccaccctcagcgccaccgccatgcgggagatcgtgcacctgcaggccggccagtgcggcaaccagatcggggccaagttttgggaggttatcagtgacgaacatggcatcgaccccacaggcacataccatggggacagtgacctgcaactggagaggatcaacgtgtactacaacgaggccacaggaggaaattatgtccccagagcggtgctggtggacctggaacccggcaccatggactctgtccgttctggccccttcggtcagatctttcggccggacaacttcgtgtttggccaatccggagccggcaacaactgggcaaaggggcactacacggagggcgcagagctggtggacgctgtcctggacgtagtccggaaggaggccgagagctgcgactgccttcagggcttccagctgacccactcgctggggggtggcacggggtccggaatgggcacgctgctcatcagtaagatccgcgaggagttcccagaccgcatcatgaacaccttcagcgtggtgccctcgcccaaagtgtcagacacggtggtggagccctacaacgccacgctgtctgtgcaccagctggtggagaatacggatgagacctactgcatcgacaacgaggcactctacgacatctgtttccgcaccctcaagctgaccacccccacctacggggacctcaaccacctggtgtcggccaccatgagcggggtcaccacctgcctgcgcttcccgggccagctgaacgccgacctgcgcaagctggccgtcaacatggttccctttcctcgcctgcacttcttcatgcccggcttcgcacccctgaccagccggggcagccagcagtaccgggccctgacggtgcccgagctcacccagcagatgttcgatgccaagaacatgatggcggcgtgcgacccgcgccacggccgctacctgaccgtggccgccgtgttccggggccgcatgtccatgaaggaggtggacgagcagatgctgagcgtgcagagcaagaacagcagctacttcgtggagtggatccccaacaacgtgaagacggccgtgtgcgacatcccgccccgcggcctgaagatggccgcgaccttcatcggcaacagcacggccatccaggagctgttcaagcgcatctccgagcagttcacggccatgttccggcgcaaggccttcttgcactggtacacgggcgagggcatggacgagatggagttcaccgaggccgagagcaacatgaatgacctggtatctgagtaccagcagtaccaggacgccacggccgaggagggcgagttcgaggaggaggcggaggaggaggtggcctaggctgctcccatcgcttcccacctgtcccctcgaggcttctgacctttgatccgctaggccccccatctctgaaccctagagccccgctttccctccaaggctgactccccgctgaccctaacaatacctttggagctcgctttacctctggctacttcatctccgaccctggctcccctttgagccctaatttatctttaacccccttgagctcttccaaccttgacattcccaggaggagccccgcttcaccccttctgactctggaaaccgcacctttaactttgcagaccttccttcacccctgacttctgcttcacctttgacctctgccccccatgaatcccattttacctctagacctataagttctggtttatgtttgacccctccctctgagctgcacttcaccgctgaccttgcctcacctttaaccccccacctgagccccagctcctacctctgaccccaacttctctttgatctctgaatcccctctgactccaacttctctttcaccctctatgagtcccattttacttctacacctgcaagtcctggtttatattggacccctccctccgagctgcagttcacctttgaccttgcctcacctttcaccccccaccccccacagcgtcagctcctacctctgaccccagcttctctctgattcccacaggccccatgcatcctccctgcctcactcccctcagcccctgccgaccttagcttatctgggagagaaacaaggcctggtgcctgtgaggaagagaggtcacccctaccctccctccccgcttccctgcctcaccctcaataaataaattaattgttgtcatgg

SEQ ID NO: 161742 - DNA, 2224 bp, Artificial Sequence
  derived and/or modified sequence
gccgcatcttccaccctcgccgccgccgcagctccccgcgctcgtgccaccgccgccgcgtccaccctcagcgccaccgccatgcgggagatcgtgcacctgcaggccggccagtgcggcaaccagatcggggccaagttttgggaggttatcagtgacgaacatggcatcgaccccacaggcacataccatggggacagtgacctgcaactggagaggatcaacgtgtactacaacgaggccacaggaggaaattatgtccccagagcggtgctggtggacctggaacccggcaccatggactctgtccgttctggccccttcggtcagatctttcggccggacaacttcgtgtttggccaatccggagccggcaacaactgggcaaaggggcactacacggagggcgcagagctggtggacgctgtcctggacgtagtccggaaggaggccgagagctgcgactgccttcagggcttccagctgacccactcgctggggggtggcacggggtccggaatgggcacgctgctcatcagtaagatccgcgaggagttcccagaccgcatcatgaacaccttcagcgtggtgccctcgcccaaagtgtcagacacggtggtggagccctacaacgccacgctgtctgtgcaccagctggtggagaatacggatgagacctactgcatcgacaacgaggcactctacgacatctgtttccgcaccctcaagctgaccacccccacctacggggacctcaaccacctggtgtcggccaccatgagcggggtcaccacctgcctgcgcttcccgggccagctgaacgccgacctgcgcaagctggccgtcaacatggttccctttcctcgcctgcacttcttcatgcccggcttcgcacccctgaccagccggggcagccagcagtaccgggccctgacggtgcccgagctcacccagcagatgttcgatgccaagaacatgatggcggcgtgcgacccgcgccacggccgctacctgaccgtggccgccgtgttccggggccgcatgtccatgaaggaggtggacgagcagatgctgagcgtgcagagcaagaacagcagctacttcgtggagtggatccccaacaacgtgaagacggccgtgtgcgacatcccgccccgcggcctgaagatggccgcgaccttcatcggcaacagcacggccatccaggagctgttcaagcgcatctccgagcagttcacggccatgttccggcgcaaggccttcttgcactggtacacgggcgagggcatggacgagatggagttcaccgaggccgagagcaacatgaatgacctggtatctgagtaccagcagtaccaggacgccacggccgaggagggcgagttcgaggaggaggcggaggaggaggtggcctaggctgctcccatcgcttcccacctgtcccctcgaggcttctgacctttgatccgctaggccccccatctctgaaccctagagccccgctttccctccaaggctgactccccgctgaccctaacaatacctttggagctcgctttacctctggctacttcatctccgaccctggctcccctttgagccctaatttatctttaacccccttgagctcttccaaccttgacattcccaggaggagccccgcttcaccccttctgactctggaaaccgcacctttaactttgcagaccttccttcacccctgacttctgcttcacctttgacctctgccccccatgaatcccattttacctctagacctataagttctggtttatgtttgacccctccctctgagctgcacttcaccgctgaccttgcctcacctttaaccccccacctgagccccagctcctacctctgactccaacttctctttcaccctctatgagtcccattttacttctacacctgcaagtcctggtttatattggacccctccctccgagctgcagttcacctttgaccttgcctcacctttcaccccccaccccccacagcgtcagctcctacctctgaccccagcttctctctgattcccacaggccccatgcatcctccctgcctcactcccctcagcccctgccgaccttagcttatctgggagagaaacaaggcctggtgcctgtgaggaagagaggtcacccctaccctccctccccgcttccctgcctcaccctcaataaataaattaattgttgtcatg

SEQ ID NO: 161743 - DNA, 1335 bp, Artificial Sequence
  derived and/or modified sequence
atgagagagatcgtgcacctgcaggccggccagtgcggcaaccagatcggcgccaagttctgggaggtgatcagcgacgagcacggcatcgaccccaccggcacctaccacggcgacagcgacctgcagctggagagaatcaacgtgtactacaacgaggccaccggcggcaactacgtgcccagagccgtgctggtggacctggagcccggcaccatggacagcgtgagaagcggccccttcggccagatcttcagacccgacaacttcgtgttcggccagagcggcgccggcaacaactgggccaagggccactacaccgagggcgccgagctggtggacgccgtgctggacgtggtgagaaaggaggccgagagctgcgactgcctgcagggcttccagctgacccacagcctgggcggcggcaccggcagcggcatgggcaccctgctgatcagcaagatcagagaggagttccccgacagaatcatgaacaccttcagcgtggtgcccagccccaaggtgagcgacaccgtggtggagccctacaacgccaccctgagcgtgcaccagctggtggagaacaccgacgagacctactgcatcgacaacgaggccctgtacgacatctgcttcagaaccctgaagctgaccacccccacctacggcgacctgaaccacctggtgagcgccaccatgagcggcgtgaccacctgcctgagattccccggccagctgaacgccgacctgagaaagctggccgtgaacatggtgcccttccccagactgcacttcttcatgcccggcttcgcccccctgaccagcagaggcagccagcagtacagagccctgaccgtgcccgagctgacccagcagatgttcgacgccaagaacatgatggccgcctgcgaccccagacacggcagatacctgaccgtggccgccgtgttcagaggcagaatgagcatgaaggaggtggacgagcagatgctgagcgtgcagagcaagaacagcagctacttcgtggagtggatccccaacaacgtgaagaccgccgtgtgcgacatcccccccagaggcctgaagatggccgccaccttcatcggcaacagcaccgccatccaggagctgttcaagagaatcagcgagcagttcaccgccatgttcagaagaaaggccttcctgcactggtacaccggcgagggcatggacgagatggagttcaccgaggccgagagcaacatgaacgacctggtgagcgagtaccagcagtaccaggacgccaccgccgaggagggcgagttcgaggaggaggccgaggaggaggtggcctag

SEQ ID NO: 161744 - protein, 445 aa, Artificial Sequence
  derived and/or modified sequence
MREIVHLQAGQCGNQIGAKFWEVISDEHGIDPTGTYHGDSDLQLERINVYYNEATGGKYVPRAVLVDLEPGTMDSVRSGPFGQIFRPDNFVFGQSGAGNNWAKGHYTEGAELVDSVLDVVRKEAESCDCLQGFQLTHSLGGGTGSGMGTLLISKIREEYPDRIMNTFSVVPSPKVSDTVVEPYNATLSVHQLVENTDETYCIDNEALYDICFRTLKLTTPTYGDLNHLVSATMSGVTTCLRFPGQLNADLRKLAVNMVPFPRLHFFMPGFAPLTSRGSQQYRALTVPELTQQMFDAKNMMAACDPRHGRYLTVAAVFRGRMSMKEVDEQMLNVQNKNSSYFVEWIPNNVKTAVCDIPPRGLKMSATFIGNSTAIQELFKRISEQFTAMFRRKAFLHWYTGEGMDEMEFTEAESNMNDLVSEYQQYQDATAEEEGEFEEEAEEEVA

SEQ ID NO: 161745 - DNA, 1338 bp, Artificial Sequence
  derived and/or modified sequence
atgagagagatcgtgcacctgcaggccggccagtgcggcaaccagatcggcgccaagttctgggaggtgatcagcgacgagcacggcatcgaccccaccggcacctaccacggcgacagcgacctgcagctggagagaatcaacgtgtactacaacgaggccaccggcggcaagtacgtgcccagagccgtgctggtggacctggagcccggcaccatggacagcgtgagaagcggccccttcggccagatcttcagacccgacaacttcgtgttcggccagagcggcgccggcaacaactgggccaagggccactacaccgagggcgccgagctggtggacagcgtgctggacgtggtgagaaaggaggccgagagctgcgactgcctgcagggcttccagctgacccacagcctgggcggcggcaccggcagcggcatgggcaccctgctgatcagcaagatcagagaggagtaccccgacagaatcatgaacaccttcagcgtggtgcccagccccaaggtgagcgacaccgtggtggagccctacaacgccaccctgagcgtgcaccagctggtggagaacaccgacgagacctactgcatcgacaacgaggccctgtacgacatctgcttcagaaccctgaagctgaccacccccacctacggcgacctgaaccacctggtgagcgccaccatgagcggcgtgaccacctgcctgagattccccggccagctgaacgccgacctgagaaagctggccgtgaacatggtgcccttccccagactgcacttcttcatgcccggcttcgcccccctgaccagcagaggcagccagcagtacagagccctgaccgtgcccgagctgacccagcagatgttcgacgccaagaacatgatggccgcctgcgaccccagacacggcagatacctgaccgtggccgccgtgttcagaggcagaatgagcatgaaggaggtggacgagcagatgctgaacgtgcagaacaagaacagcagctacttcgtggagtggatccccaacaacgtgaagaccgccgtgtgcgacatcccccccagaggcctgaagatgagcgccaccttcatcggcaacagcaccgccatccaggagctgttcaagagaatcagcgagcagttcaccgccatgttcagaagaaaggccttcctgcactggtacaccggcgagggcatggacgagatggagttcaccgaggccgagagcaacatgaacgacctggtgagcgagtaccagcagtaccaggacgccaccgccgaggaggagggcgagttcgaggaggaggccgaggaggaggtggcctag

SEQ ID NO: 161746 - DNA, 1637 bp, Artificial Sequence
  derived and/or modified sequence
gttctggcagcccattccgagactagcggaggcgggcagggagggtatataagcgttggcggagcgtcggttgtagcactctgcgcgcccgctcttctgctgctgtttgtctacttcctcctgcttccccgccgccgccgccgccatcatgagggaaatcgtgcacttgcaggccgggcagtgcggcaaccaaatcggcgccaagttttgggaggtgatcagcgatgagcacggcatcgaccccacgggcacctaccacggggacagcgacctgcagctggaacgcatcaacgtgtactacaatgaggccaccggcggcaagtacgtgccccgcgccgtgctcgtggatctggagcccggcaccatggactccgtgcgctcggggcccttcgggcagatcttccggccggacaacttcgttttcggtcagagtggtgctgggaacaactgggccaaggggcactacacagaaggcgcggagctggtggactcggtgctggatgttgtgagaaaggaggctgagagctgtgactgcctgcagggtttccagctgacccactccctgggtggggggactgggtctgggatgggtaccctcctcatcagcaagatccgggaggagtacccagacaggatcatgaacacgtttagtgtggtgccttcgcccaaagtgtcagacacagtggtggagccctacaacgccaccctctcagtccaccagctcgtagaaaacacagacgagacctactgcattgataacgaagctctctacgacatttgcttcagaaccctaaagctgaccacgcccacctatggtgacctgaaccacctggtgtctgctaccatgagtggggtcaccacctgcctgcgcttcccaggccagctcaatgctgacctgcggaagctggctgtgaacatggtcccgtttccccggctgcacttcttcatgcccggctttgccccactgaccagccggggcagccagcagtaccgggcgctgaccgtgcccgagctcacccagcagatgtttgatgccaagaacatgatggctgcctgcgacccccgccatggccgctacctgacggttgccgccgtgttcaggggccgcatgtccatgaaggaggtggatgagcaaatgcttaatgtccaaaacaaaaacagcagctattttgttgagtggatccccaacaatgtgaaaacggctgtctgtgacatcccacctcgggggctaaaaatgtccgccaccttcattggcaacagcacggccatccaggagctgttcaagcgcatctccgagcagttcacggccatgttccggcgcaaggccttcctgcactggtacacgggcgagggcatggacgagatggagttcaccgaggccgagagcaacatgaatgacctggtgtccgagtaccagcagtaccaggatgccacagccgaggaggagggcgagttcgaggaggaggctgaggaggaggtggcctagagccttcagtcactggggaaagcagggaagcagtgtgaactctttattcactcccagcctgtcctgtggcctgtcccactgtgtgcacttgctgttttccctgtccacatccatgctgtacagacaccaccattaaagcattttcatagtg

SEQ ID NO: 161747 - DNA, 1338 bp, Artificial Sequence
  derived and/or modified sequence
atgcgcgagattgtgcaccttcaagcaggacaatgcggtaatcaaatcggagctaaattctgggaggtcatctccgacgagcatgggatcgaccccacaggcacatatcatggagacagcgatcttcagttggaacgaattaacgtgtactacaacgaagctaccgggggaaagtatgtgccaagggctgtcttagtggatctagaaccgggcaccatggactccgtgcgaagcgggccttttgggcaaatttttcggcccgataatttcgtattcggccagtccggggcagggaataactgggctaagggtcattacacagagggcgccgaactcgtcgactccgtgctggacgtggtgcgtaaagaagccgaatcttgtgattgcctacaggggttccagcttacacattccctggggggtggaaccggttccggcatgggtacactgcttatctccaaaatcagggaggagtaccccgataggatcatgaacacctttagcgttgtcccttctccaaaggtctccgacaccgtcgtggagccctacaacgccacactcagtgtccaccaattagtggaaaacaccgacgagacgtattgtatcgacaacgaggcgttgtatgatatctgctttcgcaccctgaagctaactacccctacctacggggacttgaatcacctggtcagcgctacaatgagcggcgtgaccacttgtctcaggtttcctggtcaactgaatgccgacctgcgcaagttggcggttaacatggtgccatttccgcggctgcatttttttatgcctggcttcgctccgttgacgtcacgcggctctcaacagtatcgtgctctaacggtgccagaactgacacagcagatgttcgatgcaaaaaacatgatggctgcttgcgatccaagacatgggcggtacctgaccgtggccgctgtattcagagggcgtatgagcatgaaagaggtcgatgagcagatgctaaatgtgcagaacaaaaacagttcatacttcgtggagtggatcccaaacaacgtgaaaaccgccgtgtgcgacatcccccctcgaggactaaagatgtccgcaacattcatcgggaattctacagcgattcaggagttattcaagaggatttccgaacagtttaccgccatgttccgtagaaaggcattcctccattggtatactggggaaggaatggatgagatggagtttaccgaagctgaaagcaatatgaacgatctcgtgtctgagtatcagcagtatcaggatgccacagccgaagaggaaggggagtttgaggaagaagctgaggaggaggtggcttag

SEQ ID NO: 161748 - DNA, 1338 bp, Artificial Sequence
  derived and/or modified sequence
atgagggagatcgtgcacctgcaggccggccagtgtggcaaccagatcggggccaagttctgggaggtgatcagtgatgagcacggcatcgaccccaccggcacctaccatggagacagcgacctgcagctggagcgcatcaacgtgtactacaatgaggccactggaggcaagtatgtgcccagggctgtgctggtggacctggagcccggcaccatggattctgtgcgcagcggccccttcggccagatcttccggccagacaactttgtgtttggccagagcggggccggcaacaactgggccaagggccactacacagaaggagctgagctggtggacagcgtgctggatgtggtgaggaaggaggccgagagctgtgactgcctgcagggcttccagctgacccacagcctgggcggcggcactggaagtggcatgggcaccctgctgatcagcaagatccgggaggagtacccagaccgcatcatgaacaccttctctgtggtgcccagccccaaggtgtctgacacagtggtggagccctacaatgccaccctgtctgtgcaccagctggtggagaacacagatgagacctactgcatcgacaatgaggccctgtatgacatctgcttccgcaccctgaagctgaccacccccacctacggggacctgaaccacctggtgtctgccaccatgtctggagtgaccacctgcctgcgcttccctggccagctgaatgctgacctgaggaagctggccgtgaacatggtgcccttcccccggctgcacttcttcatgcctggctttgcccccctgaccagccggggcagccagcagtaccgggccctgactgtgcctgagctgacccagcagatgtttgatgccaagaacatgatggccgcctgtgaccccaggcatggccgctacctgactgtggccgctgtgttccggggccgcatgtccatgaaggaggtggatgagcagatgctgaatgtgcagaacaagaacagcagctactttgtggagtggatccccaacaacgtgaagacagctgtgtgtgacatccccccccggggcctgaagatgtctgccaccttcatcggcaacagcacagccatccaggagctgttcaagaggatcagcgagcagttcaccgccatgttccggaggaaggccttcctgcactggtacacaggagagggcatggatgagatggagttcacagaagctgagagcaacatgaatgacctggtgtctgagtaccagcagtaccaggatgccacagctgaggaggagggggagtttgaggaggaggccgaggaggaggtggcctag

SEQ ID NO: 161749 - DNA, 1338 bp, Artificial Sequence
  derived and/or modified sequence
atgcgggagatcgtgcacctgcaggccggccagtgcggcaaccagatcggggcgaaattctgggaagtaattagcgatgagcacggcatcgaccctaccggtacttatcatggagacagtgacctccagcttgaacggatcaacgtatactataacgaggccactggcggcaagtacgttcccagagcggttttagtggatctggaacccggcaccatggacagcgtccgaagtgggccatttggacagatctttaggcctgacaacttcgtgtttggccaaagtggcgctggaaacaattgggccaagggccattatacagaaggggctgagctcgtggatagcgtactagatgtggtgcggaaagaggccgagtcttgcgattgcttgcagggctttcagctgacccactcactgggcggcggaactggaagcggcatgggcacattgcttatatccaaaattcgcgaagagtatcctgacagaatcatgaacaccttctccgtagtaccttcccccaaagtcagcgatacggtggtagaaccttacaatgcaaccctgtctgttcatcagctcgtggagaacacagacgagacctattgtatagacaatgaggcactgtacgatatctgttttcgtactctgaagctgacaacaccaacctacggtgatctgaatcacctggtgagtgctactatgagtggcgttactacatgcttacgctttcctgggcagctcaacgccgaccttcgcaaacttgctgtgaacatggtaccttttccgcggctgcatttcttcatgcctggatttgcgcctctgacatccaggggtagccagcagtaccgagccctcaccgtcccagagctgactcagcagatgttcgacgccaagaatatgatggctgcttgcgatccacgacacgggagatatttaactgttgcagctgtcttcagggggcggatgagcatgaaggaagtggacgaacagatgttaaacgtgcagaacaaaaatagtagctactttgtggaatggatcccaaataacgtcaagaccgctgtgtgcgacattccacctaggggacttaagatgagtgcgacttttatcggcaacagcactgccatccaagagctattcaagcgaatctcagagcagttcacagctatgttcaggagaaaagccttcctgcattggtacacaggcgaaggaatggacgaaatggaattcacggaggccgaatccaatatgaatgacctggtttccgagtatcagcagtatcaagatgctaccgcagaagaagaaggggaatttgaggaagaggcggaggaggaagtcgcttag

SEQ ID NO: 161750 - DNA, 1338 bp, Artificial Sequence
  derived and/or modified sequence
atgcgggaaatcgttcatctacaggctggtcaatgtggcaatcaaatcggagcgaagttctgggaagtcatctctgacgagcacggaatagatcccacgggaacctatcatggagatagcgacctgcagcttgaacgcatcaatgtttattacaacgaggccactggcggaaaatatgtcccaagagcggtactcgtcgacctggagccagggacgatggactcagtacgcagtggcccattcggtcagatttttaggcccgacaattttgttttcggccagtccggcgcaggtaacaattgggcaaagggacattataccgagggagcagagttggtggatagtgtattggacgtggtacggaaggaggctgagtcctgcgattgtcttcagggatttcagctgacacattcactggggggaggaaccggaagcggaatgggaacacttctaatctcaaaaattagagaagaataccccgatcgaattatgaacacgttttccgtggtgcctagtccaaaggtttctgacactgtggtagagccttataatgccaccctgtctgttcatcaactggtggagaacaccgacgaaacgtactgcatcgacaacgaggcgctatatgatatttgttttcggactctgaagctgactacacccacatacggcgatttgaatcacctggtgtcagccaccatgagtggtgtcacgacatgtctccgattccccggacagttgaatgccgatcttcggaagttggccgtcaatatggtgccattcccaagactgcatttcttcatgcctggttttgcgccactgacaagtcgtgggtcccagcaatatagggctctgactgtgcctgagctcacccagcaaatgtttgacgcgaaaaacatgatggctgcctgcgatccccgtcacggacggtatttgactgtcgcggctgttttccggggacgcatgtccatgaaggaggtcgacgaacagatgctcaatgtgcaaaataagaatagcagctattttgtagagtggattcccaacaatgttaagaccgcggtgtgcgacatccccccacggggactgaagatgtccgcaaccttcataggaaatagcactgctatccaggagttgtttaagcgcatcagcgaacaattcacagcgatgttccggagaaaggccttcctgcattggtatactggtgaagggatggacgaaatggagttcaccgaggccgaatcaaacatgaatgacctggtctccgaataccagcaataccaggacgctacagctgaggaggagggcgaattcgaggaggaagcagaggaggaggtcgcttag

SEQ ID NO: 161751 - protein, 700 aa, Artificial Sequence
  derived and/or modified sequence
MGQTVNEDSMDVKKENQEKTPQSSTSSVQRDDFHWEEYLKETGSISAPSECFRQSQIPPVNDFKVGMKLEARDPRNATSVCIATVIGITGARLRLRLDGSDNRNDFWRLVDSPDIQPVGTCEKEGDLLQPPLGYQMNTSSWPMFLLKTLNGSEMASATLFKKEPPKPPLNNFKVGMKLEAIDKKNPYLICPATIGDVKGDEVHITFDGWSGAFDYWCKYDSRDIFPAGWCRLTGDVLQPPGTSVPIVKNIAKTESSPSEASQHSMQSPQKTTLILPTQQVRRSSRIKPPGPTAVPKRSSSVKNITPRKKGPNSGKKEKPLPVICSTSAASLKSLTRDRGMLYKDVASGPCKIVMSTVCVYVNKHGNFGPHLDPKRIQQLPDHFGPGPVNVVLRRIVQACVDCALETKTVFGYLKPDNRGGEVITASFDGETHSIQLPPVNSASFALRFLENFCHSLQCDNLLSSQPFSSSRGHTHSSAEHDKNQSAKEDVTERQSTKRSPQQTVPYVVPLSPKLPKTKEYASEGEPLFAGGSAIPKEENLSEDSKSSSLNSGNYLNPACRNPMYIHTSVSQDFSRSVPGTTSSPLVGDISPKSSPHEVKFQMQRKSEAPSYIAVPDPSVLKQGFSKDPSTWSVDEVIQFMKHTDPQISGPLADLFRQHEIDGKALFLLKSDVMMKYMGLKLGPALKLCYYIEKLKEGKYS

SEQ ID NO: 161752 - DNA, 4212 bp, Artificial Sequence
  derived and/or modified sequence
ggcagtggcggttgcggggcatgcgcggctccgcgcgcggcttctcaaacatggcggcggcggtgtgaagctcggtgccggctcgcgcgatcggtgggacagaatttcgttgttttcaccgacgagactggaggaaacaacaccaaatagggataccatgggacaaacagtgaatgaagattccatggatgtcaagaaggagaatcaagagaaaactcctcagtcaagtacatcttctgtacaaagggatgatttccactgggaggagtatttgaaagagactgggtctataagtgctccttcagagtgcttccgtcagtctcagattccacctgtgaatgatttcaaagttggtatgaaattggaagcccgtgaccctcgcaatgccacttcagtatgtattgctacggttattggaattactggggccaggttacggttacgactggatggtagtgacaacagaaatgatttttggaggcttgtcgattccccagacatacaacctgttgggacatgtgaaaaggaaggagacttacttcaacctccactagggtaccagatgaatacatcctcctggccgatgttcctcttaaagacactaaatgggtctgaaatggcatctgccacattatttaagaaggaaccaccaaagcccccactaaataattttaaagtggggatgaaactggaagctattgacaaaaagaacccgtatctcatctgtcctgcgaccattggagatgttaaaggggatgaagttcatatcacatttgatggctggagtggagcttttgattactggtgcaagtatgattctcgagatattttcccagctgggtggtgtcgcctgacaggagatgtattacaacccccaggaactagtgttcctattgtaaagaatatagcaaaaacagagtcttctccttccgaagcaagccagcattcaatgcagtctccacagaaaactactctaatattaccaacacagcaggtcaggagatcaagtcgaattaaaccacctggacctactgcagtccccaaaaggagcagttctgttaaaaatatcacaccaaggaaaaaaggtccaaactcaggaaaaaaggaaaaacctttgcccgtgatatgttctacatctgcagcttctctaaaatcgctgaccagagaccgtggcatgttatataaagatgtcgcttctgggccatgtaaaatagtgatgtctacagtctgtgtctatgtaaacaaacatggaaactttggccctcatctggatcccaagagaatccagcagctgcctgaccacttcggcccgggcccggtgaatgtggtgcttcgccggattgtgcaggcctgtgtggattgtgcccttgaaactaaaactgtttttggatacctgaagccagataatcgtggaggagaagtgataactgcctcctttgatggggaaactcattccatccagctccctccagtgaacagtgcatcatttgctcttcgctttcttgagaacttctgccacagtctgcagtgtgataaccttttgagtagccagccttttagttcttccaggggtcatactcacagctctgcagagcatgataaaaatcagtcagcaaaagaagatgtaacagaaaggcaaagcaccaaacgatctcctcagcaaactgtaccatatgttgttcctctctctcctaagctccccaaaacaaaggagtatgcgtctgaaggagaaccattgtttgctgggggaagtgccattcccaaagaggagaatctttcagaagattctaagagctcatcactaaattcaggaaattatttgaatcctgcctgtagaaatcctatgtatattcatacttcagtctcccaggatttttctcgaagtgtgccaggcaccacaagttcaccactagttggggacatatcccccaagagcagtccccatgaagttaaattccaaatgcagaggaaaagtgaagctccaagttatatagctgtacctgatcccagtgtcctgaaacaaggcttctctaaggacccttcaacctggtctgtggatgaagtgatacagtttatgaaacatacagatcctcagatatcaggccccctcgccgacctcttcaggcaacatgaaattgatgggaaggctctgttcctactcaagagtgatgtgatgatgaagtatatggggctgaagctggggccagcattaaagctgtgttactacattgaaaagcttaaagaaggaaaatacagttaaaaaaatgtgtaagtttagattggacataattctcaggtgtactgttaacattttaatttaaaagtatttctcttagcagtttttgttttgtagacagttcccataaaaatattttatcagaattgcagaactgtagtaacagttcagtcaactttgtttttttcctggagtcaccaaccagctttgggagacacagccgccactcccccagtctacttctttaaaaagcatttaacaggttagtattggcatattcaaattggcagttctttatgtctttttaaattttcattgtacagtttacaaatatacttaatgtagttaacagagaaaaacctttgattttggttaacctttatatctagaaccaaaacagctaaatcccaaaggggaaaatatcagggattgacaacttctataattaaatccatgagaatttttcctcactagagaatttaaaggtgcacctgtagatatcatcttttctcagatattttgtgtgatactctgtggtgttctgttcatgttctatcagtatatctagaaagggaatagccatataaattattttccttttattatttctctgtatgttgtatttgatcatatttaaaggaaaaaagcaagcttataagctttcatgaagtgttcttaccagtttttgataaattttttaaattataggatagaattgtcattttatgcaggagatatttatactacgagggttgtttggatggagtcagattaaattttttcagtgaaattcctattattttaaaactttccatattttcactacgcttggacatttaactaggcattcttttcttacatctctatatgaagatacctgtgtccaaaatttttgaagatatatattgtatgtgtttattcttcatatggtactttaccatatttatatattgttttatacctgtaggtttacacacaagtaaatcttttttttcttgaatttaatctggcactttgcactgccacagaggtgacgatgaactatgtatatagttagatgttttgatttcgtaaaaaatatatgtccatcgtttgctatcaccagtacctctcagcttactcttcaggggatatgaaacaatctgtagattggtttccatacagggaagttctctgtcctatgcaatgtttctaattaatttgcttagttctgagccatttattctgctacactttgaaagatatattagttctgacttattgtttggggctttattttatttttatttttttgagatggagtttcactcttgttgcccaggctggagtgcaatagctcgatctcggctcactgcaacctcgcctccctggttcaagcaattctcctgcctcagcgattacaggaatgcaccaccacgcccagctaattttgtagagatggggtttctccatgttggtcaggctggtctcaaactcctgacctcaggtgatccgcccacctcggccttgcaaaatgctgggattacaggcatgagccaccatgcccagccatgtttggggctttattttataagttagaactttgaagaggaaatggtgctatatgtttattgttattactttgtgtaactttgatgtaatgtttataagctatgagaatcagttataaaagtattagccatttgttgtaaatgccaataaaatattcaccaggggcaagaatgtacattttctttttagaaaaccaaatgtactttagacatgaatgcaactatttaaagaatagcttcatttatgttattccttacatgtcataagattcttacttaaacttggtcttctttcaagttgtttgtatgaagatgctgtacccacttgaacagtcctcaggtgtttacataaatactatgttttacagttttcatattttaaaatattaataaagttaatcgcaacgattcaaaaaaaaaaaaaaa

SEQ ID NO: 161753 - DNA, 2103 bp, Artificial Sequence
  derived and/or modified sequence
atgggacagaccgttaacgaagattcaatggacgtaaagaaggaaaatcaagaaaagaccccccagagctcaaccagctctgttcagagggatgatttccactgggaagagtatcttaaggagaccggctcaatttccgccccctcggagtgtttccggcagagtcagatacctccggtgaatgattttaaagtgggaatgaaattggaagcgcgagaccctcgcaatgccactagcgtttgcattgctacagtcatcggaatcactggggcaaggctgcggctgagactggacgggtctgacaacagaaacgacttctggcggttagtcgattctccggacatacaacccgtaggcacatgtgagaaagaaggtgacttgcttcaaccgcccctcgggtatcagatgaatacctcaagctggcctatgttcttgctgaagaccctaaacgggtcggagatggcaagtgccaccttgtttaagaaagaacccccaaagcctcccctgaacaacttcaaggttgggatgaagcttgaggctattgacaaaaaaaatccttatctgatttgcccagcgaccatcggtgatgtgaagggggacgaagtgcacattaccttcgacggctggtctggagcattcgattattggtgtaagtatgactcacgcgacatcttccctgccggctggtgccgcctgaccggtgatgtcctacagcctccgggaaccagcgtcccgattgtcaagaatattgctaaaacagagagttcaccctctgaggctagtcaacatagcatgcagtcccctcaaaaaacaacattgatcctccccacacagcaggtccgtcgttcaagtagaatcaagcctcccggacccactgctgttcccaagcggagcagttctgttaaaaatatcacaccgcgtaaaaaggggcctaattcagggaagaaggagaaaccacttcccgtaatctgctcaacgagcgccgcatcattgaaaagcctaacgcgcgatagagggatgctatacaaagacgtggctagcggcccttgcaagattgtgatgagtacagtttgcgtgtatgtcaacaaacacgggaattttggccctcatctggacccaaaacgcattcagcagttgcctgaccactttgggcctggtccagtgaacgtggtcctccgacgcattgtgcaggcttgcgtcgactgtgccctggaaacaaagacagtgttcgggtatctcaaaccggacaacagaggcggcgaggtgattactgccagtttcgatggagagacgcattctatccaactgcctccagtaaactccgcctcgtttgctctgaggttcctggaaaatttttgccattctctgcaatgtgacaatcttctcagctcgcagccattctcttcgtctaggggacacacccatagtagcgctgagcatgacaaaaatcagagtgctaaagaggatgtgaccgagcgccagagtactaagcgaagtccccagcagacagtgccatacgtcgtgcctctctcccccaagctcccgaaaacaaaagaatacgcatctgaaggagagcccctgtttgcaggtggcagcgccatcccaaaagaagagaatctgtcagaggactccaaaagtagcagtctaaactctggcaactatttgaaccctgcttgtaggaatcccatgtatatccacacaagcgtgtcccaggatttctcccggtccgtgcccggaactacctctagtcctttggtgggtgacataagcccaaagagcagtccgcacgaagttaaatttcagatgcagcgcaaatctgaagcaccgtcatacatcgcggttccagatccatctgtgctgaagcagggattcagcaaagacccttctacctggagtgtagatgaagtgatccaattcatgaagcataccgatcctcaaatatcgggaccgctcgccgatctgttcagacaacatgagattgacggcaaagctctgttcctgttgaaatccgatgtcatgatgaaatatatgggattaaagttgggccccgcactcaagctctgttactatatagaaaaactcaaggaggggaaatattcatag

SEQ ID NO: 161754 - DNA, 2103 bp, Artificial Sequence
  derived and/or modified sequence
atgggccagacagtgaatgaagattccatggatgtgaagaaggagaaccaggagaagaccccccagagcagcaccagctctgtgcagagagatgacttccactgggaggagtacctgaaggagaccggcagcatcagcgcccccagcgagtgcttccggcagagccagatcccccctgtgaatgacttcaaggtgggcatgaagctggaggcccgggaccccagaaatgccacctctgtgtgcatcgccaccgtcatcggcatcactggagcccggctgcggctgcggctggatggcagtgacaacagaaatgacttctggaggctggtggacagcccagacatccagcctgtgggcacctgtgagaaggagggggacctgctgcagccccccctgggctaccagatgaacaccagctcctggcccatgttcctgctgaagaccctgaatggcagcgagatggccagcgccaccctcttcaagaaggagccccccaagccacccctgaacaacttcaaggtgggcatgaagctggaggccatcgacaagaagaacccctacctgatctgcccagccaccatcggagatgtgaagggagatgaggtgcacatcacctttgatggctggagcggggcctttgactactggtgcaagtatgacagccgggacatcttccctgctggctggtgccgcctgactggagatgtgctgcagcccccaggcacctctgtgcccatcgtgaagaacatcgccaagacagagagcagccccagcgaggccagccagcacagcatgcagagcccccagaagaccaccctcatcctgcccacccagcaggtgagaagaagcagccgcatcaagcccccaggccccacagctgtgcccaagaggagcagctctgtgaagaacatcacccccaggaagaagggccccaacagcggcaagaaggagaagcccctgcctgtgatctgcagcaccagcgctgccagcctgaagagcctgacccgggaccggggcatgctgtacaaggatgtggccagcggcccctgcaagatcgtgatgagcacagtgtgtgtgtatgtgaacaagcacggcaactttggcccccacctggaccccaagaggatccagcagctgcctgaccactttggacctggccctgtgaatgtggtgctgcggagaattgtgcaggcctgtgtggactgtgccctggagaccaagacagtgtttggctacctgaagccagacaacagaggaggagaggtgatcacagccagctttgatggagagacccacagcatccagctgccccctgtgaacagcgccagctttgccctgcgcttcctggagaacttctgccacagcctgcagtgtgacaacctgctgagcagccagcccttcagcagcagccggggccacacccacagcagcgctgagcatgacaagaaccagagcgccaaggaggatgtgacagagcggcagagcaccaagaggagcccccagcagacagtgccctacgtggtgcccctgagccccaagctgcccaagaccaaggagtatgccagcgagggggagcccctgtttgctgggggcagcgccatccccaaggaggagaacctgtctgaggacagcaagagcagcagcctgaacagcggcaactacctgaacccagcctgcaggaaccccatgtacatccacacctctgtgtcccaggacttcagccgctctgtgcccggcaccaccagcagccccctggtgggggacatcagccccaagagcagcccccatgaggtgaagttccagatgcagaggaagtctgaggcccccagctacatcgctgtgcctgaccccagcgtgctgaagcagggcttcagcaaggaccccagcacctggagcgtggatgaggtgatccagttcatgaagcacacagacccccagatcagcggccccctggccgacctcttccggcagcacgagattgatggcaaggccctcttcctgctgaagagtgatgtgatgatgaagtacatgggcctgaagctgggccctgccctgaagctgtgctactacatcgagaagctgaaggagggcaagtacagctag

SEQ ID NO: 161755 - DNA, 2103 bp, Artificial Sequence
  derived and/or modified sequence
atgggccagaccgtgaacgaggacagcatggacgtgaagaaggagaaccaggaaaaaacgccacagagcagcacctccagcgtgcaaagggatgacttccactgggaggagtatctgaaagagaccggatctatctccgccccatcagagtgtttccgacaatctcaaattccccccgttaacgatttcaaagtgggaatgaagcttgaggcccgtgacccccgaaacgccacttctgtgtgcattgcgacggttattggcatcacaggcgcgagattacgactccggcttgacggcagcgacaacagaaacgatttttggcggctcgtagatagccccgacatccaacccgtaggcacctgcgagaaagaaggcgaccttcttcagccccctctgggttaccagatgaacacaagcagttggccaatgtttctcctgaagacgttaaacgggagcgaaatggccagtgccactcttttcaaaaaggaacctcctaagccccctcttaataatttcaaggttggcatgaagctcgaggccatagacaaaaaaaacccatatctcatttgccccgctactatcggtgacgtaaagggagatgaggttcatatcacttttgacggctggagtggcgcatttgactactggtgtaaatacgattccagagacattttccccgcagggtggtgtcggctgacaggagacgttctgcagccaccgggcacaagcgtcccgattgtcaagaatatcgccaagaccgagagctctccgtccgaggcttcccagcattccatgcagagccctcagaagacaacgttaatcctgcccacacagcaggttcgtagaagcagccgcatcaaacctcctgggccaaccgcggttcctaaacggagttccagcgttaaaaacattactcccagaaagaaaggacctaacagcgggaagaaggaaaagccactcccagtgatttgttctacatccgctgcaagtctgaagagtctgacacgcgatcgggggatgctgtacaaagacgtggctagcggcccatgtaaaatcgtgatgtccaccgtatgtgtatatgtgaacaaacatggtaatttcggaccccatctggatcccaagcgtatccagcagctgcctgaccattttgggcccggaccagttaatgtggtcttgaggagaatagttcaggcttgcgtggactgtgctctggagactaagaccgtgtttggttacctcaagcccgataatagagggggcgaagtcattactgctagtttcgatggggagactcactctatccagctaccgcctgtaaatagcgccagctttgccctccgctttctggagaatttttgccacagccttcagtgcgacaacctgttaagtagccagcctttttcctcaagccgaggccacacccatagttcagctgaacacgacaagaatcagtccgccaaggaggacgttacggaaagacagagcacaaagcgctcccctcagcagaccgtcccctatgtggtgcccttaagccctaagctgcctaagactaaggaatacgcaagcgagggtgaaccactgtttgctggaggttctgctatacctaaagaggagaacttgtctgaggatagtaaaagcagcagccttaactcaggcaactacctgaaccccgcttgtaggaatcctatgtacattcacactagcgtatctcaggacttcagtcgcagtgttcccggcacaacttcttccccactcgtcggagatatcagtcccaaaagctctcctcatgaggtcaaattccaaatgcagcgtaaatcagaagccccatcatacatcgccgtcccagatccgtccgtgctcaaacagggctttagtaaagacccttccacttggtctgttgacgaagtgatccaattcatgaaacacacagatcctcaaatcagtggccctctggccgatctattccggcagcacgagattgatggaaaagccttattcctgctgaagagcgatgtaatgatgaagtacatgggcctgaagctggggccagccctcaaactctgttactacattgagaagctcaaagagggtaaatattcatag

SEQ ID NO: 161756 - DNA, 2103 bp, Artificial Sequence
  derived and/or modified sequence
atgggccagacggtcaatgaggactccatggacgtgaaaaaggaaaaccaggagaagacaccccagagctctacatcatccgtgcaaagagacgactttcactgggaagagtacctgaaagaaacaggatcaatcagtgccccatcagagtgcttcaggcagtctcaaatccctcctgtaaacgattttaaggtgggaatgaagctcgaggctcgcgatccacgaaacgcaacatccgtgtgcattgccacagtgattggtattaccggcgctagattgcggctacgcctggatggtagtgataacaggaatgatttttggaggctcgtggacagccctgatatacagcctgttggaacatgtgagaaggaaggcgatctcttgcagcctccgctcggataccaaatgaatacttcttcatggccaatgttcctgctgaagactctcaacggctctgagatggctagtgccaccttatttaagaaggaacccccaaagccccctctcaacaattttaaggtcggaatgaagctggaggcaatagacaagaaaaacccttacttaatatgcccagctactattggcgacgtcaagggcgatgaggtgcacatcacattcgatggatggagcggcgcatttgactactggtgcaaatatgattcacgcgacattttccccgcaggctggtgcagacttaccggggatgtgctccagccaccaggaacctccgtgccaatcgtgaagaatattgcaaagacagagtcgtccccatccgaagcttcccagcattctatgcagagccctcagaagaccactctgatcttacccactcagcaggtgcgcagatcaagccgcataaagcctcctgggccaacagcggttccgaagagaagttcctccgtgaagaatatcactccacgaaagaagggccctaattcgggcaagaaagagaagcccttgcccgtgatctgctccacctccgccgcttccctgaaatcactcacccgagaccgtgggatgctctataaggatgtggcgtccggtccctgcaaaatcgtcatgtctaccgtgtgcgtatacgtcaacaagcacgggaattttggccctcacttagacccaaaacgcatccagcaactgcccgatcacttcggacccggaccggtgaacgtcgttctgagaagaatcgtgcaagcgtgcgtggactgcgcgctcgagacaaagacagttttcggctacctgaaacccgataatcgaggaggtgaggtcataacagcatcttttgacggtgagactcacagcatccaactgccccctgtgaattcggcctcatttgcgctgcgctttttagaaaacttttgtcactcgctacagtgcgacaatttactgtcctcccagccattctccagtagcagagggcacacccacagtagtgccgagcacgataagaaccagtcagctaaagaagacgtcactgagcgtcagagcaccaaaaggtccccgcagcagaccgtgccatacgtcgtgcctctctcgccaaagctgcctaagaccaaggaatatgcgagcgagggggagcccctctttgccggtgggtctgctatccctaaggaagagaatctgagtgaggacagcaagtccagttccttgaattcagggaattatttgaatcctgcttgtcgcaatcccatgtacattcacacctcagtaagccaagacttctctcggagcgttccaggcactacgtcatcaccactcgtgggagacatctcccccaagtcctcacctcacgaagtcaagttccagatgcagcgcaagtccgaggcaccaagctacatcgcagtcccggacccatcagttctaaagcagggcttctccaaagatccatctacatggtctgtggatgaggtcattcagtttatgaagcacacggacccacagatcagcgggcctttagcagatctcttccgccaacacgagattgatggtaaggccctgtttctattgaaaagcgatgtgatgatgaaatacatgggattaaagctggggcctgctctcaagctttgctattatatagaaaaattaaaggagggtaagtactcttag

SEQ ID NO: 161757 - DNA, 4200 bp, Artificial Sequence
  derived and/or modified sequence
ggcggcagtggcggttgcggggcatgcgcggctccgcgcgcggcttctcaaacatggcggcggcggtgtgaagctcggtgccggctcgcgcgatcggtgggacagaatttcgttgttttcaccgacgagactggaggaaacaacaccaaatagggataccatgggacaaacagtgaatgaagattccatggatgtcaagaaggagaatcaagagaaaactcctcagtcaagtacatcttctgtacaaagggatgatttccactgggaggagtatttgaaagagactgggtctataagtgctccttcagagtgcttccgtcagtctcagattccacctgtgaatgatttcaaagttggtatgaaattggaagcccgtgaccctcgcaatgccacttcagtatgtattgctacggttattggaattactggggccaggttacggttacgactggatggtagtgacaacagaaatgatttttggaggcttgtcgattccccagacatacaacctgttgggacatgtgaaaaggaaggagacttacttcaacctccactagggtaccagatgaatacatcctcctggccgatgttcctcttaaagacactaaatgggtctgaaatggcatctgccacattatttaagaaggaaccaccaaagcccccactaaataattttaaagtggggatgaaactggaagctattgacaaaaagaacccgtatctcatctgtcctgcgaccattggagatgttaaaggggatgaagttcatatcacatttgatggctggagtggagcttttgattactggtgcaagtatgattctcgagatattttcccagctgggtggtgtcgcctgacaggagatgtattacaacccccaggaactagtgttcctattgtaaagaatatagcaaaaacagagtcttctccttccgaagcaagccagcattcaatgcagtctccacagaaaactactctaatattaccaacacagcaggtcaggagatcaagtcgaattaaaccacctggacctactgcagtccccaaaaggagcagttctgttaaaaatatcacaccaaggaaaaaaggtccaaactcaggaaaaaaggaaaaacctttgcccgtgatatgttctacatctgcagcttctctaaaatcgctgaccagagaccgtggcatgttatataaagatgtcgcttctgggccatgtaaaatagtgatgtctacagtctgtgtctatgtaaacaaacatggaaactttggccctcatctggatcccaagagaatccagcagctgcctgaccacttcggcccgggcccggtgaatgtggtgcttcgccggattgtgcaggcctgtgtggattgtgcccttgaaactaaaactgtttttggatacctgaagccagataatcgtggaggagaagtgataactgcctcctttgatggggaaactcattccatccagctccctccagtgaacagtgcatcatttgctcttcgctttcttgagaacttctgccacagtctgcagtgtgataaccttttgagtagccagccttttagttcttccaggggtcatactcacagctctgcagagcatgataaaaatcagtcagcaaaagaagatgtaacagaaaggcaaagcaccaaacgatctcctcagcaaactgtaccatatgttgttcctctctctcctaagctccccaaaacaaaggagtatgcgtctgaaggagaaccattgtttgctgggggaagtgccattcccaaagaggagaatctttcagaagattctaagagctcatcactaaattcaggaaattatttgaatcctgcctgtagaaatcctatgtatattcatacttcagtctcccaggatttttctcgaagtgtgccaggcaccacaagttcaccactagttggggacatatcccccaagagcagtccccatgaagttaaattccaaatgcagaggaaaagtgaagctccaagttatatagctgtacctgatcccagtgtcctgaaacaaggcttctctaaggacccttcaacctggtctgtggatgaagtgatacagtttatgaaacatacagatcctcagatatcaggccccctcgccgacctcttcaggcaacatgaaattgatgggaaggctctgttcctactcaagagtgatgtgatgatgaagtatatggggctgaagctggggccagcattaaagctgtgttactacattgaaaagcttaaagaaggaaaatacagttaaaaaaatgtgtaagtttagattggacataattctcaggtgtactgttaacattttaatttaaaagtatttctcttagcagtttttgttttgtagacagttcccataaaaatattttatcagaattgcagaactgtagtaacagttcagtcaactttgtttttttcctggagtcaccaaccagctttgggagacacagccgccactcccccagtctacttctttaaaaagcatttaacaggttagtattggcatattcaaattggcagttctttatgtctttttaaattttcattgtacagtttacaaatatacttaatgtagttaacagagaaaaacctttgattttggttaacctttatatctagaaccaaaacagctaaatcccaaaggggaaaatatcagggattgacaacttctataattaaatccatgagaatttttcctcactagagaatttaaaggtgcacctgtagatatcatcttttctcagatattttgtgtgatactctgtggtgttctgttcatgttctatcagtatatctagaaagggaatagccatataaattattttccttttattatttctctgtatgttgtatttgatcatatttaaaggaaaaaagcaagcttataagctttcatgaagtgttcttaccagtttttgataaattttttaaattataggatagaattgtcattttatgcaggagatatttatactacgagggttgtttggatggagtcagattaaattttttcagtgaaattcctattattttaaaactttccatattttcactacgcttggacatttaactaggcattcttttcttacatctctatatgaagatacctgtgtccaaaatttttgaagatatatattgtatgtgtttattcttcatatggtactttaccatatttatatattgttttatacctgtaggtttacacacaagtaaatcttttttttcttgaatttaatctggcactttgcactgccacagaggtgacgatgaactatgtatatagttagatgttttgatttcgtaaaaaatatatgtccatcgtttgctatcaccagtacctctcagcttactcttcaggggatatgaaacaatctgtagattggtttccatacagggaagttctctgtcctatgcaatgtttctaattaatttgcttagttctgagccatttattctgctacactttgaaagatatattagttctgacttattgtttggggctttattttatttttatttttttgagatggagtttcactcttgttgcccaggctggagtgcaatagctcgatctcggctcactgcaacctcgcctccctggttcaagcaattctcctgcctcagcgattacaggaatgcaccaccacgcccagctaattttgtagagatggggtttctccatgttggtcaggctggtctcaaactcctgacctcaggtgatccgcccacctcggccttgcaaaatgctgggattacaggcatgagccaccatgcccagccatgtttggggctttattttataagttagaactttgaagaggaaatggtgctatatgtttattgttattactttgtgtaactttgatgtaatgtttataagctatgagaatcagttataaaagtattagccatttgttgtaaatgccaataaaatattcaccaggggcaagaatgtacattttctttttagaaaaccaaatgtactttagacatgaatgcaactatttaaagaatagcttcatttatgttattccttacatgtcataagattcttacttaaacttggtcttctttcaagttgtttgtatgaagatgctgtacccacttgaacagtcctcaggtgtttacataaatactatgttttacagttttcatattttaaaatattaataaagttaatcgcaacgattc

SEQ ID NO: 161758 - DNA, 2103 bp, Artificial Sequence
  derived and/or modified sequence
atgggccagaccgtgaacgaggacagcatggacgtgaagaaggagaaccaggagaagaccccccagagcagcaccagcagcgtgcagagagacgacttccactgggaggagtacctgaaggagaccggcagcatcagcgcccccagcgagtgcttcagacagagccagatcccccccgtgaacgacttcaaggtgggcatgaagctggaggccagagaccccagaaacgccaccagcgtgtgcatcgccaccgtgatcggcatcaccggcgccagactgagactgagactggacggcagcgacaacagaaacgacttctggagactggtggacagccccgacatccagcccgtgggcacctgcgagaaggagggcgacctgctgcagccccccctgggctaccagatgaacaccagcagctggcccatgttcctgctgaagaccctgaacggcagcgagatggccagcgccaccctgttcaagaaggagccccccaagccccccctgaacaacttcaaggtgggcatgaagctggaggccatcgacaagaagaacccctacctgatctgccccgccaccatcggcgacgtgaagggcgacgaggtgcacatcaccttcgacggctggagcggcgccttcgactactggtgcaagtacgacagcagagacatcttccccgccggctggtgcagactgaccggcgacgtgctgcagccccccggcaccagcgtgcccatcgtgaagaacatcgccaagaccgagagcagccccagcgaggccagccagcacagcatgcagagcccccagaagaccaccctgatcctgcccacccagcaggtgagaagaagcagcagaatcaagccccccggccccaccgccgtgcccaagagaagcagcagcgtgaagaacatcacccccagaaagaagggccccaacagcggcaagaaggagaagcccctgcccgtgatctgcagcaccagcgccgccagcctgaagagcctgaccagagacagaggcatgctgtacaaggacgtggccagcggcccctgcaagatcgtgatgagcaccgtgtgcgtgtacgtgaacaagcacggcaacttcggcccccacctggaccccaagagaatccagcagctgcccgaccacttcggccccggccccgtgaacgtggtgctgagaagaatcgtgcaggcctgcgtggactgcgccctggagaccaagaccgtgttcggctacctgaagcccgacaacagaggcggcgaggtgatcaccgccagcttcgacggcgagacccacagcatccagctgccccccgtgaacagcgccagcttcgccctgagattcctggagaacttctgccacagcctgcagtgcgacaacctgctgagcagccagcccttcagcagcagcagaggccacacccacagcagcgccgagcacgacaagaaccagagcgccaaggaggacgtgaccgagagacagagcaccaagagaagcccccagcagaccgtgccctacgtggtgcccctgagccccaagctgcccaagaccaaggagtacgccagcgagggcgagcccctgttcgccggcggcagcgccatccccaaggaggagaacctgagcgaggacagcaagagcagcagcctgaacagcggcaactacctgaaccccgcctgcagaaaccccatgtacatccacaccagcgtgagccaggacttcagcagaagcgtgcccggcaccaccagcagccccctggtgggcgacatcagccccaagagcagcccccacgaggtgaagttccagatgcagagaaagagcgaggcccccagctacatcgccgtgcccgaccccagcgtgctgaagcagggcttcagcaaggaccccagcacctggagcgtggacgaggtgatccagttcatgaagcacaccgacccccagatcagcggccccctggccgacctgttcagacagcacgagatcgacggcaaggccctgttcctgctgaagagcgacgtgatgatgaagtacatgggcctgaagctgggccccgccctgaagctgtgctactacatcgagaagctgaaggagggcaagtacagctag

SEQ ID NO: 161759 - protein, 480 aa, Artificial Sequence
  derived and/or modified sequence
MTVTKMSWRPQYRSSKFRNVYGKVANREHCFDGIPITKNVHDNHFCAVNTRFLAIVTESAGGGSFLVIPLEQTGRIEPNYPKVCGHQGNVLDIKWNPFIDNIIASCSEDTSVRIWEIPEGGLKRNMTEALLELHGHSRRVGLVEWHPTTNNILFSAGYDYKVLIWNLDVGEPVKMIDCHTDVILCMSFNTDGSLLTTTCKDKKLRVIEPRSGRVLQEANCKNHRVNRVVFLGNMKRLLTTGVSRWNTRQIALWDQEDLSMPLIEEEIDGLSGLLFPFYDADTHMLYLAGKGDGNIRYYEISTEKPYLSYLMEFRSPAPQKGLGVMPKHGLDVSACEVFRFYKLVTLKGLIEPISMIVPRRSDSYQEDIYPMTPGTEPALTPDEWLGGINRDPVLMSLKEGYKKSSKMVFKAPIKEKKSVVVNGIDLLENVPPRTENELLRMFFRQQDEIRRLKEELAQKDIRIRQLQLELKNLRNSPKNC

SEQ ID NO: 161760 - protein, 475 aa, Artificial Sequence
  derived and/or modified sequence
MSWRPQYRSSKFRNVYGKVANREHCFDGIPITKNVHDNHFCAVNTRFLAIVTESAGGGSFLVIPLEQTGRIEPNYPKVCGHQGNVLDIKWNPFIDNIIASCSEDTSVRIWEIPEGGLKRNMTEALLELHGHSRRVGLVEWHPTTNNILFSAGYDYKVLIWNLDVGEPVKMIDCHTDVILCMSFNTDGSLLTTTCKDKKLRVIEPRSGRVLQEANCKNHRVNRVVFLGNMKRLLTTGVSRWNTRQIALWDQEDLSMPLIEEEIDGLSGLLFPFYDADTHMLYLAGKGDGNIRYYEISTEKPYLSYLMEFRSPAPQKGLGVMPKHGLDVSACEVFRFYKLVTLKGLIEPISMIVPRRSDSYQEDIYPMTPGTEPALTPDEWLGGINRDPVLMSLKEGYKKSSKMVFKAPIKEKKSVVVNGIDLLENVPPRTENELLRMFFRQQDEIRRLKEELAQKDIRIRQLQLELKNLRNSPKNC

SEQ ID NO: 161761 - DNA, 1443 bp, Artificial Sequence
  derived and/or modified sequence
atgactgtgaccaagatgtcctggcgcccccagtatcgcagttcaaaattcaggaacgtgtatggcaaggtagcaaacagagagcactgttttgacgggatccctatcacaaagaacgtccacgacaatcacttttgtgctgttaacaccagattcctggcgatcgttacagagtcagcaggcggaggcagttttctagtgatacctctggagcaaacaggtagaatcgaaccaaattatcctaaagtgtgtggacaccagggaaatgttttagacattaagtggaatccctttatagacaacattatcgcgtcatgtagcgaggacaccagcgtaaggatttgggaaatccccgaaggcggcctgaagaggaatatgactgaagctctattggagctccatggtcattccaggcgagtgggattagtggaatggcatcccacaactaacaacatcttgtttagtgccggatatgattataaagttctcatctggaatctggatgtgggggagcccgttaagatgatagactgccacaccgatgtgatcctgtgcatgtctttcaacaccgatggcagtctccttacaaccacgtgtaaagacaaaaaactgagagttatcgagcctcgcagcggcagggtgctgcaggaggccaattgcaaaaaccaccgggttaaccgggtggtattcctcggcaatatgaagaggctcttaactacaggggtaagccgctggaatacgcgacaaattgcactgtgggatcaggaggacctgagcatgcccctgatcgaagaagagatcgatgggctgtccggtctgctttttccattttacgacgccgatacacacatgctgtatctcgccggcaagggcgacggcaatattcgctactatgaaatctctacagaaaaaccttatcttagctacctcatggagttcaggtcccccgcgccccagaaaggtttaggcgtgatgccaaaacacggtctggacgtctccgcttgcgaagtgttccggttctataagctggtgacactgaaaggcttgatcgagcctattagtatgatcgtaccacgaagatccgactcctaccaggaggatatctatcctatgaccccgggaaccgaaccagcactgaccccagacgaatggctcggtgggatcaaccgggatcccgtcctcatgtcactgaaagagggatataaaaagagttctaagatggtgtttaaggctccgatcaaggaaaagaaaagcgtcgtggtcaacgggattgatttgctggagaacgtgccgccaaggaccgaaaacgagctcttgagaatgttctttcgtcagcaggatgagatcaggagactgaaagaggagttggctcagaaggacattaggatccgccagctgcaactcgaactgaaaaacctccggaactcccccaagaactgctag

SEQ ID NO: 161762 - DNA, 1443 bp, Artificial Sequence
  derived and/or modified sequence
atgactgtcactaaaatgtcttggcgcccacagtacagatcaagtaagttcagaaatgtgtatgggaaggtcgccaaccgagaacactgtttcgacggcatacccataacgaaaaatgtccatgacaaccacttctgcgcagttaataccaggttcctggccatagtgaccgagagtgccggtggaggatcgtttctggtcatcccacttgagcagaccggaagaattgaaccgaactatcccaaagtctgcggacaccaaggcaacgtgctggacatcaagtggaaccctttcatcgataatataatagcttcctgtagcgaagatacctccgtcaggatctgggagatcccagaggggggcctgaagcggaatatgacagaggcattgctggaactgcatggtcatagccggagagtgggcctggtagaatggcaccctacaaccaataacattctcttctctgcagggtacgactataaggtcctcatatggaatctcgacgtgggcgaacccgtcaaaatgatcgactgccacaccgacgtgattctgtgcatgtcatttaataccgatggaagcctgctgactactacatgcaaggacaagaagttaagggtgatagaacctaggagtggacgggtactacaagaagccaattgcaagaatcatcgcgtgaaccgcgtggtgttcctggggaacatgaaaagactgctcaccactggagtgtccaggtggaacaccagacagattgcactgtgggatcaggaagacctgtcaatgcccctgatcgaagaggaaatcgacggacttagtgggctgctttttcccttttacgatgccgatactcatatgctctatctggctgggaaaggtgatggcaacattagatactatgagattagtaccgaaaagccttacctgtcatacctgatggagttccgatcccccgcgccccagaaggggctcggagttatgccaaaacatgggctcgacgttagtgcgtgcgaggtctttagattctacaagttagttactctaaaaggcttgatcgagccaatctccatgatcgtccctcggaggagtgacagctatcaggaggacatttaccccatgacgcccggtactgaacctgcattgacaccagatgagtggcttgggggcattaaccgggaccccgtattgatgagtctgaaggagggttacaaaaagtcctcaaagatggtctttaaagcccctattaaagaaaagaaaagtgtggtagtcaatggaatcgatctgcttgaaaacgtaccccctcgaaccgaaaacgaattattgagaatgttcttccggcagcaggatgagattcgcaggctgaaggaggagctggcgcagaaagatattcggatccgccagctgcaactggagcttaaaaatctcaggaacagcccaaagaactgctag

SEQ ID NO: 161763 - DNA, 1443 bp, Artificial Sequence
  derived and/or modified sequence
atgacagtgaccaagatgtcctggaggccccagtaccgcagcagcaagttcagaaatgtgtatggcaaggtggccaaccgggagcactgctttgatggcatccccatcaccaagaatgtgcatgacaaccacttctgtgctgtgaacacccgcttcctggccatcgtgacagaatctgctgggggcggcagcttcctggtgatccccctggagcagacaggccgcatcgagcccaactaccccaaggtgtgtggccaccagggcaatgtgctggacatcaagtggaaccccttcatcgacaacatcatcgccagctgcagcgaggacacctctgtgcgcatctgggagatccctgagggcggcctgaagaggaacatgacagaggccctgctggagctgcacggccacagccggcgggtgggcctggtggagtggcaccccaccaccaacaacatcctcttctctgctggctatgactacaaggtgctgatctggaacctggatgtgggggagcctgtgaagatgattgactgccacacagatgtgatcctgtgcatgtccttcaacacagatggcagcctgctgaccaccacctgcaaggacaagaagctgcgggtgattgagcccaggagcggccgggtgctgcaggaggccaactgcaagaaccaccgggtgaacagagtggtgttcctgggcaacatgaagaggctgctgaccaccggggtgagccgctggaacacccggcagatcgccctgtgggaccaggaggacctgtccatgcccctgattgaggaggagattgatggcctgagcggcctgctcttccccttctatgatgctgacacccacatgctgtacctggccgggaaaggagatggcaacatccgctactatgagatcagcacagagaagccctacctgagctacctgatggagttccgcagccctgccccccagaagggcctgggcgtgatgcccaagcacggcctggatgtgtctgcctgtgaggtgttccgcttctacaagctggtgaccctgaagggcctcatcgagcccatctccatgattgtgcccaggagaagtgacagctaccaggaggacatctaccccatgaccccaggcacagagcccgccctgaccccagatgagtggctgggcggcatcaacagagatcctgtgctgatgagcctgaaggagggctacaagaagagcagcaagatggtgttcaaggcccccatcaaggagaagaagtctgtggtggtgaatggcatcgacctgctggagaatgtgccccccaggacagaaaatgagctgctgaggatgttcttccggcagcaggatgagatccggcggctgaaggaggagctggcccagaaggacatccgcatccggcagctgcagctggagctgaagaacctgaggaacagccccaagaactgctag

SEQ ID NO: 161764 - DNA, 1443 bp, Artificial Sequence
  derived and/or modified sequence
atgaccgtgaccaagatgagctggcggccccagtaccggagcagcaaattcagaaacgtttacggcaaagtcgccaatagggaacattgtttcgatggcattccaatcaccaagaacgtccacgataaccacttttgcgctgtgaacacacgttttctggccatcgtgacggagtcggctggtgggggatcctttctggtaattccccttgaacaaacaggtcgcattgaacccaattacccgaaagtttgcggccaccaaggcaatgttctggacattaaatggaacccctttattgacaatattattgctagctgttccgaagacacctcagtgaggatttgggaaatacctgagggcggacttaagagaaacatgacagaagccctgctggagttgcatggccactctcgccgagttgggttggtggagtggcaccccactactaataatatcttattcagcgcaggctacgattacaaagtactcatttggaacctcgacgtaggcgagccagtcaagatgatagactgtcatactgacgtgatcctctgtatgtcttttaatacagatggctccctgctgactaccacctgtaaggacaagaagttgagagtgattgaaccacgtagcggcagggtgctgcaagaagctaattgcaaaaatcacagagtcaatcgagtggtgtttctgggaaatatgaagcggctgcttaccacaggagtatctagatggaacacgagacagatcgctctttgggatcaggaagacctgtctatgccactgattgaggaggagatcgatggattgtccggacttttattccctttctatgatgcagacacacacatgctgtatctggccgggaagggggacgggaacatccggtactacgaaatctccaccgagaagccctacctgtcttatctgatggaatttaggagccccgcccctcagaaaggcttgggtgtgatgcctaagcacggactggatgtgagtgcctgtgaagtattccgcttctacaagctggtgacactcaaggggcttatcgagccgatttccatgattgtgcctcggcgctccgactcttaccaggaagacatatatcccatgacacctggcacagagcccgcattgacgccagacgaatggctgggtggcatcaatagggatccagtactgatgagcctgaaggagggctataaaaagtctagcaaaatggtctttaaagctccaataaaggaaaaaaagagcgtagtggttaatggaatcgatctactggagaacgtccctccccgaactgagaacgaactgctgcggatgtttttccggcaacaggacgagattaggaggctgaaggaagagctggcccaaaaggatattcgtatccgtcagttgcagctcgagcttaaaaatctaagaaactcccctaagaactgttag

SEQ ID NO: 161765 - DNA, 1443 bp, Artificial Sequence
  derived and/or modified sequence
atgaccgtgaccaagatgagctggcggccccagtaccggagcagcaagttcaggaatgtgtacgggaaagtcgcgaatcgcgagcattgttttgacggaatccctatcactaaaaacgtgcatgataatcatttttgcgctgtaaataccaggtttctagccatcgtgacagaatccgcaggtggcgggagtttccttgtaatccctctagaacagactggtcgcatagagccaaattaccccaaggtctgcgggcatcaggggaacgtgctggatattaagtggaatcccttcattgataacatcatcgcatcatgctcagaggatacctccgtccgaatttgggaaattccagaaggcggtttaaagaggaacatgactgaggcactgcttgagttacatggccattccagacgcgtggggctcgtggagtggcatccaacaacgaacaacatactgtttagtgcaggctatgattataaagttctaatatggaatctcgacgtgggggagccagtgaagatgatagattgccacacagacgtaattctgtgtatgagcttcaacaccgacgggtcactgttgaccacaacctgcaaagataaaaagctccgcgtgatagaaccccggtccggaagagttctacaggaagccaactgcaaaaatcaccgggtgaatagagtggtatttctgggcaatatgaagcgtctcctaacgaccggagtttcacggtggaacacacgacagatcgccctctgggaccaggaagatctgtccatgcctctgatagaagaggagatcgacggcctgagtggcttgctgttcccattctacgacgcagatacccatatgctgtacctggcaggtaagggagacgggaacataagatactacgagatcagcacagaaaaaccatatctgtcttatctgatggaattcagaagcccggccccccagaaggggctgggtgtcatgcccaaacatgggcttgacgttagtgcctgtgaggtgtttaggttctataaactggtcacgctcaaaggccttatagaaccaataagtatgattgttcctcgacgctccgatagctatcaggaggacatctaccccatgacccccgggaccgaacccgcactaacaccggacgagtggctaggtgggatcaaccgggacccagtgctcatgagtctgaaggagggttacaaaaaatccagtaagatggtctttaaggctccaatcaaggaaaaaaaatccgtcgtcgtgaacggaatcgatctcctagaaaacgtacccccaaggaccgaaaacgaacttctgagaatgtttttcagacagcaggacgagatccggaggttgaaggaggaactagcccagaaggatataaggatcagacagctgcagctggagctgaaaaatcttcgcaactctcccaagaactgctag

SEQ ID NO: 161766 - DNA, 1443 bp, Artificial Sequence
  derived and/or modified sequence
atgacagtcacaaagatgtcatggcgccctcagtatagaagctccaagttccgcaacgtgtatggcaaagtggccaatagggagcattgcttcgatggaatcccgattaccaaaaatgttcatgacaatcatttctgtgctgtgaacaccaggtttctggccattgtcacagaaagtgccggtggcggtagttttctggtgattcccctcgagcagacgggcagaatcgaacctaattacccgaaagtctgcggtcaccagggaaacgttctcgacattaagtggaacccatttattgataatatcatagcctcttgttccgaggatacgtcggtgcgaatatgggaaatacccgagggcggactcaagcgcaacatgaccgaagccctgctcgaacttcacggccattccagaagggttgggctggttgaatggcatccaactacaaacaatatcctgttttctgccggttacgactataaagtgcttatttggaatctcgatgtcggcgaacctgtcaagatgattgattgccatacagatgttatcttgtgcatgagctttaataccgacggcagcctcctcactactacttgtaaggataaaaaactgcgcgtgatcgagccaagatctggcagagtgctgcaggaggccaattgcaagaaccatcgagtaaaccgtgttgtgtttttaggaaatatgaagcgactgctgaccactggcgtttcccgatggaataccagacagatcgctctctgggaccaggaggacctcagtatgccattgattgaagaggagatcgacggcctgtcaggtctcctctttccattttacgatgcggatacccacatgttatacttagcaggtaagggagacggtaacatccgttactatgaaatttcaaccgaaaagccctatctttcatacctaatggaattccggagtccagccccacagaaaggactgggcgtgatgccaaagcacggcctggatgtgtctgcatgcgaagtatttcggttttataagcttgtgaccctcaaaggcctaatcgagccaatctccatgattgtgcctcgccgttccgatagctatcaggaagacatttatcccatgacacccggaactgaacctgctctcactcctgatgagtggctggggggaattaatcgagatccagtgcttatgagtttaaaggagggctacaagaagtcctccaagatggtatttaaggctcctattaaggagaaaaagagtgtcgttgtgaatggcatcgatctgctggaaaacgttccacctagaacagagaatgagctgttgagaatgttctttagacagcaggatgagatacgcagactgaaagaggaattggcccagaaggatatccgcatacgacagttgcagttagaattaaaaaatctacgcaactcgcccaagaattgctag

SEQ ID NO: 161767 - DNA, 1443 bp, Artificial Sequence
  derived and/or modified sequence
atgacggttaccaagatgtcctggagaccccaatacaggtcgagcaagttcagaaatgtatacgggaaagtggctaatagagagcactgctttgatggaatcccaattacgaaaaacgtgcacgacaatcacttctgtgcagtgaatactcgcttcctcgccattgtgactgaatctgcgggtgggggttcatttctggttatcccgctagaacagacagggagaattgagcccaactacccaaaagtatgcgggcaccagggaaatgtcctcgatatcaagtggaacccgttcatcgacaacataatcgcttcctgttccgaggacacctctgttaggatctgggaaattcctgaggggggtttgaaacgcaacatgaccgaggctctactagagctgcacggccactcgcgcagagtcggattagtggagtggcatcccactacaaataatattttgttcagtgcgggatacgattacaaggtgcttatctggaacctggacgtcggcgaaccggtgaaaatgattgattgccacactgacgtgattctgtgtatgtcttttaatacagacgggtcactgttgacaaccacgtgtaaagacaagaaactgcgtgtgattgagccaaggtccggtagggttctgcaagaagccaattgcaagaaccacagggtcaatagggtggtgtttttaggaaacatgaaaagactgctaacgacgggtgtttctcggtggaatacgagacagatagcactgtgggaccaggaagatctgagcatgccactgatcgaagaggagatcgatgggctgtccgggttgctatttcccttttacgatgcggatacacacatgttatacctggccggaaagggcgacggtaatattcggtactacgaaatctcaactgagaagccctatttgtcttacctgatggagtttcgcagcccagccccacagaaggggttgggcgtcatgccgaagcatgggctcgacgtctccgcctgcgaggtgttccgtttctacaagctggtaacactcaaggggctgattgaacccatcagcatgatcgtccctcgcagaagcgatagctatcaggaggacatttaccccatgaccccgggtaccgagcccgctctgactcctgacgagtggttggggggtatcaatagagaccccgtcctgatgtccctcaaggaggggtataagaaatcaagtaaaatggtgttcaaagcccctatcaaagaaaagaaaagtgtcgtggtgaacggcatagacctgcttgagaatgtgccccctcgtacggagaacgaactattacggatgttcttcaggcagcaggacgaaattcgcaggctgaaggaagaactcgcacagaaggacatccgcatccggcagctccagctggagcttaaaaacttacgtaactctcctaaaaactgctag

SEQ ID NO: 161768 - DNA, 3301 bp, Artificial Sequence
  derived and/or modified sequence
gcgcccccgctccgccgcggagtttctgcatgactgtcacaaagatgtcctggcgtccgcaataccgtagctccaagttccggaatgtctacgggaaggtggccaaccgggagcactgcttcgatgggatccccatcaccaagaatgtgcacgacaaccacttctgtgccgtcaacacccgcttcctggccatcgtcaccgagagcgcagggggcggctccttcctcgtcatccccctggagcagacaggcaggattgaacccaactaccccaaggtctgcggccaccagggcaatgtgctggatatcaaatggaaccccttcatcgacaacatcattgcctcgtgctcggaggacacgtcggtgcggatctgggagatccccgagggcgggctgaagcggaacatgacggaggcgctcctggagctgcacgggcacagccggcgtgtggggctggtcgagtggcaccccaccaccaacaacatcctgttcagcgctggctacgactacaaggtcctcatctggaacctggatgtgggtgagccggtgaagatgattgactgccacacggatgtgatcctctgcatgtccttcaacacggacggcagcctgctcaccaccacgtgcaaggacaagaagctgcgtgtgattgagccccgctctggccgtgttctgcaggaggccaactgcaaaaaccacagagtgaaccgggtggtgttcctggggaacatgaagcggctcctcacgacaggggtctccaggtggaacacaagacagattgccctctgggaccaggaggacctctccatgcccctgatcgaagaggaaattgatgggctctctggcctcctgttccccttctatgatgctgacacccacatgctctacctggctggaaagggtgatggaaacatccggtactacgagatcagcactgagaagccctacctgagttacctcatggagttccgctccccagccccgcagaaaggcctaggggtcatgcccaagcacgggctggatgtgtcagcctgcgaggtgttccgcttctacaagctggtgactctcaagggcctgatcgagcccatctccatgatcgtgccccggaggtcagattcctaccaggaagacatttacccaatgacaccaggcacggagccagcactgaccccggatgaatggctgggaggcatcaaccgagatcccgtgctgatgtctttgaaagaaggctataagaagtcctcaaaaatggtatttaaggctcccatcaaagaaaagaagagtgttgtggtcaacggaatagatttattagaaaatgtcccacccaggacagagaatgagctccttcgaatgttcttccggcagcaggatgagattcgacggttgaaagaggagctggcccagaaggacatccgcattcggcagctccagctggaactgaaaaacttgcgcaacagccccaagaactgttagctccccagctgggctgttttctaagccgatctctccgtcgtttctactcatcccttaacttctcccttaccagtgaccccagagacagagccaggacaggagtgggggccagcctgaggacccccgcctaccacctcgagaactggaagccaacctctaacctcctgacctcatgctaataaaagtccccagcttctggagaccccctgccggcagcccctttccctgccaccccaggagccaggcttcccctcagctgggtgaagactacagactccctggggttggcaggggctccatctcagtggaccaggaagcaagaggggaagcgggatcccagctagacttagaacttggacttttcccctgtgaagggggctgccaggacatctcagcactcccgcctggagctctcagcatcactgaaggtaccacagtgtaagtgctggactgcaggctgcagtgatccctctttcgtcccaccccctcttccctcagcagccccggaagcctgcctcacccgacgaggacagcgagcggcccggctcctttctgtctcttcccttcccaccctcttgtcttcagggaattcagaggattgctctccaaggccataatgaccccttgccttccccatgattctctacaaagctcttgcacacccttttcccattcaatttgtgagccaggcagggtagggattagtgtccccctttgacaaatgacagaactgagggttgcaatggggaaatgacttataaagtcacccagcaggtcaacaatgggcccacgaccaagaccctgggtgttcagaccccaaggccagggcctttcccgctgcatcaagatgccaatccctttgtgggcttcaccagtgcccaagtctctatggagaatgagaactggaagccactgctaccgtctacccagcaccagtagtgccgatgtgccacactgcccagttgaggcccctcacgctctgtgcccctagatccttcaggtccccaccctcagctgtcaccaccaccctccccaggggactccatctgagatgaggcctcgtcctcctggaagctgaggctgagaagggtggagcttggccctggggaaggcagaccagggtctgatggcttctagggatgctctgcgtgtgtctcagcaccgctatctcagccactttcagccttatgcacgtagaatgaccacagccactcgcatccgtatagcactttaaagtttctgcagtcctttgacacataggatctcatggagcctcacgtctactcccttctgcagatgaggaaaccgagagaagtggcccaaggtcacgcaactctgagatgccacatttcatttgatcttgtacacattttcttttattccttcttttttcctcctttcatttcccactacgcacaaagagtttataaacactgttctcagaagagtcacagtttggggtgagatctggaaatcaagaaatgggtgtccactcttttctttcattagctaggatctactagatgcattatactccatacctgcttttcccatggccgccctacggaaaatcccatccacagaggccagggctacccaagcccctccaggtgagctgggcctttcctttatgaacctccatcctcccagccagctacagtagggcctcctcaccccgtaccccacagctagacagtgtcagcactcatctcctcctcccacatttctggagcttttttttttccttccccattgacctttgtggtcttctgtgattatttatgctgcctcccaaggatagaattgaaataaaatgttttcaacttatc

SEQ ID NO: 161769 - DNA, 3569 bp, Artificial Sequence
  derived and/or modified sequence
cgggccctctccctctctccctttcttcctgcctcgccttcctgcggcgaaggaggctcatctattataaatgcacattcggggctgacatcagcgacgagcggcgggcgagcgccgacgagcggtccctgcgcgctgcccgcccggagcgcagcccccaggctcggccgagccgccggcggggcgcggggagcgagccgggagctgccggacccccttccgccgccgccccgggccgccgccgccgcccccgcacgccgcgcccgcgcccccgctccgccgcggagtttctgcatgactgtcacaaagatgtcctggcgtccgcaataccgtagctccaagttccggaatgtctacgggaaggtggccaaccgggagcactgcttcgatgggatccccatcaccaagaatgtgcacgacaaccacttctgtgccgtcaacacccgcttcctggccatcgtcaccgagagcgcagggggcggctccttcctcgtcatccccctggagcagacaggcaggattgaacccaactaccccaaggtctgcggccaccagggcaatgtgctggatatcaaatggaaccccttcatcgacaacatcattgcctcgtgctcggaggacacgtcggtgcggatctgggagatccccgagggcgggctgaagcggaacatgacggaggcgctcctggagctgcacgggcacagccggcgtgtggggctggtcgagtggcaccccaccaccaacaacatcctgttcagcgctggctacgactacaaggtcctcatctggaacctggatgtgggtgagccggtgaagatgattgactgccacacggatgtgatcctctgcatgtccttcaacacggacggcagcctgctcaccaccacgtgcaaggacaagaagctgcgtgtgattgagccccgctctggccgtgttctgcaggaggccaactgcaaaaaccacagagtgaaccgggtggtgttcctggggaacatgaagcggctcctcacgacaggggtctccaggtggaacacaagacagattgccctctgggaccaggaggacctctccatgcccctgatcgaagaggaaattgatgggctctctggcctcctgttccccttctatgatgctgacacccacatgctctacctggctggaaagggtgatggaaacatccggtactacgagatcagcactgagaagccctacctgagttacctcatggagttccgctccccagccccgcagaaaggcctaggggtcatgcccaagcacgggctggatgtgtcagcctgcgaggtgttccgcttctacaagctggtgactctcaagggcctgatcgagcccatctccatgatcgtgccccggaggtcagattcctaccaggaagacatttacccaatgacaccaggcacggagccagcactgaccccggatgaatggctgggaggcatcaaccgagatcccgtgctgatgtctttgaaagaaggctataagaagtcctcaaaaatggtatttaaggctcccatcaaagaaaagaagagtgttgtggtcaacggaatagatttattagaaaatgtcccacccaggacagagaatgagctccttcgaatgttcttccggcagcaggatgagattcgacggttgaaagaggagctggcccagaaggacatccgcattcggcagctccagctggaactgaaaaacttgcgcaacagccccaagaactgttagctccccagctgggctgttttctaagccgatctctccgtcgtttctactcatcccttaacttctcccttaccagtgaccccagagacagagccaggacaggagtgggggccagcctgaggacccccgcctaccacctcgagaactggaagccaacctctaacctcctgacctcatgctaataaaagtccccagcttctggagaccccctgccggcagcccctttccctgccaccccaggagccaggcttcccctcagctgggtgaagactacagactccctggggttggcaggggctccatctcagtggaccaggaagcaagaggggaagcgggatcccagctagacttagaacttggacttttcccctgtgaagggggctgccaggacatctcagcactcccgcctggagctctcagcatcactgaaggtaccacagtgtaagtgctggactgcaggctgcagtgatccctctttcgtcccaccccctcttccctcagcagccccggaagcctgcctcacccgacgaggacagcgagcggcccggctcctttctgtctcttcccttcccaccctcttgtcttcagggaattcagaggattgctctccaaggccataatgaccccttgccttccccatgattctctacaaagctcttgcacacccttttcccattcaatttgtgagccaggcagggtagggattagtgtccccctttgacaaatgacagaactgagggttgcaatggggaaatgacttataaagtcacccagcaggtcaacaatgggcccacgaccaagaccctgggtgttcagaccccaaggccagggcctttcccgctgcatcaagatgccaatccctttgtgggcttcaccagtgcccaagtctctatggagaatgagaactggaagccactgctaccgtctacccagcaccagtagtgccgatgtgccacactgcccagttgaggcccctcacgctctgtgcccctagatccttcaggtccccaccctcagctgtcaccaccaccctccccaggggactccatctgagatgaggcctcgtcctcctggaagctgaggctgagaagggtggagcttggccctggggaaggcagaccagggtctgatggcttctagggatgctctgcgtgtgtctcagcaccgctatctcagccactttcagccttatgcacgtagaatgaccacagccactcgcatccgtatagcactttaaagtttctgcagtcctttgacacataggatctcatggagcctcacgtctactcccttctgcagatgaggaaaccgagagaagtggcccaaggtcacgcaactctgagatgccacatttcatttgatcttgtacacattttcttttattccttcttttttcctcctttcatttcccactacgcacaaagagtttataaacactgttctcagaagagtcacagtttggggtgagatctggaaatcaagaaatgggtgtccactcttttctttcattagctaggatctactagatgcattatactccatacctgcttttcccatggccgccctacggaaaatcccatccacagaggccagggctacccaagcccctccaggtgagctgggcctttcctttatgaacctccatcctcccagccagctacagtagggcctcctcaccccgtaccccacagctagacagtgtcagcactcatctcctcctcccacatttctggagcttttttttttccttccccattgacctttgtggtcttctgtgattatttatgctgcctcccaaggatagaattgaaataaaatgttttcaacttatcaaa

SEQ ID NO: 161770 - DNA, 1443 bp, Artificial Sequence
  derived and/or modified sequence
atgaccgtgaccaagatgagctggagaccccagtacagaagcagcaagttcagaaacgtgtacggcaaggtggccaacagagagcactgcttcgacggcatccccatcaccaagaacgtgcacgacaaccacttctgcgccgtgaacaccagattcctggccatcgtgaccgagagcgccggcggcggcagcttcctggtgatccccctggagcagaccggcagaatcgagcccaactaccccaaggtgtgcggccaccagggcaacgtgctggacatcaagtggaaccccttcatcgacaacatcatcgccagctgcagcgaggacaccagcgtgagaatctgggagatccccgagggcggcctgaagagaaacatgaccgaggccctgctggagctgcacggccacagcagaagagtgggcctggtggagtggcaccccaccaccaacaacatcctgttcagcgccggctacgactacaaggtgctgatctggaacctggacgtgggcgagcccgtgaagatgatcgactgccacaccgacgtgatcctgtgcatgagcttcaacaccgacggcagcctgctgaccaccacctgcaaggacaagaagctgagagtgatcgagcccagaagcggcagagtgctgcaggaggccaactgcaagaaccacagagtgaacagagtggtgttcctgggcaacatgaagagactgctgaccaccggcgtgagcagatggaacaccagacagatcgccctgtgggaccaggaggacctgagcatgcccctgatcgaggaggagatcgacggcctgagcggcctgctgttccccttctacgacgccgacacccacatgctgtacctggccggcaagggcgacggcaacatcagatactacgagatcagcaccgagaagccctacctgagctacctgatggagttcagaagccccgccccccagaagggcctgggcgtgatgcccaagcacggcctggacgtgagcgcctgcgaggtgttcagattctacaagctggtgaccctgaagggcctgatcgagcccatcagcatgatcgtgcccagaagaagcgacagctaccaggaggacatctaccccatgacccccggcaccgagcccgccctgacccccgacgagtggctgggcggcatcaacagagaccccgtgctgatgagcctgaaggagggctacaagaagagcagcaagatggtgttcaaggcccccatcaaggagaagaagagcgtggtggtgaacggcatcgacctgctggagaacgtgccccccagaaccgagaacgagctgctgagaatgttcttcagacagcaggacgagatcagaagactgaaggaggagctggcccagaaggacatcagaatcagacagctgcagctggagctgaagaacctgagaaacagccccaagaactgctag

SEQ ID NO: 161771 - protein, 953 aa, Artificial Sequence
  derived and/or modified sequence
MEEQGHSEMEIIPSESHPHIQLLKSNRELLVTHIRNTQCLVDNLLKNDYFSAEDAEIVCACPTQPDKVRKILDLVQSKGEEVSEFFLYLLQQLADAYVDLRPWLLEIGFSPSLLTQSKVVVNTDPVSRYTQQLRHHLGRDSKFVLCYAQKEELLLEEIYMDTIMELVGFSNESLGSLNSLACLLDHTTGILNEQGETIFILGDAGVGKSMLLQRLQSLWATGRLDAGVKFFFHFRCRMFSCFKESDRLCLQDLLFKHYCYPERDPEEVFAFLLRFPHVALFTFDGLDELHSDLDLSRVPDSSCPWEPAHPLVLLANLLSGKLLKGASKLLTARTGIEVPRQFLRKKVLLRGFSPSHLRAYARRMFPERALQDRLLSQLEANPNLCSLCSVPLFCWIIFRCFQHFRAAFEGSPQLPDCTMTLTDVFLLVTEVHLNRMQPSSLVQRNTRSPVETLHAGRDTLCSLGQVAHRGMEKSLFVFTQEEVQASGLQERDMQLGFLRALPELGPGGDQQSYEFFHLTLQAFFTAFFLVLDDRVGTQELLRFFQEWMPPAGAATTSCYPPFLPFQCLQGSGPAREDLFKNKDHFQFTNLFLCGLLSKAKQKLLRHLVPAAALRRKRKALWAHLFSSLRGYLKSLPRVQVESFNQVQAMPTFIWMLRCIYETQSQKVGQLAARGICANYLKLTYCNACSADCSALSFVLHHFPKRLALDLDNNNLNDYGVRELQPCFSRLTVLRLSVNQITDGGVKVLSEELTKYKIVTYLGLYNNQITDVGARYVTKILDECKGLTHLKLGKNKITSEGGKYLALAVKNSKSISEVGMWGNQVGDEGAKAFAEALRNHPSLTTLSLASNGISTEGGKSLARALQQNTSLEILWLTQNELNDEVAESLAEMLKVNQTLKHLWLIQNQITAKGTAQLADALQSNTGITEICLNGNLIKPEEAKVYEDEKRIICF

SEQ ID NO: 161772 - DNA, 138 bp, Artificial Sequence
  derived and/or modified sequence
atggaggagcagggccacagcgagatggagatcatccccagcgagagccacccccacatccagctgctgaagagcaacagagagctgctggtgacccacatcagaaacacccagtgcctggtggacaacctgctgtag

SEQ ID NO: 161773 - DNA, 138 bp, Artificial Sequence
  derived and/or modified sequence
atggaggagcaggggcatagtgagatggagattattcctagtgaaagtcacccacatatacagctgctcaagagcaaccgagagttgcttgtgacccacataagaaatacacaatgcctcgttgacaacttgctgtag

SEQ ID NO: 161774 - DNA, 138 bp, Artificial Sequence
  derived and/or modified sequence
atggaggagcagggccacagcgagatggagatcatccccagcgagagccacccccacatccagctgctgaagagcaaccgggagctgctggtgacccacatccggaacacccagtgcctggtggacaacctgctgtag

SEQ ID NO: 161775 - DNA, 138 bp, Artificial Sequence
  derived and/or modified sequence
atggaggagcagggccacagcgagatggagatcatccccagcgagtcgcatccccatattcagctgctgaagagtaatagagagctgctggttactcacatcagaaatacacagtgcctggtggacaacttgctctag

SEQ ID NO: 161776 - DNA, 4499 bp, Artificial Sequence
  derived and/or modified sequence
cccgttccgggcccgcgaggcagccgccccggtcctgcccctccctcgcgctactgcgggagcagcgtcctcccgggccacggcgcttcccggccccggcgtccccggaccatggcgctctccgggctcttctctagctctcagcggctgcgaagtctgtaaacctggtggccaagtgattgtaagtcaggagactttccttcggtttctgcctttgatggcaagaggtggagattgtggcggcgattacagaaaacatctgggaagacaagttgctgtttttatgggaatcgcaggcttggaagagacagaagcaattccagaaataaattggaaattgaagatttaaacaatgttgttttaaaatattctaacttcaaagaatgatgccagaaacttaaaaaggggctgcgcagagtagcaggggccctggagggcgcggcctgaatcctgattgcccttctgctgagaggacacacgcagctgaagatgaatttgggaaaagtagccgcttgctactttaactatggaagagcagggccacagtgagatggaaataatcccatcagagtctcacccccacattcaattactgaaaagcaatcgggaacttctggtcactcacatccgcaatactcagtgtctggtggacaacttgctgaagaatgactacttctcggccgaagatgcggagattgtgtgtgcctgccccacccagcctgacaaggtccgcaaaattctggacctggtacagagcaagggcgaggaggtgtccgagttcttcctctacttgctccagcaactcgcagatgcctacgtggacctcaggccttggctgctggagatcggcttctccccttccctgctcactcagagcaaagtcgtggtcaacactgacccagtgagcaggtatacccagcagctgcgacaccatctgggccgtgactccaagttcgtgctgtgctatgcccagaaggaggagctgctgctggaggagatctacatggacaccatcatggagctggttggcttcagcaatgagagcctgggcagcctgaacagcctggcctgcctcctggaccacaccaccggcatcctcaatgagcagggtgagaccatcttcatcctgggtgatgctggggtgggcaagtccatgctgctacagcggctgcagagcctctgggccacgggccggctagacgcaggggtcaaattcttcttccactttcgctgccgcatgttcagctgcttcaaggaaagtgacaggctgtgtctgcaggacctgctcttcaagcactactgctacccagagcgggaccccgaggaggtgtttgccttcctgctgcgcttcccccacgtggccctcttcaccttcgatggcctggacgagctgcactcggacttggacctgagccgcgtgcctgacagctcctgcccctgggagcctgcccaccccctggtcttgctggccaacctgctcagtgggaagctgctcaagggggctagcaagctgctcacagcccgcacaggcatcgaggtcccgcgccagttcctgcggaagaaggtgcttctccggggcttctcccccagccacctgcgcgcctatgccaggaggatgttccccgagcgggccctgcaggaccgcctgctgagccagctggaggccaaccccaacctctgcagcctgtgctctgtgcccctcttctgctggatcatcttccggtgcttccagcacttccgtgctgcctttgaaggctcaccacagctgcccgactgcacgatgaccctgacagatgtcttcctcctggtcactgaggtccatctgaacaggatgcagcccagcagcctggtgcagcggaacacacgcagcccagtggagaccctccacgccggccgggacactctgtgctcgctggggcaggtggcccaccggggcatggagaagagcctctttgtcttcacccaggaggaggtgcaggcctccgggctgcaggagagagacatgcagctgggcttcctgcgggctttgccggagctgggccccgggggtgaccagcagtcctatgagtttttccacctcaccctccaggccttctttacagccttcttcctcgtgctggacgacagggtgggcactcaggagctgctcaggttcttccaggagtggatgccccctgcgggggcagcgaccacgtcctgctatcctcccttcctcccgttccagtgcctgcagggcagtggtccggcgcgggaagacctcttcaagaacaaggatcacttccagttcaccaacctcttcctgtgcgggctgttgtccaaagccaaacagaaactcctgcggcatctggtgcccgcggcagccctgaggagaaagcgcaaggccctgtgggcacacctgttttccagcctgcggggctacctgaagagcctgccccgcgttcaggtcgaaagcttcaaccaggtgcaggccatgcccacgttcatctggatgctgcgctgcatctacgagacacagagccagaaggtggggcagctggcggccaggggcatctgcgccaactacctcaagctgacctactgcaacgcctgctcggccgactgcagcgccctctccttcgtcctgcatcacttccccaagcggctggccctagacctagacaacaacaatctcaacgactacggcgtgcgggagctgcagccctgcttcagccgcctcactgttctcagactcagcgtaaaccagatcactgacggtggggtaaaggtgctaagcgaagagctgaccaaatacaaaattgtgacctatttgggtttatacaacaaccagatcaccgatgtcggagccaggtacgtcaccaaaatcctggatgaatgcaaaggcctcacgcatcttaaactgggaaaaaacaaaataacaagtgaaggagggaagtatctcgccctggctgtgaagaacagcaaatcaatctctgaggttgggatgtggggcaatcaagttggggatgaaggagcaaaagccttcgcagaggctctgcggaaccaccccagcttgaccaccctgagtcttgcgtccaacggcatctccacagaaggaggaaagagccttgcgagggccctgcagcagaacacgtctctagaaatactgtggctgacccaaaatgaactcaacgatgaagtggcagagagtttggcagaaatgttgaaagtcaaccagacgttaaagcatttatggcttatccagaatcagatcacagctaaggggactgcccagctggcagatgcgttacagagcaacactggcataacagagatttgcctaaatggaaacctgataaaaccagaggaggccaaagtctatgaagatgagaagcggattatctgtttctgagaggatgctttcctgttcatggggtttttgccctggagcctcagcagcaaatgccactctgggcagtcttttgtgtcagtgtcttaaaggggcctgcgcaggcgggactatcaggagtccactgcctccatgatgcaagccagcttcctgtgcagaaggtctggtcggcaaactccctaagtacccgctacaattctgcagaaaaagaatgtgtcttgcgagctgttgtagttacagtaaatacactgtgaagagactttattgcctattataattatttttatctgaagctagaggaataaagctgtgagcaaacagaggaggccagcctcacctcattccaacacctgccatagggaccaacgggagcgagttggtcaccgctcttttcattgaagagttgaggatgtggcacaaagttggtgccaagcttcttgaataaaacgtgtttgatggattagtattatacctgaaatattttcttccttctcagcactttcccatgtattgatactggtcccacttcacagctggagacaccggagtatgtgcagtgtgggatttgactcctccaaggttttgtggaaagttaatgtcaaggaaaggatgcaccacgggcttttaattttaatcctggagtctcactgtctgctggcaaagatagagaatgccctcagctcttagctggtctaagaatgacgatgccttcaaaatgctgcttccactcagggcttctcctctgctaggctaccctcctctagaaggctgagtaccatgggctacagtgtctggccttgggaagaagtgattctgtccctccaaagaaatagggcatggcttgcccctgtggccctggcatccaaatggctgcttttgtctcccttacctcgtgaagaggggaagtctcttcctgcctcccaagcagctgaagggtgactaaacgggcgccaagactcaggggatcggctgggaactgggccagcagagcatgttggacaccccccaccatggtgggcttgtggtggctgctccatgagggtgggggtgatactactagatcacttgtcctcttgccagctcatttgttaataaaatactgaaaacactctta

SEQ ID NO: 161777 - DNA, 1587 bp, Artificial Sequence
  derived and/or modified sequence
gcttcccggccccggcgtccccggaccatggcgctctccgggctcttctctagctctcagcggctgcgaagtctgtaaacctggtggccaagtgattgtaagtcaggagactttccttcggtttctgcctttgatggcaagaggtggagattgtggcggcgattacagaaaacatctgggaagacaagttgctgtttttatgggaatcgcaggcttggaagagacagaagcaattccagaaataaattggaaattgaagatttaaacaatgttgttttaaaatattctaacttcaaagaatgatgccagaaacttaaaaaggggctgcgcagagtagcaggggccctggagggcgcggcctgaatcctgattgcccttctgctgagaggacacacgcagctgaagatgaatttgggaaaagtagccgcttgctactttaactatggaagagcagggccacagtgagatggaaataatcccatcagagtctcacccccacattcaattactgaaaagcaatcgggaacttctggtcactcacatccgcaatactcagtgtctggtggacaacttgctgaagaatgactacttctcggccgaagatgcggagattgtgtgtgcctgccccacccagcctgacaaggtccgcaaaattctggacctggtacagagcaagggcgaggaggtgtccgagttcttcctctacttgctccagcaactcgcagatgcctacgtggacctcaggccttggctgctggagatcggcttctccccttccctgctcactcagagcaaagtcgtggtcaacactgacccagtgagcaggtatacccagcagctgcgacaccatctgggccgtgactccaagttcgtgctgtgctatgcccagaaggaggagctgctgctggaggagatctacatggacaccatcatggagctggttggcttcagcaatgagagcctgggcagcctgaacagcctggcctgcctcctggaccacaccaccggcatcctcaatgagcaggctgcttcaaggaaagtgacaggctgtgtctgcaggacctgctcttcaagcactactgctacccagagcgggaccccgaggaggtgtttgccttcctgctgcgcttcccccacgtggccctcttcaccttcgatggcctggacgagctgcactcggacttggacctgagccgcgtgcctgacagctcctgcccctgggagcctgcccaccccctggtcttgctggccaacctgctcagtgggaagctgctcaagggggctagcaagctgctcacagcccgcacaggcatcgaggtcccgcgccagttcctgcggaagaaggtgcttctccggggcttctcccccagccacctgcgcgcctatgccaggaggatgttccccgagcgggccctgcaggaccgcctgctgagccagctggaggccaaccccaacctctgcagcctgtgctctgtgcccctcttctgctggatcatcttccggtgcttccagcacttccgtgctgcctttgaaggctcaccacagctgcccgactgcacgatgaccctgacagatgtcttcctcctg

SEQ ID NO: 161778 - DNA, 138 bp, Artificial Sequence
  derived and/or modified sequence
atggaggagcaaggacactccgagatggagatcataccctctgagtctcacccacacatccaactgctgaaatccaaccgtgagcttctagtgacccacatccgaaacacacaatgtctggtggacaatttattgtag

SEQ ID NO: 161779 - DNA, 2862 bp, Artificial Sequence
  derived and/or modified sequence
atggaggagcaaggacattctgagatggaaataattccttccgagtcccacccccacattcagcttctcaagtccaaccgagaactgttagtgacgcacatacgtaatacccaatgtctagtggataacctgctcaagaacgactattttagtgcagaggacgccgagatcgtgtgtgcatgccctacgcagcccgacaaggtgagaaagattctagacctggtccaatccaaaggagaagaagtatcagagttctttctgtatctgctgcagcaattagcagatgcttacgtcgacctaaggccatggctgctggaaatcggcttctcaccctccctgttgacacagagcaaggtggtcgtgaacaccgaccccgtcagtagatacactcagcagctcaggcaccacctaggtcgcgactctaaattcgtgctgtgctatgctcagaaggaggaactgttgcttgaagagatctacatggataccattatggagctggtgggattttccaacgaatctctgggtagcttgaattcgctagcatgtctgcttgatcacacgacagggattctgaatgaacagggtgagacaatcttcatccttggcgacgccggggtgggaaaatccatgctgctgcaacgtttgcagtccctgtgggctaccggccgcttggacgcgggcgtgaagtttttctttcactttagatgcagaatgttctcttgcttcaaggagtccgaccgactttgtcttcaggatctgctgtttaagcattactgctatcctgaaagagatccagaagaagtcttcgcattcttacttcggttccctcacgtggcgctgttcacttttgacgggctcgatgagctgcactctgatctggatttatctagagtacccgactctagctgtccctgggagccggctcatccactggttctgttggccaatcttctcagtgggaagctgctcaagggggcttctaagttactaacggccaggacgggtattgaggttcccaggcagttcttgcgcaagaaggttttactaagaggattttcaccaagtcatctgcgcgcctacgcccggcgcatgttccccgagcgcgctctgcaagaccgactcctgagccaactagaggccaacccaaatctatgcagcctgtgtagtgtgccccttttctgctggataatatttaggtgcttccagcacttccgcgccgcgtttgaaggaagcccacaactgcccgattgcaccatgaccctgacggatgtgtttctgctcgtgacagaggtccatctcaaccgaatgcaaccttcgtctttggtgcagcgtaatacgaggagccccgtagaaaccttgcacgcaggacgggataccctctgttctctgggccaggtagctcatcgtggcatggaaaaatccctattcgtctttacccaggaggaagtgcaggcaagcgggcttcaggagcgagatatgcagctaggttttctcagggctttgcccgagttgggcccagggggagatcagcagtcctacgaattcttccacttaacactccaggcgttttttactgcatttttccttgtcctagatgatagggtgggcactcaggaactcctgcgattttttcaggagtggatgccaccagcaggcgccgccacaacctcctgctatccaccatttctccccttccagtgcctgcagggctccggtcctgctcgggaggacctgtttaaaaataaagatcatttccagttcaccaacctgttcctctgcggactgctatcgaaggccaagcagaagttactcagacatttggtgccggcggcagccctcaggagaaagagaaaggcactctgggcgcacctgttcagcagtttgcgggggtacttgaagagcttaccgagggtgcaggtggaaagttttaatcaggtgcaggctatgcccacctttatttggatgttacgatgcatatacgagacccagagtcaaaaggtgggccagctggccgcccggggaatatgcgctaactatctgaagttgacctattgcaacgcatgttcggctgactgcagcgcgctcagctttgttctgcatcactttccaaaacggttggccctggatctggataataataatttgaacgactacggcgtacgcgagttgcagccctgtttctcacgtctcaccgtacttcgactttcagtgaaccagattacagacggcggtgtgaaagtgttgagtgaggaattaacaaagtacaagattgttacatacctgggtctctacaataatcagatcactgacgtcggcgctcgatacgtgaccaaaatactggacgagtgcaaggggctgacccacctcaagctggggaaaaataagataacctcagaggggggcaagtacctcgcattggcggtcaaaaacagcaaaagcataagcgaggttggaatgtggggaaatcaagtgggcgacgagggagccaaagccttcgccgaggctctgagaaaccacccaagtctgaccaccttatccttagccagtaacggcatcagcaccgagggggggaaatccctggctcgggcgctgcagcagaacacatccctcgagattctatggctgactcaaaatgaattgaacgatgaggtagcggagagcctcgccgaaatgctcaaggtgaatcagactctgaaacacctttggcttatccagaaccagattactgctaaaggtacagcgcaattagccgacgctttacaatctaataccggtatcaccgaaatctgcctcaacgggaatctgattaaacctgaagaagctaaggtctacgaagatgagaagcggatcatttgcttctag

SEQ ID NO: 161780 - DNA, 2862 bp, Artificial Sequence
  derived and/or modified sequence
atggaggagcagggccacagcgagatggagatcatccccagcgagagccacccccacatccagctgctgaagagcaaccgggagctgctggtgacccacatccggaacacccagtgcctggtggacaacctgctgaagaatgactacttcagcgcagaagatgctgagatcgtgtgtgcctgccccacccagcctgacaaggtgaggaagatcctggacctggtgcagagcaagggggaggaggtgtctgagttcttcctgtacctgctgcagcagctggctgatgcctacgtggacctgcggccctggctgctggagatcggcttcagccccagcctgctgacccagagcaaggtggtggtgaacacagatcctgtgagccgctacacccagcagctgcggcaccacctgggccgggacagcaagtttgtgctgtgctacgcccagaaggaggagctgctgctggaggagatctacatggacaccatcatggagctggtgggcttcagcaatgaaagcctgggcagcctgaacagcctggcctgcctgctggaccacaccaccggcatcctgaatgagcagggcgagaccatcttcatcctgggagatgctggggtgggcaagtccatgctgctgcagaggctgcagagcctgtgggccaccggccgcctggatgctggggtgaagttcttcttccacttccgctgcaggatgttcagctgcttcaaggagagtgaccggctgtgcctgcaggacctgctcttcaagcactactgctacccagagcgggaccctgaggaggtgtttgccttcctgctgcgcttcccccacgtggccctcttcacctttgatggcctggatgagctgcacagcgacctggacctgagccgggtgcctgacagcagctgcccctgggagcccgcccaccccctggtgctgctggccaacctgctgagcggcaagctgctgaagggggccagcaagctgctgacagccaggacaggcatcgaggtgccccggcagttcctgaggaagaaggtgctgctgcggggcttcagccccagccacctgcgggcctatgcccggaggatgtttcctgagcgggccctgcaggaccggctgctgagccagctggaggccaaccccaacctgtgcagcctgtgcagcgtgcccctcttctgctggatcatcttccgctgcttccagcacttccgggccgcctttgagggcagcccccagctgcctgactgcaccatgaccctgacagatgtgttcctgctggtgacagaggtgcacctgaacaggatgcagcccagcagcctggtgcagaggaacaccaggagccctgtggagaccctgcatgctggccgggacaccctgtgcagcctgggccaggtggcccaccggggcatggagaagagcctgtttgtgttcacccaggaggaggtgcaggccagcggcctgcaggagcgggacatgcagctgggcttcctgcgggccctgcctgagctgggccctggaggagaccagcagagctatgagttcttccacctgaccctgcaggccttcttcaccgccttcttcctggtgctggatgacagagtgggcacccaggagctgctgcgcttcttccaggagtggatgcctcctgctggagctgccaccaccagctgctacccacccttcctgcccttccagtgcctgcagggcagcggccctgcccgggaggacctcttcaagaacaaggaccacttccagttcaccaacctcttcctgtgtggcctgctgagcaaggccaagcagaagctgctgcggcacctggtgcctgctgctgccctgcggaggaagaggaaggccctgtgggcccacctgttcagcagcctgcggggctacctgaagagcctgccccgggtgcaggtggagagcttcaaccaggtgcaggccatgcccaccttcatctggatgctgcgctgcatctatgagacccagagccagaaggtgggccagctggccgcccggggcatctgtgccaactacctgaagctgacctactgcaatgcctgcagcgctgactgcagcgccctgagctttgtgctgcaccacttccccaagaggctggccctggacctggacaacaacaacctgaatgactatggagtgcgggagctgcagccctgcttcagccggctgactgtgctgcggctgtctgtgaaccagatcacagatggcggcgtgaaggtgctgtctgaggagctgaccaagtacaagatcgtgacctacctgggcctgtacaacaaccagatcacagatgtgggcgcccgctacgtgaccaagatcctggatgagtgcaagggcctgacccacctgaagctgggcaagaacaagatcaccagcgagggcggcaagtacctggccctggccgtgaagaacagcaagagcatcagcgaggtgggcatgtggggcaaccaggtgggagatgagggcgccaaggcctttgctgaggccctgaggaaccaccccagcctgaccaccctgagcctggccagcaatggcatcagcacagagggcggcaagagcctggcccgggccctgcagcagaacaccagcctggagatcctgtggctgacccagaatgagctgaatgatgaggtggccgagagcctggccgagatgctgaaggtgaaccagaccctgaagcacctgtggctgatccagaaccagatcacagccaagggcacagcccagctggctgatgccctgcagagcaacacaggcatcacagagatctgcctgaatggaaacctgatcaagccagaggaggccaaggtgtatgaagatgagaagaggatcatctgcttctag

SEQ ID NO: 161781 - DNA, 2862 bp, Artificial Sequence
  derived and/or modified sequence
atggaggagcagggccacagcgagatggagatcatccccagcgagtcgcatccccacatacaactccttaagagtaacagggagttgctggtcacacatataagaaacacacagtgtttggtggacaatctgcttaagaacgattacttctcagccgaagatgcagaaattgtgtgtgcatgccctacccagccagacaaagtcaggaaaatcctggatctcgttcagtccaaaggcgaggaagtttctgaattctttctttacttgttgcaacagctggccgatgcctatgtggatctccgcccgtggctgctagagattgggtttagtcctagtttactgacgcagtccaaagtggtggttaacacagaccctgtctcccgctacactcagcagctgcgtcaccatctcgggcgagacagtaagtttgtgctctgctacgctcaaaaggaggagctactcttggaagagatttatatggataccatcatggagcttgtcgggttttctaacgaaagcctggggtctctgaacagtctcgcctgtctgctggatcataccaccggcattctgaacgagcagggcgagacaatctttatcttgggggatgccggcgttggcaagtccatgctgctgcagagacttcagtcactttgggccacgggtagacttgatgctggagtgaagttcttcttccatttcaggtgccgaatgttttcttgcttcaaggagtccgatcggctgtgtctccaggacctgctgtttaaacactactgttatcccgagcgggatcccgaagaagtatttgcgttcctgctgcgattcccacacgtagccttgtttacctttgatgggctggacgagcttcactcagatctcgatctgtcccgagtgcccgacagcagctgtccttgggagcccgcccacccgttggtcttgctggctaatctcctgagcggcaagcttctgaagggcgccagtaaactgctaacagcccgaacggggatcgaggtcccgcgccagtttctgaggaaaaaggtgctcctgaggggcttctccccttcccacttgcgagcatatgctcgacgcatgttcccagaacgagcacttcaagaccgcttgttatcccagctggaggccaacccaaatctgtgttccttgtgtagcgtgccactcttttgctggataatttttcgttgttttcaacattttcgcgccgctttcgaaggttccccccaactgcccgactgcacaatgactctcacggatgtctttcttcttgtgacagaggtccacctgaaccgtatgcagccctctagcctggtgcagaggaacacacgatcaccagttgaaaccttgcacgccggaagggacaccctctgcagcctggggcaggtggcccatagaggcatggagaaatctctgttcgtcttcacccaggaagaagttcaggccagcggcttgcaggagagagacatgcagcttggatttctgcgtgctctgccagagctgggcccaggaggggaccagcagtcttatgaatttttccatctgacgttgcaggcttttttcactgcgttcttcttagttctcgacgatagggtgggcacacaggagttactccgctttttccaagagtggatgcccccagctggggccgcaacaactagttgctatccaccgttcctcccgtttcaatgtttgcaaggttcagggccggctagggaggacctcttcaagaataaggaccatttccaattcacaaatttgtttctttgcggcttacttagcaaggccaaacaaaagctgctgcgccacctggtccccgccgccgctctgcgccgcaagcgcaaagccctgtgggctcaccttttttcctctctgcggggttatcttaagagcctgcctcgggtgcaagtcgagtcattcaatcaggttcaggcaatgcccacctttatatggatgctgcgatgtatctacgagacgcagtctcaaaaggtaggtcaattggctgcacgtggaatttgcgcgaattatcttaaacttacctactgtaatgcatgttccgctgattgttcagcattgtcctttgtgttgcatcatttcccaaaacgcctagcgctggaccttgataacaacaatctgaatgattacggggttcgggaactccagccttgcttttcacgactgaccgtgcttcgtctctctgtcaaccagataaccgacggaggggtgaaggtgttgagcgaggagctcaccaagtacaagatagtgacctacctgggcctatacaacaatcaaatcactgacgtgggcgctcgatatgtgacaaaaatcttagatgaatgcaaagggctcacacatctgaagctgggaaagaacaagattaccagtgaaggaggcaaatacctggctctcgcagtgaagaatagtaagagtatcagcgaggtcggcatgtggggaaatcaggttggagacgagggggccaaggcattcgctgaggccttgaggaaccatccatcattaaccacactgagcctggcaagtaacggcatctccaccgaggggggcaaatctctcgccagagcactccagcagaacacctccctggaaatcctgtggttaacccaaaacgaactgaatgacgaggtggccgagagcttggccgagatgctcaaggtgaaccagaccctgaagcacctgtggttaatccagaaccagattacagcaaagggcaccgcccagctggccgatgcattgcagtccaacacaggcatcaccgaaatatgcttgaacggaaacctgattaagcctgaagaagcgaaggtgtatgaagatgagaaacggattatttgtttctag

SEQ ID NO: 161782 - DNA, 2862 bp, Artificial Sequence
  derived and/or modified sequence
atggaagaacaggggcactccgaaatggaaatcattccttccgagtctcatccccacatccaactgctgaaatccaacagggagctgctggtgacccacatcagaaacacacaatgtctcgttgataacctcctcaaaaatgactatttttctgccgaagacgctgagatagtgtgtgcgtgtcccacacagccagacaaggttcgcaagattcttgacctcgtgcaaagtaaaggagaggaagtctctgagttttttttatacctacttcagcagctcgccgacgcatacgttgacttacggccatggctcctggaaattggatttagtcctagtctgctgactcagtctaaggtggtggtaaataccgatccggtgtccagatatactcagcaactccggcatcacctggggagggatagtaaattcgtcctatgctatgcccagaaggaggaacttctcctcgaggagatctacatggatactatcatggagctggtaggcttttccaatgaatctctgggctccctgaacagcctagcatgtctgctggaccatacaactggcatccttaatgagcagggtgagactattttcatcctgggggacgctggagttgggaagagtatgctgctgcagaggcttcagtctctgtgggccaccggcagacttgatgccggagttaagtttttttttcactttaggtgtcgcatgttcagttgctttaaggagagtgaccgattgtgtttacaagatctgctatttaagcattactgctaccctgagcgagatccggaagaggtgttcgcttttttgttgcgcttcccccacgttgctctgttcacatttgacggacttgacgaactgcattccgatctggatctcagcagggtgccggattcgagttgcccctgggagcccgctcaccctctagtgctgctggctaatctgctttccgggaagctgcttaaaggagctagcaagctcctgactgctagaacaggcatagaggtgccaagacagttcctgaggaagaaggtcctgctgcgtgggttctcaccttcacacctacgcgcttatgccagacggatgtttccagagagagctctgcaggaccgtctgctctcacaactcgaggctaaccctaatttgtgttccctctgtagcgttcccctcttctgctggattatttttagatgctttcagcacttccgtgccgcttttgaagggtcgccccagctacccgattgcacgatgaccctgaccgacgtgtttctgcttgtcactgaagtgcacctcaacaggatgcagccgtccagcctggtgcagcgcaacacacgcagcccagtggagaccctgcacgccggtagggataccctttgttccctggggcaagttgcgcacagaggcatggagaaatcacttttcgtgttcacacaagaagaggtgcaggcctcaggactccaggaaagggacatgcagctgggattcctgagggcactacccgagttggggccaggcggagaccagcaaagctacgagtttttccatctgactctccaggcatttttcaccgcgtttttccttgtgctagatgacagagtgggtactcaggagctgcttcgctttttccaggagtggatgccccctgcaggagctgccactacatcctgctatcctcctttcctgccttttcagtgtctccaggggtcgggacctgctcgcgaggacctctttaagaataaagaccacttccagtttaccaatttattcctctgcggactgctgtctaaggccaaacagaaattactaagacacctggtgccagccgcagccctgaggagaaagcgcaaggcgttgtgggcgcacctgttcagctcactgcgcggataccttaaatccctgcctcgggttcaggtcgagtcgttcaaccaggtgcaggctatgcctacatttatatggatgttgagatgtatctacgaaacacagtctcaaaaggtgggacagcttgctgccagggggatttgtgccaactatctcaagttgacatactgtaatgcctgtagcgccgactgctctgccctgagttttgttctgcaccactttcccaaacgactggctctagaccttgataacaacaatttaaatgactacggcgtccgggagctacagccatgctttagcaggctcactgttctgcgcctgtccgtgaaccaaatcaccgacggcggagtcaaagtgctgtcggaagagcttaccaaatacaagatagtaacctacctcggattgtataacaatcaaatcacagatgtgggagcgagatacgtgaccaagatcctggacgaatgcaagggtctgacacaccttaagcttgggaagaataagattacatctgaaggaggcaaatatcttgctctcgctgttaaaaactcaaaatccatctccgaggtggggatgtggggcaaccaggtgggtgacgaaggggcaaaagccttcgccgaagctctgcgcaaccatcccagtctgactaccctcagcctggcttccaacggcatctcgaccgaagggggaaaaagcctggccagggcactacaacagaacacatccctcgagattctctggctgactcagaatgaactgaacgatgaagtcgctgagagtttggctgagatgctgaaggtgaatcagacactgaaacacctgtggttaatccagaaccagattaccgcgaagggcaccgctcagttggccgacgcgcttcagtctaatactgggattacagaaatttgtcttaatgggaatttaatcaaaccagaggaagcgaaggtatatgaagacgaaaagcggataatttgtttctag

SEQ ID NO: 161783 - DNA, 2862 bp, Artificial Sequence
  derived and/or modified sequence
atggaggagcagggccacagcgagatggagatcatccccagcgagagccacccccacatccagctgctgaagagcaacagagagctgctggtgacccacatcagaaacacccagtgcctggtggacaacctgctgaagaacgactacttcagcgccgaggacgccgagatcgtgtgcgcctgccccacccagcccgacaaggtgagaaagatcctggacctggtgcagagcaagggcgaggaggtgagcgagttcttcctgtacctgctgcagcagctggccgacgcctacgtggacctgagaccctggctgctggagatcggcttcagccccagcctgctgacccagagcaaggtggtggtgaacaccgaccccgtgagcagatacacccagcagctgagacaccacctgggcagagacagcaagttcgtgctgtgctacgcccagaaggaggagctgctgctggaggagatctacatggacaccatcatggagctggtgggcttcagcaacgagagcctgggcagcctgaacagcctggcctgcctgctggaccacaccaccggcatcctgaacgagcagggcgagaccatcttcatcctgggcgacgccggcgtgggcaagagcatgctgctgcagagactgcagagcctgtgggccaccggcagactggacgccggcgtgaagttcttcttccacttcagatgcagaatgttcagctgcttcaaggagagcgacagactgtgcctgcaggacctgctgttcaagcactactgctaccccgagagagaccccgaggaggtgttcgccttcctgctgagattcccccacgtggccctgttcaccttcgacggcctggacgagctgcacagcgacctggacctgagcagagtgcccgacagcagctgcccctgggagcccgcccaccccctggtgctgctggccaacctgctgagcggcaagctgctgaagggcgccagcaagctgctgaccgccagaaccggcatcgaggtgcccagacagttcctgagaaagaaggtgctgctgagaggcttcagccccagccacctgagagcctacgccagaagaatgttccccgagagagccctgcaggacagactgctgagccagctggaggccaaccccaacctgtgcagcctgtgcagcgtgcccctgttctgctggatcatcttcagatgcttccagcacttcagagccgccttcgagggcagcccccagctgcccgactgcaccatgaccctgaccgacgtgttcctgctggtgaccgaggtgcacctgaacagaatgcagcccagcagcctggtgcagagaaacaccagaagccccgtggagaccctgcacgccggcagagacaccctgtgcagcctgggccaggtggcccacagaggcatggagaagagcctgttcgtgttcacccaggaggaggtgcaggccagcggcctgcaggagagagacatgcagctgggcttcctgagagccctgcccgagctgggccccggcggcgaccagcagagctacgagttcttccacctgaccctgcaggccttcttcaccgccttcttcctggtgctggacgacagagtgggcacccaggagctgctgagattcttccaggagtggatgccccccgccggcgccgccaccaccagctgctacccccccttcctgcccttccagtgcctgcagggcagcggccccgccagagaggacctgttcaagaacaaggaccacttccagttcaccaacctgttcctgtgcggcctgctgagcaaggccaagcagaagctgctgagacacctggtgcccgccgccgccctgagaagaaagagaaaggccctgtgggcccacctgttcagcagcctgagaggctacctgaagagcctgcccagagtgcaggtggagagcttcaaccaggtgcaggccatgcccaccttcatctggatgctgagatgcatctacgagacccagagccagaaggtgggccagctggccgccagaggcatctgcgccaactacctgaagctgacctactgcaacgcctgcagcgccgactgcagcgccctgagcttcgtgctgcaccacttccccaagagactggccctggacctggacaacaacaacctgaacgactacggcgtgagagagctgcagccctgcttcagcagactgaccgtgctgagactgagcgtgaaccagatcaccgacggcggcgtgaaggtgctgagcgaggagctgaccaagtacaagatcgtgacctacctgggcctgtacaacaaccagatcaccgacgtgggcgccagatacgtgaccaagatcctggacgagtgcaagggcctgacccacctgaagctgggcaagaacaagatcaccagcgagggcggcaagtacctggccctggccgtgaagaacagcaagagcatcagcgaggtgggcatgtggggcaaccaggtgggcgacgagggcgccaaggccttcgccgaggccctgagaaaccaccccagcctgaccaccctgagcctggccagcaacggcatcagcaccgagggcggcaagagcctggccagagccctgcagcagaacaccagcctggagatcctgtggctgacccagaacgagctgaacgacgaggtggccgagagcctggccgagatgctgaaggtgaaccagaccctgaagcacctgtggctgatccagaaccagatcaccgccaagggcaccgcccagctggccgacgccctgcagagcaacaccggcatcaccgagatctgcctgaacggcaacctgatcaagcccgaggaggccaaggtgtacgaggacgagaagagaatcatctgcttctag

SEQ ID NO: 161784 - protein, 1091 aa, Artificial Sequence
  derived and/or modified sequence
MCRKKPDTMILTQIEAKEACDWLRATGFPQYAQLYEDFLFPIDISLVKREHDFLDRDAIEALCRRLNTLNKCAVMKLEISPHRKRSDDSDEDEPCAISGKWTFQRDSKRWSRLEEFDVFSPKQDLVPGSPDDSHPKDGPSPGGTLMDLSERQEVSSVRSLSSTGSLPSHAPPSEDAATPRTNSVISVCSSSNLAGNDDSFGSLPSPKELSSFSFSMKGHEKTAKSKTRSLLKRMESLKLKSSHHSKHKAPSKLGLIISGPILQEGMDEEKLKQLNCVEISALNGNRINVPMVRKRSVSNSTQTSSSSSQSETSSAVSTPSPVTRTRSLSACNKRVGMYLEGFDPFNQSTFNNVVEQNFKNRESYPEDTVFYIPEDHKPGTFPKALTNGSFSPSGNNGSVNWRTGSFHGPGHISLRRENSSDSPKELKRRNSSSSMSSRLSIYDNVPGSILYSSSGDLADLENEDIFPELDDILYHVKGMQRIVNQWSEKFSDEGDSDSALDSVSPCPSSPKQIHLDVDNDRTTPSDLDSTGNSLNEPEEPSEIPERRDSGVGASLTRSNRHRLRWHSFQSSHRPSLNSVSLQINCQSVAQMNLLQKYSLLKLTALLEKYTPSNKHGFSWAVPKFMKRIKVPDYKDRSVFGVPLTVNVQRTGQPLPQSIQQAMRYLRNHCLDQVGLFRKSGVKSRIQALRQMNEGAIDCVNYEGQSAYDVADMLKQYFRDLPEPLMTNKLSETFLQIYQYVPKDQRLQAIKAAIMLLPDENREVLQTLLYFLSDVTAAVKENQMTPTNLAVCLAPSLFHLNTLKRENSSPRVMQRKQSLGKPDQKDLNENLAATQGLAHMIAECKKLFQVPEEMSRCRNSYTEQELKPLTLEALGHLGNDDSADYQHFLQDCVDGLFKEVKEKFKGWVSYSTSEQAELSYKKVSEGPPLRLWRSVIEVPAVPEEILKRLLKEQHLWDVDLLDSKVIEILDSQTEIYQYVQNSMAPHPARDYVVLRTWRTNLPKGACALLLTSVDHDRAPVVGVRVNVLLSRYLIEPCGPGKSKLTYMCRVDLRGHMPEWYTKSFGHLCAAEVVKIRDSFSNQNTETKDTKSR

SEQ ID NO: 161785 - DNA, 3276 bp, Artificial Sequence
  derived and/or modified sequence
atgtgcagaaagaagcccgacaccatgatcctgacccagatcgaggccaaggaggcctgcgactggctgagagccaccggcttcccccagtacgcccagctgtacgaggacttcctgttccccatcgacatcagcctggtgaagagagagcacgacttcctggacagagacgccatcgaggccctgtgcagaagactgaacaccctgaacaagtgcgccgtgatgaagctggagatcagcccccacagaaagagaagcgacgacagcgacgaggacgagccctgcgccatcagcggcaagtggaccttccagagagacagcaagagatggagcagactggaggagttcgacgtgttcagccccaagcaggacctggtgcccggcagccccgacgacagccaccccaaggacggccccagccccggcggcaccctgatggacctgagcgagagacaggaggtgagcagcgtgagaagcctgagcagcaccggcagcctgcccagccacgccccccccagcgaggacgccgccacccccagaaccaacagcgtgatcagcgtgtgcagcagcagcaacctggccggcaacgacgacagcttcggcagcctgcccagccccaaggagctgagcagcttcagcttcagcatgaagggccacgagaagaccgccaagagcaagaccagaagcctgctgaagagaatggagagcctgaagctgaagagcagccaccacagcaagcacaaggcccccagcaagctgggcctgatcatcagcggccccatcctgcaggagggcatggacgaggagaagctgaagcagctgaactgcgtggagatcagcgccctgaacggcaacagaatcaacgtgcccatggtgagaaagagaagcgtgagcaacagcacccagaccagcagcagcagcagccagagcgagaccagcagcgccgtgagcacccccagccccgtgaccagaaccagaagcctgagcgcctgcaacaagagagtgggcatgtacctggagggcttcgaccccttcaaccagagcaccttcaacaacgtggtggagcagaacttcaagaacagagagagctaccccgaggacaccgtgttctacatccccgaggaccacaagcccggcaccttccccaaggccctgaccaacggcagcttcagccccagcggcaacaacggcagcgtgaactggagaaccggcagcttccacggccccggccacatcagcctgagaagagagaacagcagcgacagccccaaggagctgaagagaagaaacagcagcagcagcatgagcagcagactgagcatctacgacaacgtgcccggcagcatcctgtacagcagcagcggcgacctggccgacctggagaacgaggacatcttccccgagctggacgacatcctgtaccacgtgaagggcatgcagagaatcgtgaaccagtggagcgagaagttcagcgacgagggcgacagcgacagcgccctggacagcgtgagcccctgccccagcagccccaagcagatccacctggacgtggacaacgacagaaccacccccagcgacctggacagcaccggcaacagcctgaacgagcccgaggagcccagcgagatccccgagagaagagacagcggcgtgggcgccagcctgaccagaagcaacagacacagactgagatggcacagcttccagagcagccacagacccagcctgaacagcgtgagcctgcagatcaactgccagagcgtggcccagatgaacctgctgcagaagtacagcctgctgaagctgaccgccctgctggagaagtacacccccagcaacaagcacggcttcagctgggccgtgcccaagttcatgaagagaatcaaggtgcccgactacaaggacagaagcgtgttcggcgtgcccctgaccgtgaacgtgcagagaaccggccagcccctgccccagagcatccagcaggccatgagatacctgagaaaccactgcctggaccaggtgggcctgttcagaaagagcggcgtgaagagcagaatccaggccctgagacagatgaacgagggcgccatcgactgcgtgaactacgagggccagagcgcctacgacgtggccgacatgctgaagcagtacttcagagacctgcccgagcccctgatgaccaacaagctgagcgagaccttcctgcagatctaccagtacgtgcccaaggaccagagactgcaggccatcaaggccgccatcatgctgctgcccgacgagaacagagaggtgctgcagaccctgctgtacttcctgagcgacgtgaccgccgccgtgaaggagaaccagatgacccccaccaacctggccgtgtgcctggcccccagcctgttccacctgaacaccctgaagagagagaacagcagccccagagtgatgcagagaaagcagagcctgggcaagcccgaccagaaggacctgaacgagaacctggccgccacccagggcctggcccacatgatcgccgagtgcaagaagctgttccaggtgcccgaggagatgagcagatgcagaaacagctacaccgagcaggagctgaagcccctgaccctggaggccctgggccacctgggcaacgacgacagcgccgactaccagcacttcctgcaggactgcgtggacggcctgttcaaggaggtgaaggagaagttcaagggctgggtgagctacagcaccagcgagcaggccgagctgagctacaagaaggtgagcgagggcccccccctgagactgtggagaagcgtgatcgaggtgcccgccgtgcccgaggagatcctgaagagactgctgaaggagcagcacctgtgggacgtggacctgctggacagcaaggtgatcgagatcctggacagccagaccgagatctaccagtacgtgcagaacagcatggccccccaccccgccagagactacgtggtgctgagaacctggagaaccaacctgcccaagggcgcctgcgccctgctgctgaccagcgtggaccacgacagagcccccgtggtgggcgtgagagtgaacgtgctgctgagcagatacctgatcgagccctgcggccccggcaagagcaagctgacctacatgtgcagagtggacctgagaggccacatgcccgagtggtacaccaagagcttcggccacctgtgcgccgccgaggtggtgaagatcagagacagcttcagcaaccagaacaccgagaccaaggacaccaagagcagatag

SEQ ID NO: 161786 - DNA, 4392 bp, Artificial Sequence
  derived and/or modified sequence
gaggctgcggccacgaggaagaggggcggggggcggagcctgggaatggggcggggccggagaacagcccgtcgctaaggcctgcgacccagacagcggggaggaggcggtgccgcccgctctggccccgcccctcggggggtgggcccagcgggagggcccggctggcggagcgcgcgggagacagttcgctccgactgcccgagcgagggcgcttcgctcccagccaggacatggccgcacctctccgcatcaggagcgccggctcacggacttctcgcccaactccctgagcgctccctcgtttcgatctttagaaaaccccgctttctttctggggccgtgacgaggggcagggagcggcgagcaaggatgcgttgaggaccgcgagggcgcgcgtctcgggtgccgccgtgggtcccgacgcggaagccgagccgcctccgcctgcctcgacttccccacagcgcttccgccgccgcctgccgtgcttgatgtgcagaaagaagccggacaccatgatcctaacacaaattgaagccaaggaagcttgtgattggctacgggcaactggtttcccccagtatgcacagctttatgaagatttcctgttccccatcgatatttccttggtcaagagagagcatgattttttggacagagatgccattgaggctctatgcaggcgtctaaatactttaaacaaatgtgcggtgatgaagctagaaattagtcctcatcggaaacgaagtgacgattcagacgaggatgagccttgtgccatcagtggcaaatggactttccaaagggacagcaagaggtggtcccggcttgaagagtttgatgtcttttctccaaaacaagacctggtccctgggtccccagacgactcccacccgaaggacggccccagccccggaggcacgctgatggacctcagcgagcgccaggaggtgtcttccgtccgcagcctcagcagcactggcagcctccccagccacgcgccccccagcgaggatgctgccaccccccggactaactccgtcatcagcgtttgctcctccagcaacttggcaggcaatgacgactctttcggcagcctgccctctcccaaggaactgtccagcttcagcttcagcatgaaaggccacgaaaaaactgccaagtccaagacgcgcagtctgctgaaacggatggagagcctgaagctcaagagctcccatcacagcaagcacaaagcgccctcaaagctggggttgatcatcagcgggcccatcttgcaagaggggatggatgaggagaagctgaagcagctcaactgcgtggagatctccgccctcaatggcaaccgcatcaacgtccccatggtacgaaagaggagcgtttccaactccacgcagaccagcagcagcagcagccagtcggagaccagcagcgcggtcagcacgcccagccctgttacgaggacccggagcctcagtgcgtgcaacaagcgggtgggcatgtacttagagggcttcgatcctttcaatcagtcaacatttaacaacgtggtggagcagaactttaagaaccgcgagagctacccagaggacacggtgttctacatccctgaagatcacaagcctggcactttccccaaagctctcaccaatggcagtttctccccctcggggaataacggctctgtgaactggaggacgggaagcttccacggccctggccacatcagcctcaggagggaaaacagtagcgacagccccaaggaactgaagagacgcaattcttccagctccatgagcagccgcctgagcatctacgacaacgtgccgggctccatcctctactccagttcaggggacctggcggatctggagaacgaggacatcttccccgagctggacgacatcctctaccacgtgaaggggatgcagcggatagtcaatcagtggtcggagaagttttctgatgagggagattcggactcagccctggactcggtctctccctgcccgtcctctccaaaacagatacacctggatgtggacaacgaccgaaccacacccagcgacctggacagcacaggcaactccctgaatgaaccggaagagccctccgagatcccggaaagaagggattctggggttggggcttccctaaccaggtccaacaggcaccgactgagatggcacagtttccagagctcacatcggccaagcctcaactctgtatcactacagattaactgccagtctgtggcccagatgaacctgctgcagaaatactcactcctaaagctaacggccctgctggagaaatacacaccttctaacaagcatggttttagctgggccgtgcccaagttcatgaagaggatcaaggttccagactacaaggaccggagtgtgtttggggtcccactgacggtcaacgtgcagcgcacaggacaaccgttgcctcagagcatccagcaggccatgcgatacctccggaaccattgtttggatcaggttgggctcttcagaaaatcgggggtcaagtcccggattcaggctctgcgccagatgaatgaaggtgccatagactgtgtcaactacgaaggacagtctgcttatgacgtggcagacatgctgaagcagtattttcgagatcttcctgagccactaatgacgaacaaactctcggaaacctttctacagatctaccaatatgtgcccaaggaccagcgcctgcaggccatcaaggctgccatcatgctgctgcctgacgagaaccgggaggttctgcagaccctgctttatttcctgagcgatgtcacagcagccgtaaaagaaaaccagatgaccccaaccaacctggccgtgtgcttagcgccttccctcttccatctcaacaccctgaagagagagaattcctctcccagggtaatgcaaagaaaacaaagtttgggcaaaccagatcagaaagatttgaatgaaaacctagctgccactcaagggctggcccatatgatcgccgagtgcaagaagcttttccaggttcccgaggaaatgagccgatgtcgtaattcctataccgaacaagagctgaagcccctcactctggaagcactcgggcacctgggtaatgatgactcagctgactaccaacacttcctccaggactgtgtggatggcctgtttaaagaagtcaaagagaagtttaaaggctgggtcagctactccacttcggagcaggctgagctgtcctataagaaggtgagcgaaggaccccctctgaggctttggaggtcagtcattgaagtccctgctgtgccagaggaaatcttaaagcgcctacttaaagaacagcacctctgggatgtagacctgttggattcaaaagtgatcgaaattctggacagccaaactgaaatttaccagtatgtccaaaacagtatggcacctcatcctgctcgagactacgttgttttaagaacctggaggactaatttacccaaaggagcctgtgcccttttactaacctctgtggatcacgatcgcgcacctgtggtgggtgtgagggttaatgtgctcttgtccaggtatttgattgaaccctgtgggccaggaaaatccaaactcacctacatgtgcagagttgacttaaggggccacatgccagaatggtacacaaaatcttttggacatttgtgtgcagctgaagttgtaaagatccgggattccttcagtaaccagaacactgaaaccaaagacaccaaatctaggtgatcactgaagcaacgcaaccgcttccaccaccatggtgtttgtttctagaacttttgccagtccttgaagaatgggttctgtgtctaatcctgaaacaaagaaaactacaagctggagtgtaggaattgactatagcaatttgatacatttttaaagctgcttcctgtttgttgagggtctgtattcatagaccttgactggaatatgtaagactgtgcaaaaaaaaaaaaaaaatttatgtgtattcttattcaaattgcttctgagaagcaaaactctttaaatacattatggaagataatgaagatacttcattctcttgtgatatcagtgtatgcgtacctgtgtcgctttatttgcagtgtgttgagggactggtgtatccactggaatagttggtactcttggatgtgttttctcaccaagatgagcaaagaaaggtttgcacagaggagtgtgaatgtgtgtttgttgctggctgaatggcaatagatgtctaaggtggattcagtgtctggcacactgagacacctccaagaaggagattgatgcatcaggttcagtttaacctggaatatctgactacccctgaatccacccagaaagggggcccaacaccctt

SEQ ID NO: 161787 - DNA, 3276 bp, Artificial Sequence
  derived and/or modified sequence
atgtgtcgcaaaaagcccgacaccatgatcctcacacaaattgaggcgaaggaggcctgcgattggctgcgggctacgggtttcccacaatatgcgcagctgtatgaggatttcctgttccccatcgacattagcctggtgaagagggaacatgattttctggacagggatgcaatcgaagccttgtgccggcgcttaaatacattgaataagtgtgccgtgatgaaactggagatcagcccccatcggaagcggtcggatgacagcgacgaagacgagccatgtgcaatttcagggaaatggactttccagagggattctaaacggtggagcaggttagaggagttcgacgtgttcagcccaaaacaggacctcgtccctggctctccagacgactcacatccaaaagatgggccgtcccctggggggacattaatggacctgtccgagcggcaggaagtatcctctgtgcgtagcctgtcatccacaggcagcttgccctcacacgctcctccatccgaggatgctgccacccctaggactaattccgtcatatcggtctgctctagctcaaacttggcggggaatgatgactcatttggcagcctcccctcgcccaaggagctgtcatcgttttctttcagtatgaaaggtcatgagaagaccgcgaagagcaaaacccgttccctgctcaaacgcatggagtctctcaaactgaagagttctcaccactcaaaacacaaggctccctccaaacttggcttgatcatcagcggaccaatcttgcaggaaggaatggacgaagagaagctcaagcagctgaactgcgttgagatttccgcactgaatggcaatcgaatcaatgtacccatggtgcgcaagaggagtgtttcaaacagcacccaaacatcaagcagttcctcccagtcggaaacttcatcagcagtcagtacccccagccctgtaacccgcactcggagtttgtccgcatgcaataagagggtgggaatgtatcttgaaggcttcgaccctttcaatcagagcacgtttaataatgtcgttgaacagaatttcaagaatcgggagtcttatcctgaggacactgtattctatatccccgaggaccacaagcctgggacattccctaaggctcttactaatgggtcgttcagccctagcggaaacaacggaagcgtgaactggcgaaccgggagcttccatggtccgggccacatttctcttaggagagaaaattcaagcgacagtccaaaagagctcaaaagacggaacagttcgtcttcaatgagcagtcgcctcagtatctacgataacgtgccaggatcaatcctatatagctcctctggagacctggctgatctggagaacgaggatattttccccgagctggacgacattctgtaccatgtaaagggcatgcaaaggattgtgaaccagtggtccgagaagttttctgacgaaggcgactcagattctgccctcgacagcgtcagcccttgtccctcatctccaaaacagatccacctggacgtagataatgatcggactacaccaagcgatctggactctactgggaattctttaaacgagcctgaggaaccaagtgaaatccccgagaggcgcgactctggagtaggcgcttccttgacacggtcaaataggcatagactgagatggcactctttccagtcatcacaccggcccagcctaaactcagtgagcctgcagattaactgtcaatcagttgcccaaatgaacctgctccaaaagtatagcttgctcaagctgacggccttgctcgaaaagtataccccctctaacaagcacgggttcagctgggctgttcccaagttcatgaagcgtataaaagtgccagactacaaagatcgaagcgtgtttggcgtccctctgactgtcaacgtgcagcgcaccggccaacccctgcctcaatcaattcagcaggccatgcggtatctgagaaaccactgtttggatcaggtgggtctctttaggaagagtggcgttaagagtcgaattcaagctctgcggcagatgaacgagggagccatcgattgtgttaattacgaagggcagtcagcatacgacgttgcagatatgctgaagcaatatttcagagatctgcccgaaccactcatgaccaataaactgtcagaaaccttcctgcagatctaccaatacgttccaaaggatcagaggctccaagccatcaaagcagcaatcatgctgctgcctgatgagaatcgtgaagtcctccagacactgttatactttttgtccgacgtgacggctgctgtgaaggaaaatcaaatgacccccactaatcttgccgtctgccttgctccgtcgctgttccatctgaacacactcaagcgtgaaaattccagcccaagggtgatgcagaggaagcagagtttgggcaagcctgatcagaaggatttaaacgaaaatctcgccgcaacccaaggtctcgcccacatgattgccgagtgtaagaaattatttcaggtgcctgaggaaatgtcccggtgcagaaacagctacaccgagcaagaactaaagccactgaccctggaggccctcggacacctcggcaatgacgattctgctgactaccagcattttctccaggactgtgttgacggactcttcaaggaggtgaaagagaaattcaaaggttgggtttcatactccacttccgagcaggccgagctgtcttacaagaaggtgtccgagggtccacctctgcgactctggcgttccgtgatcgaggttcccgcagtgcccgaagaaatccttaaacggctcctgaaagagcagcacctttgggacgtcgacctgctggattcaaaggtgattgagatccttgattctcagactgaaatctaccagtatgtacagaattccatggctccacatcctgccagggactacgtagtcctgagaacctggcggaccaacctgcccaaaggtgcctgcgctctgctgctgacctcagtcgatcatgacagagcgccggtggtgggagtccgtgtgaatgtgctgctgagccggtacctgattgagccgtgcggtcccggaaagtctaaactgacgtacatgtgccgcgtcgacctaaggggccacatgcccgaatggtacaccaagtccttcgggcacctctgtgctgctgaggtcgtgaaaattcgcgactctttcagcaatcaaaacacagagactaaggatacaaaatcacggtag

SEQ ID NO: 161788 - DNA, 3276 bp, Artificial Sequence
  derived and/or modified sequence
atgtgcaggaagaagccagacaccatgatcctgacccagatcgaggccaaggaggcctgtgactggctgcgggccaccggcttcccccagtatgcccagctgtatgaggacttcctgttccccatcgacatcagcctggtgaagcgggagcatgacttcctggacagagatgccatcgaggccctgtgccggcggctgaacaccctgaacaagtgtgctgtgatgaagctggagatcagcccccacaggaagagaagtgatgacagtgatgaagatgagccctgtgccatcagcggcaagtggaccttccagagggacagcaagcgctggagccggctggaggagtttgatgtgttcagccccaagcaggacctggtgcccggcagcccagatgacagccaccccaaggatggccccagccctgggggcaccctgatggacctgtctgagcggcaggaggtgtcctctgtgcgcagcctgagcagcacaggcagcctgcccagccacgcccctccttctgaagatgctgccacccccaggaccaacagcgtcatctctgtgtgcagcagcagcaacctggccggaaatgatgacagctttggcagcctgcccagccccaaggagctgagcagcttctccttctccatgaagggccacgagaagacagccaagagcaagaccaggagcctgctgaagaggatggagagcctgaagctgaagagcagccaccacagcaagcacaaggcccccagcaagctgggcctcatcatcagcggccccatcctgcaggagggcatggatgaggagaagctgaagcagctgaactgtgtggagatcagcgccctgaatggaaaccgcatcaacgtgcccatggtgaggaagaggtctgtgagcaacagcacccagaccagcagcagcagcagccagagcgagaccagcagcgctgtgtccacccccagccctgtgaccaggaccaggagcctgagcgcctgcaacaagagggtgggcatgtacctggagggctttgaccccttcaaccagagcaccttcaacaacgtggtggagcagaacttcaagaaccgggagagctacccagaggacaccgtcttctacatccctgaggaccacaagccaggcaccttccccaaggccctgaccaacggcagcttcagccccagcggcaacaacggctctgtgaactggaggacaggcagcttccacggccctggccacatcagcctgcggcgggagaacagcagtgacagccccaaggagctgaagagaagaaacagcagcagctccatgagcagccggctgagcatctatgacaacgtgcccggcagcatcctgtacagcagcagcggggacctggccgacctggagaatgaagacatcttccctgagctggatgacatcctgtaccacgtgaagggcatgcagagaattgtgaaccagtggagcgagaagttcagtgatgaaggagacagcgacagcgccctggacagcgtgagcccctgccccagcagccccaagcagatccacctggatgtggacaatgacaggaccacccccagcgacctggacagcacaggcaacagcctgaatgaacctgaggagcccagcgagatccctgagcggcgggacagcggcgtgggcgccagcctgaccaggagcaacagacaccggctgcgctggcacagcttccagagcagccaccggcccagcctgaacagcgtgtccctgcagatcaactgccagagcgtggcccagatgaacctgctgcagaagtacagcctgctgaagctgacagccctgctggagaagtacacccccagcaacaagcacggcttctcctgggccgtgcccaagttcatgaagaggatcaaggtgcctgactacaaggacagatctgtgtttggagtgcccctgactgtgaatgtgcagaggacaggccagcccctgccccagagcatccagcaggccatgagatacctgaggaaccactgcctggaccaggtgggcctcttcaggaagtctggagtgaagagccgcatccaggccctgcggcagatgaatgaaggagccatcgactgtgtgaactatgagggccagagcgcctatgatgtggccgacatgctgaagcagtacttccgggacctgcctgagcccctgatgaccaacaagctgtctgagaccttcctgcagatctaccagtatgtgcccaaggaccagaggctgcaggccatcaaggccgccatcatgctgctgcctgatgaaaatcgggaggtgctgcagaccctgctgtacttcctgagtgatgtgacagctgctgtgaaggagaaccagatgacccccaccaacctggccgtgtgcctggcccccagcctcttccacctgaacaccctgaagcgggagaacagcagcccccgggtgatgcagaggaagcagagcctgggcaagccagaccagaaggacctgaatgaaaacctggccgccacccagggcctggcccacatgattgctgagtgcaagaagctgttccaggtgcctgaggagatgagccgctgcagaaattcctacacagagcaggagctgaagcccctgaccctggaggccctgggccacctgggcaatgatgattctgctgactaccagcacttcctgcaggactgtgtggatggcctcttcaaggaggtgaaggagaagttcaagggctgggtgtcctacagcaccagcgagcaggccgagctgagctacaagaaggtgtctgagggcccccccctgcggctgtggaggtctgtgattgaggtgcctgctgtgcctgaggagatcctgaagaggctgctgaaggagcagcacctgtgggatgtggacctgctggacagcaaggtgattgagatcctggacagccagacagagatctaccagtatgtgcagaacagcatggccccccacccagcccgggactatgtggtgctgcggacctggaggaccaacctgcccaagggggcctgtgccctgctgctgacctctgtggaccatgaccgggcccctgtggtgggcgtgcgggtgaatgtgctgctgagccgctacctgattgagccctgtggccctgggaagagcaagctgacctacatgtgccgggtggacctgcggggccacatgcctgagtggtacaccaagagctttggccacctgtgtgccgctgaggtggtgaagatccgggacagcttcagcaaccagaacacagagaccaaggacaccaagagcaggtag

SEQ ID NO: 161789 - DNA, 3276 bp, Artificial Sequence
  derived and/or modified sequence
atgtgccggaagaagcccgacaccatgatcctgacccagatcgaggctaaggaagcatgcgactggctgagggctacgggatttcctcagtatgcccagctttacgaggactttttattccctatcgacatcagtcttgtcaaaagggagcacgacttccttgatagggatgccatcgaagctctctgccgtaggctgaacaccctcaacaaatgcgccgtgatgaaactagagatttccccacaccggaagagatccgatgactccgacgaggatgaaccatgcgcaatttctgggaaatggactttccaacgcgacagtaaacgctggtcccggcttgaagaattcgatgtgttctctccaaagcaggatctggtccctggatcacccgacgatagtcaccctaaagacggtccctcacccggcggcactttaatggatctgtcagaacgtcaagaggtgagcagcgttcggagcctgtcatctactggcagcctgccgagtcacgcccccccctcagaggacgcagctacccctcgcaccaactcggttatcagcgtgtgttcgtctagcaacctggcaggaaatgacgacagcttcggatcattgccatcccccaaagaactgtcctccttctccttcagcatgaaggggcacgagaagacagcaaagagcaaaaccaggtcactgctgaagagaatggagtccctcaagctcaaatcctcccatcacagcaaacataaagctccgtccaaattggggttgattatctcaggtcctatcctgcaggaggggatggatgaggaaaaacttaaacagttgaattgcgtggagatcagcgctctgaacggcaaccgaatcaatgtgcccatggtccgcaagagaagcgtcagtaattctacgcagacttcctcttccagtagccagtcggaaacatccagcgccgtcagtacccctagtcccgtgacacggacaaggagcttaagtgcttgtaataaacgggtcggaatgtatcttgagggctttgatcccttcaatcagtccacttttaacaacgtagttgagcagaattttaagaatcgcgagtcataccctgaagacaccgtgttttatattcccgaggaccataaaccagggacgttccctaaggctctcaccaacggctctttttcgccgtctggcaacaacgggtcagttaattggcgaaccggcagcttccacggacctggacacatttcattaaggcgtgagaattcaagcgattctcccaaagaactgaaacggcggaattctagtagctctatgtctagtaggctgtctatctatgataacgttccaggaagtattctgtatagctcttcaggggatctggcagatctcgaaaacgaggacatattccctgagctggatgatatactgtaccatgttaagggcatgcagcggatagtcaatcagtggagcgaaaagttttcagatgaaggggacagcgattcagccctcgattcagtttctccttgccccagtagtccaaagcagattcatctggatgtggataatgatagaaccaccccttctgacctggactcgacgggcaattctctgaacgagcccgaggagccctcggagatcccagagagaagagatagtggagtaggagcctctctgactaggagtaacaggcacaggctgcgctggcattccttccagtctagccataggccgagcttaaattccgttagcctccagatcaactgtcagtctgtggcacagatgaacctgcttcagaaatattcactgctgaagctgacagcacttctggagaaatacactcctagcaacaaacacggatttagctgggcagtgcccaagttcatgaagcgcatcaaagtgcccgattataaagataggtctgtgttcggcgtacctttgaccgtcaatgtgcagagaacaggccagcccttgcctcagtccatacagcaagcaatgcgttacctccgcaaccactgtctagatcaggtgggtctcttcaggaagtccggagtcaagtctcgcatccaggctctcaggcaaatgaacgaaggagccattgactgcgtcaattatgagggccagtcagcctatgatgtcgccgatatgctgaaacagtatttccgagatctgcctgagcctcttatgactaacaaactgagcgagactttcctgcagatttaccaatatgtgcctaaagaccaaagacttcaagccataaaggcagcaattatgctcctgcctgacgagaatagagaggtgctgcaaacactgctgtatttcctctctgacgtcacggccgctgttaaggaaaatcagatgacccccacaaatctggccgtttgtctcgccccatcactgtttcacctgaataccttaaagcgagagaactcctcacctcgtgtgatgcagcgtaagcagagcctcggaaagcccgaccagaaagacctaaacgaaaacttagctgctacccagggccttgcccatatgatcgcagaatgcaagaaactgttccaggtgcctgaggaaatgtcacgttgccgcaacagctacacagaacaggagctgaaaccactaactctggaggctcttgggcacctggggaatgacgattccgccgactaccagcacttcctccaggactgtgttgatggtctgtttaaggaggtcaaggaaaaatttaaagggtgggtgtcctatagcacgagcgaacaggccgagctatcatataaaaaggtgtctgaaggcccccccctgaggttgtggcgctcagtcatagaagttcctgctgtgcctgaggagatactgaagagactcttgaaggaacagcatctgtgggatgtggaccttcttgactccaaggtgatcgaaatcctcgactctcagaccgagatctatcagtatgtgcagaacagcatggccccccaccccgcgcgcgactatgttgtgcttcggacgtggcgcactaacctgccaaaaggggcatgtgcactcctgctgacatcagtggatcacgatagggcacccgtcgtgggcgttcgtgtgaacgtgctgctgagtcgatacctcattgagccatgcggccctgggaaaagtaagcttacctacatgtgcagagtcgatttacgcgggcacatgcctgagtggtacaccaaaagtttcggacatctatgtgctgcagaagttgtcaaaatcagagatagcttttcaaaccagaacactgaaacgaaggacacaaaatcgcggtag

SEQ ID NO: 161790 - DNA, 3276 bp, Artificial Sequence
  derived and/or modified sequence
atgtgccggaagaaaccagacaccatgattctgacccagatcgaggccaaagaagcctgtgactggctccgagccaccggcttcccacagtatgcccagctgtatgaggatttcctgtttcccattgacatctcgttggtgaaacgcgaacacgatttcctagacagggacgctatcgaggccttgtgccgtaggctcaacacattgaataaatgtgctgtcatgaagctcgagattagcccacacaggaagcgctcagacgattcggatgaagacgaaccttgcgcaataagtggaaaatggacctttcaacgagatagcaagcgatggtcccgcctggaggagtttgacgtgttttcccctaaacaggacttagttcccggaagcccagacgattcccacccgaaggatggaccatcccctgggggaaccttaatggacctaagcgaaaggcaggaagtgtcctccgttagaagtctgtcttccaccggatccctcccctcccatgcaccaccatccgaagacgcagcgacaccccgaactaatagtgtcatctccgtctgcagttcttctaatctagctgggaacgatgatagttttggtagtctcccatcacctaaagagctcagctcttttagctttagtatgaagggtcacgaaaaaaccgccaagagcaagactcgcagcctgttgaaacgaatggagtctctgaaactcaagagttcccatcattccaagcacaaggccccatctaaactggggctcattatttccggacctatcctccaggagggaatggacgaggagaagctaaaacaactaaactgcgtggaaatctccgccctcaatggaaaccgaatcaacgtgccgatggtgcgaaaaagatctgtgtccaactctactcagacttccagttcctcctcacagagtgagaccagtagcgctgtctcgacccccagccccgtgaccagaacccgaagcctttctgcctgtaataagcgcgtgggaatgtatctggaaggctttgaccccttcaaccagtccacctttaacaatgtcgttgagcaaaactttaagaacagggagtcttatccagaggacacggtcttttatattcctgaggatcataagcctgggaccttccctaaagcactgactaatggaagtttctcaccttcagggaataacggctcagttaattggaggacggggtccttccacgggccaggacatattagcctacgtcgggagaatagctccgactcccccaaggaactcaagcgccgtaactcttcaagcagcatgtcatctagactatccatttatgacaatgtgcctggctccattctgtactcttcatccggggacctcgcagacctggaaaatgaagatatttttccagaactcgatgatattctgtaccacgtcaagggaatgcagcggatcgttaatcagtggagtgaaaaatttagtgatgagggagattccgattctgcgctggatagcgttagtccctgcccttccagcccgaaacagatccacctagatgtcgacaatgaccgaacaacacccagtgacttggatagtactggcaatagcctgaatgaacctgaggagccatctgaaatcccggaaaggcgtgattccggtgtcggcgcaagtctcaccagatccaaccgccatagattgagatggcacagtttccagtcaagtcacaggccatcgttgaattccgtatctttacaaattaattgccaatcagtggctcagatgaatcttctgcagaaatacagtctactgaagctcactgcactcctggagaagtacaccccaagtaacaagcacgggttttcatgggccgtgccgaaattcatgaagcgcatcaaagtccccgattacaaagatagatcagtgttcggcgtcccactgaccgtgaacgtccaaaggaccgggcagcccctccctcagtccatccagcaagctatgaggtatctaagaaaccattgtctggatcaagtcgggctctttagaaagtccggagtgaaatcacgaattcaggctctccgccagatgaacgagggggctattgactgcgtaaattacgaaggacaatccgcttacgacgtggccgatatgctcaaacagtactttagagatctaccagagcctctgatgacaaacaagctgtcagagacgttcctccagatctaccagtacgtcccaaaagaccaaaggttacaggcaattaaggccgctatcatgctcttaccagacgaaaatcgagaagtccttcagacactgctgtatttcctgagcgatgtcacagccgctgtcaaggaaaaccagatgacacccaccaacttggctgtctgcttggctccatccttatttcatctcaatactctgaagagagaaaactcaagcccgcgagtgatgcagagaaagcaatccctgggaaagccggaccagaaagatcttaacgagaacttagccgctactcaggggctggcacacatgatcgctgagtgtaagaaactttttcaggttccagaagaaatgagccggtgtcggaactcctatacagagcaagagctgaaacccctcaccctcgaggcactaggtcatttgggtaatgacgattctgcagactatcagcactttctgcaagactgcgtagacggactattcaaggaggttaaggagaaattcaaagggtgggtgagctattcaacctccgaacaggctgaactctcatacaaaaaagtttctgagggacctccccttaggctttggcgcagtgttatagaagtccccgcagtgccggaggaaattcttaagcgcctgctgaaggagcagcatctgtgggatgtggatctcctggactcaaaggttattgagatactcgattcgcagactgagatttaccaatatgtgcagaacagcatggcgccacaccctgcccgagattatgttgtattgcgcacttggcggacaaatctccctaagggtgcttgcgccctattgcttacctccgtcgatcatgatcgagccccagtcgtcggcgtccgtgttaatgtgctgctctctaggtacctcatcgagccgtgcggtcctggaaagagcaagctgacatatatgtgtagggtagaccttcgcggtcacatgccagagtggtacacaaagagcttcggacatctgtgcgcagccgaggttgttaagatccgggatagcttctccaaccaaaacaccgagactaaagacacgaagagcaggtag

SEQ ID NO: 161791 - DNA, 1404 bp, Artificial Sequence
  derived and/or modified sequence
atgaagcggattaaagtacccgattataaggaccgatcagttttcggcgtgcccctgactgtaaacgtccagcgcacaggacagccactaccacagtcaattcaacaggccatgcgttatcttcgaaaccactgtctggaccaggtgggtctgtttaggaagtcgggcgtcaagtcacgaatccaggccctgcggcagatgaatgagggggccatcgactgtgtgaactacgagggtcagagcgcttacgatgtggcggatatgctgaagcaatacttccgggatcttcccgagcccctgatgaccaataaactcagcgaaacattcttacagatatatcagtacgtgcccaaggaccaaagactgcaggccattaaggctgctatcatgctcctgccagatgagaatagggaagtgttgcaaaccctgttatatttcctgtcagacgtgaccgcagcagttaaggagaaccagatgacacccactaatctagctgtgtgcctggcccctagtctcttccacttgaatacacttaagagggaaaattccagtccgcgcgtgatgcagcggaagcagagcttgggcaagcccgatcagaaagatctcaacgaaaatctagcagctacgcaggggctggcccacatgatagctgagtgtaaaaaattattccaggttcctgaagaaatgtcccgctgtcgcaactcatatactgaacaggagcttaagccgcttacccttgaggctctgggccacctgggcaatgacgattctgcagattaccagcatttcttacaggactgcgtggacggattgttcaaagaagtcaaggaaaaattcaaaggttgggtgagctatagcacatcggagcaagccgaactgtcctacaaaaaagtgtccgagggcccaccactgcgactgtggaggagtgtgatcgaagtcccagcggttcccgaagaaattctgaaacgccttcttaaggaacagcatttatgggatgtagacctgctggacagcaaagttatcgagatcctcgatagccaaacagagatttaccagtacgtgcaaaattctatggctccacacccagctcgggactatgtggtacttcggacatggcgcacaaatttgcccaaaggagcctgtgcactcctactcaccagcgtagatcacgaccgcgctcccgtggtcggcgtccgcgtcaacgtactgctgtctcgttatttgatagagccatgcggcccagggaagtccaagctaacatatatgtgtagagtcgatctgcgcggccacatgcctgagtggtacaccaagtctttcggacatttgtgtgctgcggaggtagtgaagatccgcgacagcttctccaaccaaaataccgagacaaaggacaccaaatcacgttag

SEQ ID NO: 161792 - DNA, 3054 bp, Artificial Sequence
  derived and/or modified sequence
atgaagttagagatctcaccccacaggaagcgatcagatgattctgacgaagatgagccatgcgccatctcaggaaagtggacctttcagagagatagtaagcgctggagcagactggaggagtttgacgtcttcagtccaaagcaagatctcgtgccagggtcacctgatgattcccacccgaaggatggcccctcccccggcgggaccctcatggatctgagtgaaaggcaggaagtctcctccgttagatctctaagttcaactggaagtctgccatcccatgctccgcccagcgaggacgctgccactccaaggactaactccgtcatatcagtgtgttcgtcaagcaacttagctggtaacgacgactctttcggcagcctcccttcgccaaaagagctgtcttcattctcgttctccatgaagggtcatgagaagaccgccaaaagcaagactagatccctcctcaagaggatggaatccctcaaactcaaaagcagtcatcactccaagcacaaggccccatctaaactaggtctgataatatctgggcctatccttcaggagggtatggatgaagaaaaactgaagcagctcaactgtgtcgagatcagtgcgctaaacgggaaccgaatcaatgtaccaatggtgcgcaagcgcagcgtatcgaacagtacccaaactagttctagtagtagtcagtcagaaacttccagtgccgtgtctactccctctccagtcacgaggacgcggtcactcagcgcctgcaacaagcgagtgggaatgtacttagaaggtttcgatcctttcaatcagtcaacttttaataacgtggtcgaacagaattttaagaacagagaatcctaccccgaagacacagtcttctacatccctgaggatcacaagcccggaacgttccccaaagctctaaccaacggctctttcagtccctcgggcaacaatgggtctgtgaattggcgaactggctccttccacgggcctggtcatatctcactccggcgagaaaacagctccgatagtcctaaagagctaaaaaggcggaattccagcagctctatgagcagcagactcagtatctacgacaatgtgcctggttctatcctgtattcatcctcaggtgatctcgctgatctggagaacgaggacatattccctgagttggatgacatcctgtatcacgttaagggcatgcagcgcatcgtgaaccaatggagcgaaaagttttctgacgagggggactcagacagcgccctcgattcagtttccccctgcccctcttcgccaaagcaaatacacctggatgtggataacgatagaacaacgccatctgatctggattcaaccgggaactctctaaatgagccagaagagccatctgaaatcccagagagacgagactcaggggttggtgcttcgctgactaggagcaataggcatagacttcgctggcattcgttccagtcgtcccaccgaccatctctgaacagcgtgtcgttgcagatcaattgccagtctgtggcccaaatgaacctgctccagaaatactctcttttgaagcttacagccctcctcgaaaaatataccccctccaacaaacatggcttttcttgggctgtaccaaaatttatgaagagaattaaagtacctgactacaaggataggagcgtcttcggagtccctctcacagtcaacgtgcagagaacagggcagcccctcccccagtccatacagcaggctatgcggtacctcaggaaccattgccttgatcaggtaggactgtttcggaagagtggcgtcaagagccggattcaggcacttaggcagatgaacgagggggctatcgattgtgtgaactatgaaggccagtcagcctacgatgtggcagacatgctgaagcagtattttcgggatctgcccgagcccctcatgacaaacaaactgagtgaaacttttcttcagatctaccagtacgtgcctaaggaccagcgcctgcaggccattaaggccgctattatgctgctccccgatgaaaacagggaggtgcttcagacactcctctatttcttaagcgacgtgacagcagccgtcaaagagaaccaaatgacgcccacaaacctggcagtatgccttgccccatcccttttccacctgaatacactcaagcgggaaaatagctctcctcgcgttatgcagcggaagcaaagccttggcaagcctgaccagaaggacttaaacgagaacttagccgccacgcaggggctggcccacatgatcgcagaatgcaagaaactcttccaggtgcccgaggaaatgagcaggtgtcggaacagttacacagaacaagagcttaagccattgactctggaggccctaggacacttaggaaacgatgactcagccgattaccagcactttctacaggattgtgtcgacggactctttaaagaggtgaaggagaagtttaaaggctgggtaagttatagcacctccgaacaagcagagctctcctacaagaaagtcagtgaggggccgccgcttcggctgtggaggagcgtgattgaggtgcccgccgtgccggaagagatcttaaagcgtttattgaaagaacagcacctatgggatgttgatctgctggacagtaaggtgattgaaatattggactctcagaccgaaatttaccagtacgtccagaattcgatggcaccacatccagctagagactatgtcgtcctgcgtacctggcgaaccaatcttcccaaaggagcatgcgcccttctcctgacttcagtcgatcacgaccgggctcctgtcgtgggcgttcgggtgaatgtcctgctttcgagatatctgatcgagccatgcggccctgggaaatccaagcttacttacatgtgcagggtagacttgcgcgggcacatgccagagtggtacactaagagcttcggacatctctgcgctgctgaggtcgtcaagatcagggactcattctcgaatcagaacactgagaccaaggacaccaagtctaggtag

SEQ ID NO: 161793 - DNA, 1404 bp, Artificial Sequence
  derived and/or modified sequence
atgaagaggatcaaggtgcctgactacaaggacagatctgtgtttggagtgcccctgactgtgaatgtgcagaggacaggccagcccctgccccagagcatccagcaggccatgagatacctgaggaaccactgcctggaccaggtgggcctcttcaggaagtctggagtgaagagccgcatccaggccctgcggcagatgaatgaaggagccatcgactgtgtgaactatgagggccagagcgcctatgatgtggccgacatgctgaagcagtacttccgggacctgcctgagcccctgatgaccaacaagctgtctgagaccttcctgcagatctaccagtatgtgcccaaggaccagaggctgcaggccatcaaggccgccatcatgctgctgcctgatgaaaatcgggaggtgctgcagaccctgctgtacttcctgagtgatgtgacagctgctgtgaaggagaaccagatgacccccaccaacctggccgtgtgcctggcccccagcctcttccacctgaacaccctgaagcgggagaacagcagcccccgggtgatgcagaggaagcagagcctgggcaagccagaccagaaggacctgaatgaaaacctggccgccacccagggcctggcccacatgattgctgagtgcaagaagctgttccaggtgcctgaggagatgagccgctgcagaaattcctacacagagcaggagctgaagcccctgaccctggaggccctgggccacctgggcaatgatgattctgctgactaccagcacttcctgcaggactgtgtggatggcctcttcaaggaggtgaaggagaagttcaagggctgggtgtcctacagcaccagcgagcaggccgagctgagctacaagaaggtgtctgagggcccccccctgcggctgtggaggtctgtgattgaggtgcctgctgtgcctgaggagatcctgaagaggctgctgaaggagcagcacctgtgggatgtggacctgctggacagcaaggtgattgagatcctggacagccagacagagatctaccagtatgtgcagaacagcatggccccccacccagcccgggactatgtggtgctgcggacctggaggaccaacctgcccaagggggcctgtgccctgctgctgacctctgtggaccatgaccgggcccctgtggtgggcgtgcgggtgaatgtgctgctgagccgctacctgattgagccctgtggccctgggaagagcaagctgacctacatgtgccgggtggacctgcggggccacatgcctgagtggtacaccaagagctttggccacctgtgtgccgctgaggtggtgaagatccgggacagcttcagcaaccagaacacagagaccaaggacaccaagagcaggtag

SEQ ID NO: 161794 - DNA, 3054 bp, Artificial Sequence
  derived and/or modified sequence
atgaagctggagatcagcccccacaggaagagaagtgatgacagtgatgaagatgagccctgtgccatcagcggcaagtggaccttccagagggacagcaagcgctggagccggctggaggagtttgatgtgttcagccccaagcaggacctggtgcccggcagcccagatgacagccaccccaaggatggccccagccctgggggcaccctgatggacctgtctgagcggcaggaggtgtcctctgtgcgcagcctgagcagcacaggcagcctgcccagccacgcccctccttctgaagatgctgccacccccaggaccaacagcgtcatctctgtgtgcagcagcagcaacctggccggaaatgatgacagctttggcagcctgcccagccccaaggagctgagcagcttctccttctccatgaagggccacgagaagacagccaagagcaagaccaggagcctgctgaagaggatggagagcctgaagctgaagagcagccaccacagcaagcacaaggcccccagcaagctgggcctcatcatcagcggccccatcctgcaggagggcatggatgaggagaagctgaagcagctgaactgtgtggagatcagcgccctgaatggaaaccgcatcaacgtgcccatggtgaggaagaggtctgtgagcaacagcacccagaccagcagcagcagcagccagagcgagaccagcagcgctgtgtccacccccagccctgtgaccaggaccaggagcctgagcgcctgcaacaagagggtgggcatgtacctggagggctttgaccccttcaaccagagcaccttcaacaacgtggtggagcagaacttcaagaaccgggagagctacccagaggacaccgtcttctacatccctgaggaccacaagccaggcaccttccccaaggccctgaccaacggcagcttcagccccagcggcaacaacggctctgtgaactggaggacaggcagcttccacggccctggccacatcagcctgcggcgggagaacagcagtgacagccccaaggagctgaagagaagaaacagcagcagctccatgagcagccggctgagcatctatgacaacgtgcccggcagcatcctgtacagcagcagcggggacctggccgacctggagaatgaagacatcttccctgagctggatgacatcctgtaccacgtgaagggcatgcagagaattgtgaaccagtggagcgagaagttcagtgatgaaggagacagcgacagcgccctggacagcgtgagcccctgccccagcagccccaagcagatccacctggatgtggacaatgacaggaccacccccagcgacctggacagcacaggcaacagcctgaatgaacctgaggagcccagcgagatccctgagcggcgggacagcggcgtgggcgccagcctgaccaggagcaacagacaccggctgcgctggcacagcttccagagcagccaccggcccagcctgaacagcgtgtccctgcagatcaactgccagagcgtggcccagatgaacctgctgcagaagtacagcctgctgaagctgacagccctgctggagaagtacacccccagcaacaagcacggcttctcctgggccgtgcccaagttcatgaagaggatcaaggtgcctgactacaaggacagatctgtgtttggagtgcccctgactgtgaatgtgcagaggacaggccagcccctgccccagagcatccagcaggccatgagatacctgaggaaccactgcctggaccaggtgggcctcttcaggaagtctggagtgaagagccgcatccaggccctgcggcagatgaatgaaggagccatcgactgtgtgaactatgagggccagagcgcctatgatgtggccgacatgctgaagcagtacttccgggacctgcctgagcccctgatgaccaacaagctgtctgagaccttcctgcagatctaccagtatgtgcccaaggaccagaggctgcaggccatcaaggccgccatcatgctgctgcctgatgaaaatcgggaggtgctgcagaccctgctgtacttcctgagtgatgtgacagctgctgtgaaggagaaccagatgacccccaccaacctggccgtgtgcctggcccccagcctcttccacctgaacaccctgaagcgggagaacagcagcccccgggtgatgcagaggaagcagagcctgggcaagccagaccagaaggacctgaatgaaaacctggccgccacccagggcctggcccacatgattgctgagtgcaagaagctgttccaggtgcctgaggagatgagccgctgcagaaattcctacacagagcaggagctgaagcccctgaccctggaggccctgggccacctgggcaatgatgattctgctgactaccagcacttcctgcaggactgtgtggatggcctcttcaaggaggtgaaggagaagttcaagggctgggtgtcctacagcaccagcgagcaggccgagctgagctacaagaaggtgtctgagggcccccccctgcggctgtggaggtctgtgattgaggtgcctgctgtgcctgaggagatcctgaagaggctgctgaaggagcagcacctgtgggatgtggacctgctggacagcaaggtgattgagatcctggacagccagacagagatctaccagtatgtgcagaacagcatggccccccacccagcccgggactatgtggtgctgcggacctggaggaccaacctgcccaagggggcctgtgccctgctgctgacctctgtggaccatgaccgggcccctgtggtgggcgtgcgggtgaatgtgctgctgagccgctacctgattgagccctgtggccctgggaagagcaagctgacctacatgtgccgggtggacctgcggggccacatgcctgagtggtacaccaagagctttggccacctgtgtgccgctgaggtggtgaagatccgggacagcttcagcaaccagaacacagagaccaaggacaccaagagcaggtag

SEQ ID NO: 161795 - DNA, 1404 bp, Artificial Sequence
  derived and/or modified sequence
atgaagcggatcaaggtgcccgactacaaggaccggagcgtgttcggcgttccccttaccgttaacgtgcagaggacaggacagcccctcccccagagcatccagcaggctatgcgttatttaaggaatcactgtttagaccaggtggggttattccggaagagtggagtgaagtccaggatacaagctttaaggcagatgaatgaaggcgccattgattgtgtcaactacgagggtcagtctgcctatgacgtggctgacatgctgaagcaatattttagagatctgcccgaacccctaatgaccaacaaactcagcgagacgtttctccagatttatcaatatgtcccaaaggaccagaggctgcaggcaatcaaggcggccattatgctgcttcctgatgaaaacagagaggtgctgcaaactctgttgtatttcctctctgatgtgaccgctgccgtgaaagagaaccagatgacccctacaaacctggcggtgtgtcttgccccctcgttgttccacctgaacactctgaagcgtgagaattcctcccccagagtcatgcagaggaagcagagcctcggcaaacccgatcaaaaggacctgaacgaaaacttggcagcgacccagggactagcccacatgattgcagaatgcaagaagctgtttcaggtaccggaggagatgtcccggtgtcggaactcctatacagagcaagagctgaagcccctgacactcgaggctctcgggcatctgggcaatgacgattccgctgactaccagcactttcttcaggactgcgtggacggattatttaaggaagttaaagaaaagtttaaaggctgggtttcttacagtacctcagagcaggccgagctaagttataaaaaggtttctgaaggcccgccactccgcctgtggaggtcagtcatagaagttcctgcagtgccagaagagatactgaagcggcttctgaaggaacagcatctttgggacgtggaccttttggacagcaaggtcatcgagatcctggatagtcagacagaaatttatcagtacgtccagaacagcatggcacctcatccagcacgggactatgtggtactacggacgtggcggacaaatctgccaaagggcgcatgtgcgctcctgcttactagcgtggaccatgaccgcgctcctgtggtaggagttagggtgaatgtcctcctcagtagatacctcatcgagccatgtggacctggtaaaagcaagctgacttatatgtgtagggtggatttacgggggcacatgccagagtggtatacaaaaagctttggccatctgtgcgctgcagaagtcgttaaaattcgagacagcttctctaaccagaataccgaaactaaggatactaagagcaggtag

SEQ ID NO: 161796 - DNA, 3054 bp, Artificial Sequence
  derived and/or modified sequence
atgaagctggagatcagcccccaccggaagcggagcgacgacagcgatgaggatgaaccgtgcgctattagcggtaaatggacatttcagcgtgacagtaaacgctggagtcggctcgaggaatttgacgtgttttccccgaagcaggatcttgtcccaggctcccctgacgattcacaccccaaggatgggccgagtccagggggtactctgatggacctctccgagaggcaggaggtcagctccgtgaggtctctaagctccacaggttcactcccatctcacgcccctccaagcgaggacgcagctactccccgcaccaatagcgtgattagtgtatgtagcagcagtaacttagccggcaatgacgattcctttgggtcactgccatctccaaaggaactctcatctttcagttttagcatgaagggccatgagaaaacagccaaaagcaagacccggtccctgctgaagcggatggagagcctgaagcttaaaagcagtcatcactcaaagcataaagcgccatctaaactcgggcttattatcagcggtcccatccttcaggagggtatggacgaagagaagctgaagcagctgaattgcgtcgaaatttcagccctgaacggaaatcggatcaatgttccaatggtccggaagcgctcagtgtctaatagcacacagacctcatcgtcttccagtcagtctgaaacatctagcgctgtgtctaccccatcccctgtgacccgtacacggtccctatccgcctgcaataagcgggtcggtatgtacctcgaagggttcgatccattcaatcaatccaccttcaacaacgtggtggagcagaattttaaaaaccgcgaatcctaccctgaggataccgtgttctacatccccgaggaccataagcccgggacctttcccaaggctttaaccaacggttcattttcgccctcaggtaataacgggtccgttaattggcgaacaggatccttccacggacccgggcatataagtctgcggcgggaaaactcaagtgactcaccgaaagagctaaaacgccgtaacagcagctcttcaatgtcctcccggctgagcatctatgacaatgttcctggtagtatcctgtacagtagtagcggcgacctcgctgacctggaaaatgaggatatattcccagaactggacgacatcctgtaccacgtgaaaggcatgcaacgaatcgttaatcagtggagcgaaaagttcagcgatgaaggagactccgatagtgcactagacagcgtctccccttgtccatccagccccaagcagattcaccttgatgtggacaatgatagaacaacgccatcagacctggacagcacagggaattccttgaacgagcctgaggagccgtcagagattccagagcgtcgggactccggagtgggcgcgagcctaacccggtccaatagacacaggctgcgctggcattcgttccagtcatcccatcgtccttctctgaatagtgtcagcctgcaaatcaattgccaatccgtcgcccagatgaacctgctgcagaaatactcgctgctcaagctcactgcattgctcgaaaaatacaccccaagcaacaaacatggctttagctgggctgtgcctaaatttatgaagcgaatcaaagttccagactacaaagatcggagcgtcttcggcgtgccactgactgttaacgtccagcgcactggccagcccctgccccagtccattcagcaagccatgagatatctgaggaatcattgcctggatcaagtgggactatttagaaaatcgggcgttaaaagtcggattcaagctctccgtcagatgaatgagggtgcaattgactgtgttaactatgaaggccagtccgcgtacgatgtagcggacatgcttaaacaatactttagagatctccctgagcccctgatgacaaacaagctgtccgagactttcctgcagatctatcaatatgtgcctaaggatcagcggcttcaggcaatcaaggcagcaatcatgctgctgcccgatgagaaccgagaggtgctccaaacacttctgtactttttatcagatgtgaccgcagcggtaaaagaaaatcagatgacacctacgaacctcgctgtgtgcctcgctccctccctgttccacctgaacactttgaagcgggaaaattcttcaccacgtgtgatgcagagaaaacagtcactgggaaagcctgatcaaaaagacctgaatgagaacctggcggccacccagggcttagctcacatgatagcagaatgcaagaagctgttccaagtgcctgaagaaatgtcacgttgccgcaactcatacaccgagcaggagctgaagcccctcacattagaggctcttggtcacctcggtaatgacgattcagccgattatcagcatttcctgcaagattgcgttgatgggcttttcaaagaagtaaaagaaaaattcaagggctgggtgagctactccacatcagagcaggctgagctgagttacaagaaagtcagcgagggaccccccctgcggctgtggaggtctgtaattgaggtgccagctgtgcccgaggaaatactgaaacggctgctgaaggagcagcatttgtgggacgtggacctcctagacagcaaggtgattgaaatcttggattcacagactgagatttatcagtacgtccagaactctatggccccacatcccgctagagactatgtggtcctgcgaacatggcgcacaaacttgcctaagggagcctgcgccctgctcctgactagcgttgaccacgatagagcccctgtggtgggcgtcagggtgaatgtgttgctttcgcggtatctgatcgaaccctgtggcccgggtaaatccaagctcacctacatgtgcagggtagatctgcgtggacacatgcccgaatggtacaccaagtccttcggccatttgtgtgccgccgaggtggtgaagatccgggactctttttccaaccagaacaccgagactaaggataccaagtcgcgatag

SEQ ID NO: 161797 - DNA, 1404 bp, Artificial Sequence
  derived and/or modified sequence
atgaaacgtatcaaagtcccagattacaaagacagaagtgtgtttggagttccccttacggtcaacgtgcagcggactggacagcctttgccccaatccattcaacaagcaatgagataccttcgaaaccactgcctggaccaggtcggcctgttccgcaagagcggggtgaaatcacggatacaggctttgaggcagatgaacgagggcgctatagactgcgtgaactatgagggccaatctgcctatgatgtggccgatatgctgaagcaatactttagggacctcccagaacctttgatgaccaataaactctcagaaacatttctgcagatctatcagtatgtcccgaaggaccaacgcctacaagctatcaaagccgctataatgcttctccccgacgagaacagggaagtgctccagaccctcctatacttcctgtcagacgttactgccgctgtcaaagagaatcaaatgacccctactaacttggcggtgtgcctggcaccttcactattccatttgaacaccttgaaaagagagaactcaagcccacgggtgatgcaaaggaagcaatccctggggaagccagatcagaaggatcttaatgaaaacttggcggcaacccaaggcctggcacatatgatagcagagtgtaaaaagctgttccaggttccagaggaaatgtccagatgcaggaattcctacacagaacaggaacttaaacctttaactctggaagctttgggtcacctgggcaatgatgatagtgctgattaccaacactttctacaggactgcgttgacggcctgtttaaggaagtgaaagagaaattcaaagggtgggtgtcatacagcacctctgaacaggccgaattgtcgtataagaaggtgtccgaggggccacccctgagattgtggagatctgtcatcgaagtacccgctgtgcccgaagagattctgaagaggctgctcaaggagcaacatctgtgggacgtggatttgctggatagtaaggtgatcgagattctcgattctcagaccgaaatttaccagtacgtgcagaacagcatggcaccacaccctgccagggactatgtggtattaagaacctggcgaactaacttaccaaagggagcttgtgctttgctgctgacctccgtggatcacgaccgtgctcctgtcgtgggcgtgagggtgaacgtgcttctgtcgcgctaccttattgaaccatgcggccctggcaagagcaaattaacttacatgtgtcgggttgatctaaggggacatatgcctgaatggtacaccaagagttttggacacctgtgcgccgcagaagtggtgaaaatacgggacagcttcagtaaccagaatacggagacaaaagataccaagagccggtag

SEQ ID NO: 161798 - DNA, 3054 bp, Artificial Sequence
  derived and/or modified sequence
atgaaattagaaataagtcctcatagaaaaagaagcgatgactccgacgaggatgaaccgtgtgccataagcgggaaatggacctttcagcgggatagtaaacgctggtctcgcttggaggaatttgatgtgtttagcccaaagcaggacctggtgccgggtagtcccgatgatagccaccctaaggatggcccatcccccggagggaccttgatggacttgagcgagcggcaggaggtatcctcagtgcgttctttgagctctacaggatccctcccttctcacgccccaccatctgaggacgcggcaacccccaggactaactctgtgatctctgtttgcagcagcagtaatcttgctggcaatgatgacagtttcggttcactcccatccccaaaggagttgagctcattctctttttcgatgaagggtcatgagaaaaccgctaaatcaaagaccaggtctctgttgaagaggatggagtctctcaagctcaaatcctctcaccacagcaaacataaggcaccgtcaaagctgggcctgatcattagtggacccattctgcaggagggaatggacgaggagaaactgaagcagctcaactgcgtagagatatccgcactgaatggtaataggattaatgtgcctatggtcaggaaaaggtcagtgtccaactctacacagacatctagttcgagttcacaaagcgaaacaagtagtgctgtgtccaccccctctccggtgacccggacgcggtcgctgagcgcctgcaacaagcgcgtgggaatgtatctagagggcttcgaccctttcaaccagagtacttttaataatgtggtggaacagaactttaaaaaccgtgagtcttacccggaggacactgtgttttacatccctgaagatcacaagccaggaactttcccgaaagctcttactaacggaagcttcagcccgagcggcaataacgggagtgttaattggaggaccggatcgttccacggacctggacatatcagtttgcggagagaaaatagctcagactcccctaaggagctgaagcgcagaaactcctccagttctatgtctagccggttatctatctatgacaatgtgcctggatctatcctgtattcgtcatccggcgacctggccgatctggagaacgaagatatcttccccgagcttgacgatatcctgtaccatgtcaagggcatgcagcgtatcgttaaccagtggtcagaaaaattttccgacgaaggagatagcgactctgcactggacagcgtgagtccttgtccgtcctctcctaaacagattcatctggacgtcgataacgaccggacaacaccctctgaccttgattcaaccggaaactcattgaatgaaccagaagagccatcagaaatcccggagcgcagggattcgggggtgggagcttccttaactcgcagcaaccggcatcgcctccgctggcatagcttccagagttcacatagaccttctcttaacagtgtgtccctgcagatcaactgccaaagcgtcgcacaaatgaatctgctgcagaaatatagtctgttgaagctcacagccctgctggagaagtacacacccagtaataaacacggcttttcatgggctgtacccaaatttatgaaacggattaaggtgccggactacaaagaccgttcagtatttggtgttcccctgacggtcaacgtgcagcggacaggacagcctctgccccaatctattcagcaagccatgcgttacctgcgcaatcactgtcttgaccaggtgggcttgtttagaaagtccggcgtgaaaagtcgaattcaggccctgcgtcaaatgaacgaaggagcgatagattgtgttaactatgagggccagtcagcgtatgatgtagccgatatgctcaagcagtacttcagagatctgcccgagcctttaatgacaaacaagctatccgaaacgtttctgcagatctatcagtacgttccaaaagaccagcgactgcaggcgatcaaagcggcaatcatgctcctgccagacgaaaaccgggaggttttgcagacactcctttatttcctctccgacgtcaccgctgcggttaaggaaaaccagatgacaccaactaacctggccgtgtgccttgccccatccctgttccacttgaacactctgaaaagagagaattcctctccccgagtaatgcaaagaaaacagtcccttggaaagccggaccagaaggatctcaacgaaaacttggccgctacgcaaggtctcgctcatatgatcgctgagtgtaagaaactttttcaggttcctgaggagatgagccgatgtagaaacagctatacagagcaagaactgaagcctctcactctcgaggccttaggccatctcggtaatgacgacagtgctgactaccagcactttttgcaggactgcgtagacgggttgtttaaggaagtaaaggagaagtttaagggttgggtgagttactccacatctgagcaggccgaactgagttacaaaaaagtttccgaaggaccaccactgcggctgtggcgcagcgtgattgaagtgcctgctgtcccagaggaaattctgaaacgcctgctgaaggagcagcacctgtgggatgtagacctgctggattccaaagttatcgagattctggattctcagacggagatatatcaatacgtccagaactcaatggcgcctcatcccgctcgggattacgtcgtgttaagaacctggaggaccaacctgcccaaaggcgcttgcgccctgcttctgacgagcgtcgatcacgatagagcccctgttgtaggtgtgcgggtaaacgtcctcctaagtcggtacctcatcgaaccctgcgggccaggtaagtcaaaattgacctacatgtgtcgggtggacctgagaggacacatgccggaatggtacacaaagagtttcgggcacttgtgcgctgctgaagtcgtaaaaattagggacagtttcagcaatcagaacactgagacaaaagataccaagtccagatag

SEQ ID NO: 161799 - DNA, 1404 bp, Artificial Sequence
  derived and/or modified sequence
atgaagagaatcaaggtgcccgactacaaggacagaagcgtgttcggcgtgcccctgaccgtgaacgtgcagagaaccggccagcccctgccccagagcatccagcaggccatgagatacctgagaaaccactgcctggaccaggtgggcctgttcagaaagagcggcgtgaagagcagaatccaggccctgagacagatgaacgagggcgccatcgactgcgtgaactacgagggccagagcgcctacgacgtggccgacatgctgaagcagtacttcagagacctgcccgagcccctgatgaccaacaagctgagcgagaccttcctgcagatctaccagtacgtgcccaaggaccagagactgcaggccatcaaggccgccatcatgctgctgcccgacgagaacagagaggtgctgcagaccctgctgtacttcctgagcgacgtgaccgccgccgtgaaggagaaccagatgacccccaccaacctggccgtgtgcctggcccccagcctgttccacctgaacaccctgaagagagagaacagcagccccagagtgatgcagagaaagcagagcctgggcaagcccgaccagaaggacctgaacgagaacctggccgccacccagggcctggcccacatgatcgccgagtgcaagaagctgttccaggtgcccgaggagatgagcagatgcagaaacagctacaccgagcaggagctgaagcccctgaccctggaggccctgggccacctgggcaacgacgacagcgccgactaccagcacttcctgcaggactgcgtggacggcctgttcaaggaggtgaaggagaagttcaagggctgggtgagctacagcaccagcgagcaggccgagctgagctacaagaaggtgagcgagggcccccccctgagactgtggagaagcgtgatcgaggtgcccgccgtgcccgaggagatcctgaagagactgctgaaggagcagcacctgtgggacgtggacctgctggacagcaaggtgatcgagatcctggacagccagaccgagatctaccagtacgtgcagaacagcatggccccccaccccgccagagactacgtggtgctgagaacctggagaaccaacctgcccaagggcgcctgcgccctgctgctgaccagcgtggaccacgacagagcccccgtggtgggcgtgagagtgaacgtgctgctgagcagatacctgatcgagccctgcggccccggcaagagcaagctgacctacatgtgcagagtggacctgagaggccacatgcccgagtggtacaccaagagcttcggccacctgtgcgccgccgaggtggtgaagatcagagacagcttcagcaaccagaacaccgagaccaaggacaccaagagcagatag

SEQ ID NO: 161800 - DNA, 3054 bp, Artificial Sequence
  derived and/or modified sequence
atgaagctggagatcagcccccacagaaagagaagcgacgacagcgacgaggacgagccctgcgccatcagcggcaagtggaccttccagagagacagcaagagatggagcagactggaggagttcgacgtgttcagccccaagcaggacctggtgcccggcagccccgacgacagccaccccaaggacggccccagccccggcggcaccctgatggacctgagcgagagacaggaggtgagcagcgtgagaagcctgagcagcaccggcagcctgcccagccacgccccccccagcgaggacgccgccacccccagaaccaacagcgtgatcagcgtgtgcagcagcagcaacctggccggcaacgacgacagcttcggcagcctgcccagccccaaggagctgagcagcttcagcttcagcatgaagggccacgagaagaccgccaagagcaagaccagaagcctgctgaagagaatggagagcctgaagctgaagagcagccaccacagcaagcacaaggcccccagcaagctgggcctgatcatcagcggccccatcctgcaggagggcatggacgaggagaagctgaagcagctgaactgcgtggagatcagcgccctgaacggcaacagaatcaacgtgcccatggtgagaaagagaagcgtgagcaacagcacccagaccagcagcagcagcagccagagcgagaccagcagcgccgtgagcacccccagccccgtgaccagaaccagaagcctgagcgcctgcaacaagagagtgggcatgtacctggagggcttcgaccccttcaaccagagcaccttcaacaacgtggtggagcagaacttcaagaacagagagagctaccccgaggacaccgtgttctacatccccgaggaccacaagcccggcaccttccccaaggccctgaccaacggcagcttcagccccagcggcaacaacggcagcgtgaactggagaaccggcagcttccacggccccggccacatcagcctgagaagagagaacagcagcgacagccccaaggagctgaagagaagaaacagcagcagcagcatgagcagcagactgagcatctacgacaacgtgcccggcagcatcctgtacagcagcagcggcgacctggccgacctggagaacgaggacatcttccccgagctggacgacatcctgtaccacgtgaagggcatgcagagaatcgtgaaccagtggagcgagaagttcagcgacgagggcgacagcgacagcgccctggacagcgtgagcccctgccccagcagccccaagcagatccacctggacgtggacaacgacagaaccacccccagcgacctggacagcaccggcaacagcctgaacgagcccgaggagcccagcgagatccccgagagaagagacagcggcgtgggcgccagcctgaccagaagcaacagacacagactgagatggcacagcttccagagcagccacagacccagcctgaacagcgtgagcctgcagatcaactgccagagcgtggcccagatgaacctgctgcagaagtacagcctgctgaagctgaccgccctgctggagaagtacacccccagcaacaagcacggcttcagctgggccgtgcccaagttcatgaagagaatcaaggtgcccgactacaaggacagaagcgtgttcggcgtgcccctgaccgtgaacgtgcagagaaccggccagcccctgccccagagcatccagcaggccatgagatacctgagaaaccactgcctggaccaggtgggcctgttcagaaagagcggcgtgaagagcagaatccaggccctgagacagatgaacgagggcgccatcgactgcgtgaactacgagggccagagcgcctacgacgtggccgacatgctgaagcagtacttcagagacctgcccgagcccctgatgaccaacaagctgagcgagaccttcctgcagatctaccagtacgtgcccaaggaccagagactgcaggccatcaaggccgccatcatgctgctgcccgacgagaacagagaggtgctgcagaccctgctgtacttcctgagcgacgtgaccgccgccgtgaaggagaaccagatgacccccaccaacctggccgtgtgcctggcccccagcctgttccacctgaacaccctgaagagagagaacagcagccccagagtgatgcagagaaagcagagcctgggcaagcccgaccagaaggacctgaacgagaacctggccgccacccagggcctggcccacatgatcgccgagtgcaagaagctgttccaggtgcccgaggagatgagcagatgcagaaacagctacaccgagcaggagctgaagcccctgaccctggaggccctgggccacctgggcaacgacgacagcgccgactaccagcacttcctgcaggactgcgtggacggcctgttcaaggaggtgaaggagaagttcaagggctgggtgagctacagcaccagcgagcaggccgagctgagctacaagaaggtgagcgagggcccccccctgagactgtggagaagcgtgatcgaggtgcccgccgtgcccgaggagatcctgaagagactgctgaaggagcagcacctgtgggacgtggacctgctggacagcaaggtgatcgagatcctggacagccagaccgagatctaccagtacgtgcagaacagcatggccccccaccccgccagagactacgtggtgctgagaacctggagaaccaacctgcccaagggcgcctgcgccctgctgctgaccagcgtggaccacgacagagcccccgtggtgggcgtgagagtgaacgtgctgctgagcagatacctgatcgagccctgcggccccggcaagagcaagctgacctacatgtgcagagtggacctgagaggccacatgcccgagtggtacaccaagagcttcggccacctgtgcgccgccgaggtggtgaagatcagagacagcttcagcaaccagaacaccgagaccaaggacaccaagagcagatag

SEQ ID NO: 161801 - DNA, 2028 bp, Artificial Sequence
  derived and/or modified sequence
gctgttgcatatagtgctggggtggacctggtttcaggacaccagggagcctggggtcggctcacaaaacccccattgttccttttccatcttcctttagaaacctaaagatgtaatgttctccgggtcatcagcagcagattttattttgacttcaggtcattcactgttgagctctggagttggctcccattgtgttaggctctcattgctgttttcccatcatgtgttatctgcgccttttaaccctaaatgctttcgatctcatcaagaactcagaagtgattcttacccttttttcaagacaaaagggaccttgtttttcacactctatcagatgcacctaattaggggccgtgcccaagttcatgaagaggatcaaggttccagactacaaggaccggagtgtgtttggggtcccactgacggtcaacgtgcagcgcacaggacaaccgttgcctcagagcatccagcaggccatgcgatacctccggaaccattgtttggatcaggttgggctcttcagaaaatcgggggtcaagtcccggattcaggctctgcgccagatgaatgaaggtgccatagactgtgtcaactacgaaggacagtctgcttatgacgtggcagacatgctgaagcagtattttcgagatcttcctgagccactaatgacgaacaaactctcggaaacctttctacagatctaccaatatgtgcccaaggaccagcgcctgcaggccatcaaggctgccatcatgctgctgcctgacgagaaccgggaggttctgcagaccctgctttatttcctgagcgatgtcacagcagccgtaaaagaaaaccagatgaccccaaccaacctggccgtgtgcttagcgccttccctcttccatctcaacaccctgaagagagagaattcctctcccagggtaatgcaaagaaaacaaagtttgggcaaaccagatcagaaagatttgaatgaaaacctagctgccactcaagggctggcccatatgatcgccgagtgcaagaagcttttccaggttcccgaggaaatgagccgatgtcgtaattcctataccgaacaagagctgaagcccctcactctggaagcactcgggcacctgggtaatgatgactcagctgactaccaacacttcctccaggactgtgtggatggcctgtttaaagaagtcaaagagaagtttaaaggctgggtcagctactccacttcggagcaggctgagctgtcctataagaaggtgagcgaaggaccccctctgaggctttggaggtcagtcattgaagtccctgctgtgccagaggaaatcttaaagcgcctacttaaagaacagcacctctgggatgtagacctgttggattcaaaagtgatcgaaattctggacagccaaactgaaatttaccagtatgtccaaaacagtatggcacctcatcctgctcgagactacgttgttttaagaacctggaggactaatttacccaaaggagcctgtgcccttttactaacctctgtggatcacgatcgcgcacctgtggtgggtgtgagggttaatgtgctcttgtccaggtatttgattgaaccctgtgggccaggaaaatccaaactcacctacatgtgcagagttgacttaaggggccacatgccagaatggtacacaaaatcttttggacatttgtgtgcagctgaagttgtaaagatccgggattccttcagtaaccagaacactgaaaccaaagacaccaaatctaggtgatcactgaagcaacgcaaccgcttccaccaccatggtgtttgtttctagaacttttgccagtccttgaagaatgggttctgtgtctaatcctgaaacaaagaaaactacaagctggagtgtaggaattgactatagcaatttgatacatttttaaagctgcttcctgtttgttgagggtctgtattcatagaccttgactggaatatgtaagactgtgcaaaaaaaaaaaaaaaatttatgtgtattcttattcaaa

SEQ ID NO: 161802 - protein, 1164 aa, Artificial Sequence
  derived and/or modified sequence
MPTMRRTVSEIRSRAEGYEKTDDVSEKTSLADQEEVRTIFINQPQLTKFCNNHVSTAKYNIITFLPRFLYSQFRRAANSFFLFIALLQQIPDVSPTGRYTTLVPLLFILAVAAIKEIIEDIKRHKADNAVNKKQTQVLRNGAWEIVHWEKVAVGEIVKVTNGEHLPADLISLSSSEPQAMCYIETSNLDGETNLKIRQGLPATSDIKDVDSLMRISGRIECESPNRHLYDFVGNIRLDGHGTVPLGADQILLRGAQLRNTQWVHGIVVYTGHDTKLMQNSTSPPLKLSNVERITNVQILILFCILIAMSLVCSVGSAIWNRRHSGKDWYLNLNYGGASNFGLNFLTFIILFNNLIPISLLVTLEVVKFTQAYFINWDLDMHYEPTDTAAMARTSNLNEELGQVKYIFSDKTGTLTCNVMQFKKCTIAGVAYGHVPEPEDYGCSPDEWQNSQFGDEKTFSDSSLLENLQNNHPTAPIICEFLTMMAVCHTAVPEREGDKIIYQAASPDEGALVRAAKQLNFVFTGRTPDSVIIDSLGQEERYELLNVLEFTSARKRMSVIVRTPSGKLRLYCKGADTVIYDRLAETSKYKEITLKHLEQFATEGLRTLCFAVAEISESDFQEWRAVYQRASTSVQNRLLKLEESYELIEKNLQLLGATAIEDKLQDQVPETIETLMKADIKIWILTGDKQETAINIGHSCKLLKKNMGMIVINEGSLDGTRETLSRHCTTLGDALRKENDFALIIDGKTLKYALTFGVRQYFLDLALSCKAVICCRVSPLQKSEVVEMVKKQVKVVTLAIGDGANDVSMIQTAHVGVGISGNEGLQAANSSDYSIAQFKYLKNLLMIHGAWNYNRVSKCILYCFYKNIVLYIIEIWFAFVNGFSGQILFERWCIGLYNVMFTAMPPLTLGIFERSCRKENMLKYPELYKTSQNALDFNTKVFWVHCLNGLFHSVILFWFPLKALQYGTAFGNGKTSDYLLLGNFVYTFVVITVCLKAGLETSYWTWFSHIAIWGSIALWVVFFGIYSSLWPAIPMAPDMSGEAAMLFSSGVFWMGLLFIPVASLLLDVVYKVIKRTAFKTLVDEVQELEAKSQDPGAVVLGKSLTERAQLLKNVFKKNHVNLYRSESLQQNLLHGYAFSQDENGIVSQSEVIRAYDTTKQRPDEW

SEQ ID NO: 161803 - DNA, 3495 bp, Artificial Sequence
  derived and/or modified sequence
atgcccaccatgagaagaaccgtgagcgagatcagaagcagagccgagggctacgagaagaccgacgacgtgagcgagaagaccagcctggccgaccaggaggaggtgagaaccatcttcatcaaccagccccagctgaccaagttctgcaacaaccacgtgagcaccgccaagtacaacatcatcaccttcctgcccagattcctgtacagccagttcagaagagccgccaacagcttcttcctgttcatcgccctgctgcagcagatccccgacgtgagccccaccggcagatacaccaccctggtgcccctgctgttcatcctggccgtggccgccatcaaggagatcatcgaggacatcaagagacacaaggccgacaacgccgtgaacaagaagcagacccaggtgctgagaaacggcgcctgggagatcgtgcactgggagaaggtggccgtgggcgagatcgtgaaggtgaccaacggcgagcacctgcccgccgacctgatcagcctgagcagcagcgagccccaggccatgtgctacatcgagaccagcaacctggacggcgagaccaacctgaagatcagacagggcctgcccgccaccagcgacatcaaggacgtggacagcctgatgagaatcagcggcagaatcgagtgcgagagccccaacagacacctgtacgacttcgtgggcaacatcagactggacggccacggcaccgtgcccctgggcgccgaccagatcctgctgagaggcgcccagctgagaaacacccagtgggtgcacggcatcgtggtgtacaccggccacgacaccaagctgatgcagaacagcaccagcccccccctgaagctgagcaacgtggagagaatcaccaacgtgcagatcctgatcctgttctgcatcctgatcgccatgagcctggtgtgcagcgtgggcagcgccatctggaacagaagacacagcggcaaggactggtacctgaacctgaactacggcggcgccagcaacttcggcctgaacttcctgaccttcatcatcctgttcaacaacctgatccccatcagcctgctggtgaccctggaggtggtgaagttcacccaggcctacttcatcaactgggacctggacatgcactacgagcccaccgacaccgccgccatggccagaaccagcaacctgaacgaggagctgggccaggtgaagtacatcttcagcgacaagaccggcaccctgacctgcaacgtgatgcagttcaagaagtgcaccatcgccggcgtggcctacggccacgtgcccgagcccgaggactacggctgcagccccgacgagtggcagaacagccagttcggcgacgagaagaccttcagcgacagcagcctgctggagaacctgcagaacaaccaccccaccgcccccatcatctgcgagttcctgaccatgatggccgtgtgccacaccgccgtgcccgagagagagggcgacaagatcatctaccaggccgccagccccgacgagggcgccctggtgagagccgccaagcagctgaacttcgtgttcaccggcagaacccccgacagcgtgatcatcgacagcctgggccaggaggagagatacgagctgctgaacgtgctggagttcaccagcgccagaaagagaatgagcgtgatcgtgagaacccccagcggcaagctgagactgtactgcaagggcgccgacaccgtgatctacgacagactggccgagaccagcaagtacaaggagatcaccctgaagcacctggagcagttcgccaccgagggcctgagaaccctgtgcttcgccgtggccgagatcagcgagagcgacttccaggagtggagagccgtgtaccagagagccagcaccagcgtgcagaacagactgctgaagctggaggagagctacgagctgatcgagaagaacctgcagctgctgggcgccaccgccatcgaggacaagctgcaggaccaggtgcccgagaccatcgagaccctgatgaaggccgacatcaagatctggatcctgaccggcgacaagcaggagaccgccatcaacatcggccacagctgcaagctgctgaagaagaacatgggcatgatcgtgatcaacgagggcagcctggacggcaccagagagaccctgagcagacactgcaccaccctgggcgacgccctgagaaaggagaacgacttcgccctgatcatcgacggcaagaccctgaagtacgccctgaccttcggcgtgagacagtacttcctggacctggccctgagctgcaaggccgtgatctgctgcagagtgagccccctgcagaagagcgaggtggtggagatggtgaagaagcaggtgaaggtggtgaccctggccatcggcgacggcgccaacgacgtgagcatgatccagaccgcccacgtgggcgtgggcatcagcggcaacgagggcctgcaggccgccaacagcagcgactacagcatcgcccagttcaagtacctgaagaacctgctgatgatccacggcgcctggaactacaacagagtgagcaagtgcatcctgtactgcttctacaagaacatcgtgctgtacatcatcgagatctggttcgccttcgtgaacggcttcagcggccagatcctgttcgagagatggtgcatcggcctgtacaacgtgatgttcaccgccatgccccccctgaccctgggcatcttcgagagaagctgcagaaaggagaacatgctgaagtaccccgagctgtacaagaccagccagaacgccctggacttcaacaccaaggtgttctgggtgcactgcctgaacggcctgttccacagcgtgatcctgttctggttccccctgaaggccctgcagtacggcaccgccttcggcaacggcaagaccagcgactacctgctgctgggcaacttcgtgtacaccttcgtggtgatcaccgtgtgcctgaaggccggcctggagaccagctactggacctggttcagccacatcgccatctggggcagcatcgccctgtgggtggtgttcttcggcatctacagcagcctgtggcccgccatccccatggcccccgacatgagcggcgaggccgccatgctgttcagcagcggcgtgttctggatgggcctgctgttcatccccgtggccagcctgctgctggacgtggtgtacaaggtgatcaagagaaccgccttcaagaccctggtggacgaggtgcaggagctggaggccaagagccaggaccccggcgccgtggtgctgggcaagagcctgaccgagagagcccagctgctgaagaacgtgttcaagaagaaccacgtgaacctgtacagaagcgagagcctgcagcagaacctgctgcacggctacgccttcagccaggacgagaacggcatcgtgagccagagcgaggtgatcagagcctacgacaccaccaagcagagacccgacgagtggtag

SEQ ID NO: 161804 - DNA, 3495 bp, Artificial Sequence
  derived and/or modified sequence
atgccaactatgagacggactgtgtccgaaattcggtcccgcgcggaaggatatgaaaagacagatgacgtgtcagagaaaacatccctcgccgaccaggaggaggtgcggacaatcttcattaatcagccccagctgacaaagttctgcaacaaccatgtgagcaccgccaaatataatatcattacattcctgcctcggttcttatactctcagtttagacgggcagcaaactccttcttcctgttcattgcattgctccagcaaatcccagacgtgtctcctaccgggcggtatacaaccctcgtaccactcctcttcattctggccgtggctgccattaaagagatcattgaagatatcaagaggcataaggcggacaatgcagtgaacaagaagcagacacaggtgctgcgaaacggtgcctgggagatagtccactgggaaaaagtggccgtgggcgaaatagtaaaggttacaaatggcgaacacttgcctgcagacctcatttccttaagtagtagcgaacctcaggcaatgtgttatatcgaaacctcaaaccttgacggagaaacgaacttgaagatacggcaaggcctccccgcgacttctgatataaaagacgtcgattccttgatgcgcatctccgggcgaatcgagtgtgagtcccccaacagacatctttacgacttcgttggcaatatcagattagatgggcacggtacagtccctctgggtgccgaccagatattattgcggggagcgcagttgcgcaacactcagtgggttcatgggattgtagtctataccgggcacgacaccaaacttatgcagaacagcacttcacctcccttgaagctgagtaacgttgagcgtatcaccaatgtacagatcctgatcctgttctgcattctcattgccatgtcactggtttgcagtgtggggagcgcaatttggaatcgcagacacagcgggaaagactggtaccttaacctgaattacgggggcgcgtcaaacttcggactgaattttctcacatttatcattctcttcaacaacctaatcccaatcagtctcctagtgactcttgaggtagtgaagttcacccaggcctattttataaattgggacctggatatgcactacgagcccactgatacagcagctatggctagaacgagcaacctgaatgaggaacttggacaggttaagtacatatttagcgataagacaggcacgttaacttgcaatgtgatgcagttcaagaagtgcacaatcgcaggagtcgcatacggccatgtccctgaaccagaggactatggctgttccccggacgagtggcaaaacagccagtttggcgacgaaaaaacattttccgactcatctctgctcgagaacctacagaataaccatccaacagccccgattatttgtgagtttctcactatgatggccgtgtgccatacagcagttcccgaaagagagggtgataagatcatataccaagcagcatctccagatgagggcgcattagtcagagctgccaagcaactgaactttgtgtttaccggaagaactccagatagcgtcataatcgactctttgggccaggaggagcggtatgagttactcaacgtattggaattcacatccgcccgcaagagaatgtctgttatcgttcgcactccctctgggaagcttagactatactgcaagggcgccgataccgttatctacgacagacttgccgaaacctccaagtataaagagattacgctcaaacacctcgaacagtttgctaccgaaggtctgagaaccctgtgttttgcagtagccgagatttcggaatccgactttcaggagtggagagcagtctatcagagggcctctacgtctgtacaaaacaggttgctgaaattggaagagagttacgagctgatcgagaaaaatcttcaattgctgggagccacagctattgaggataagctacaagaccaggttcccgaaacgatcgagacgcttatgaaggctgatatcaagatttggatcctgacaggagataagcaggaaaccgcgattaatatcggacatagttgcaaattgctcaaaaaaaacatgggtatgattgtgattaacgaggggtccctggacggtacccgcgagactttgtcccggcactgcactactctgggcgacgccctgaggaaagagaacgactttgccctcatcattgacggtaaaacactgaagtacgcacttacattcggcgttcggcagtacttcctggacctggccttgtcctgtaaggctgtgatctgttgcagagttagtcctttgcagaagtcggaggttgtggaaatggtaaagaagcaggtaaaggttgttaccttagccattggagacggtgctaatgatgtgagcatgattcagacagcacacgtgggagttggcatttcaggcaacgaaggtctgcaggctgccaatagttccgactacagcatagcccagttcaaatatctgaagaatctgctgatgatccacggagcatggaactacaaccgcgtgtctaagtgtatcttgtactgcttttacaaaaacatcgtgctctatataatcgagatctggtttgccttcgtcaacggctttagcggccagattcttttcgaaaggtggtgtatcgggctgtataacgttatgttcacagctatgccacccctcacattggggatctttgaacgctcctgccgcaaagagaacatgctgaagtaccccgagctctacaagacttctcagaacgcacttgacttcaacactaaggtattttgggtgcactgtctcaatggccttttccactcagtaatcctgttttggttccccctcaaagccctgcagtatggtaccgccttcggtaatggaaagacttctgactatctcctgctgggcaatttcgtgtataccttcgtggtaattaccgtgtgccttaaagctgggctggagacttcttattggacatggttctcgcatatagctatttggggctctattgccctgtgggttgttttctttggaatctattcaagcctctggcccgcgataccaatggctccggacatgtctggagaagcagccatgctctttagcagcggagttttctggatggggcttttgtttattccggttgcaagcctgctcctggacgtcgtttacaaggttattaagcgcaccgcctttaagaccctggtggatgaagtgcaggagcttgaggctaagtctcaagacccaggagcggtggtgctaggtaagtcgctgaccgagagggcccagttactgaagaatgtgttcaaaaagaatcatgtaaacctgtacagatctgaatcgctacagcagaacctcctacacggatacgcattctcgcaggatgagaacgggatcgtgtctcaaagcgaagtgataagagcctacgatacaaccaaacagagacctgatgagtggtag

SEQ ID NO: 161805 - DNA, 3495 bp, Artificial Sequence
  derived and/or modified sequence
atgcccaccatgagaagaacagtgtctgagatccgcagcagagctgagggctatgagaagacagatgatgtgtctgagaagaccagcctggccgaccaggaggaggtgaggaccatcttcatcaaccagccccagctgaccaagttctgcaacaaccacgtgtccacagccaagtacaacatcatcaccttcctgccccgcttcctgtacagccagttccggcgggccgccaacagcttcttcctgttcatcgccctgctgcagcagatcccagatgtgagccccaccggccgctacaccaccctggtgcccctgctcttcatcctggccgtggccgccatcaaggagatcatcgaggacatcaagaggcacaaggctgacaatgctgtgaacaagaagcagacccaggtgctgagaaatggagcctgggagatcgtgcactgggagaaggtggccgtgggggagatcgtgaaggtgaccaatggagagcacctgcctgctgacctgatcagcctgagcagcagcgagccccaggccatgtgctacatcgagaccagcaacctggatggagagaccaacctgaagatccggcagggcctgcctgccaccagtgacatcaaggatgtggacagcctgatgaggatcagcggcagaattgaatgtgagagccccaacagacacctgtatgactttgtgggcaacatccggctggatggccacggcaccgtgcccctgggcgctgaccagatcctgctgcggggggcccagctgaggaacacccagtgggtgcacggcatcgtggtgtacacaggccatgacaccaagctgatgcagaacagcaccagcccccccctgaagctgagcaatgtggagcgcatcaccaacgtgcagatcctgatcctcttctgcatcctgattgccatgagcctggtgtgcagcgtgggcagcgccatctggaacagaagacacagcggcaaggactggtacctgaacctgaactacggcggggccagcaactttggcctgaacttcctgaccttcatcatcctcttcaacaacctgatccccatcagcctgctggtgaccctggaggtggtgaagttcacccaggcctacttcatcaactgggacctggacatgcactatgagcccacagacacagctgccatggcccggaccagcaacctgaatgaggagctgggccaggtgaagtacatcttcagtgacaagacaggcaccctgacctgcaatgtgatgcagttcaagaagtgcaccatcgccggcgtggcctacggccacgtgcctgagcctgaggactatggctgcagcccagatgagtggcagaacagccagtttggagatgagaagaccttcagtgacagcagcctgctggagaacctgcagaacaaccaccccacagcccccatcatctgtgagttcctgaccatgatggctgtgtgccacacagctgtgcctgagcgggagggggacaagatcatctaccaggccgccagcccagatgaaggagccctggtgcgggccgccaagcagctgaactttgtgttcaccggccgcaccccagattctgtcatcatcgacagcctgggccaggaggagagatatgagctgctgaatgtgctggagttcaccagcgccaggaagaggatgtctgtgattgtgaggacccccagcggcaagctgcggctgtactgcaagggagctgacaccgtcatctatgaccggctggccgagaccagcaagtacaaggagatcaccctgaagcacctggagcagtttgccacagagggcctgcggaccctgtgctttgctgtggccgagatcagcgagagtgacttccaggagtggagggctgtgtaccagagggccagcacctctgtgcagaaccggctgctgaagctggaggagagctatgagctgattgagaagaacctgcagctgctgggcgccacagccatcgaggacaagctgcaggaccaggtgcctgagaccatcgagaccctgatgaaggctgacatcaagatctggatcctgactggagacaagcaggagacagccatcaacatcggccacagctgcaagctgctgaagaagaacatgggcatgatcgtcatcaatgaaggcagcctggatggcacccgggagaccctgagccgccactgcaccaccctgggagatgccctgaggaaagaaaatgactttgccctgatcattgatggcaagaccctgaagtatgccctgacctttggagtgcggcagtacttcctggacctggccctgagctgcaaggccgtcatctgctgccgggtgagccccctgcagaagtctgaggtggtggagatggtgaagaagcaggtgaaggtggtgaccctggccatcggagatggagccaatgatgtgtccatgatccagacagcccacgtgggcgtgggcatctctggaaatgaaggcctgcaggccgccaacagcagtgactacagcatcgcccagttcaagtacctgaagaacctgctgatgattcatggagcctggaactacaacagagtgtccaagtgcatcctgtactgcttctacaagaacatcgtgctgtacatcatcgagatctggtttgcctttgtgaatggcttcagcggccagatcctgtttgagcgctggtgcatcggcctgtacaacgtgatgttcaccgccatgccacccctgaccctgggcatctttgagaggagctgcaggaaggagaacatgctgaagtacccagagctgtacaagaccagccagaatgccctggacttcaacaccaaggtgttctgggtgcactgcctgaatggcctcttccacagcgtcatcctcttctggttccccctgaaggccctgcagtatggaacagcctttggaaatggcaagaccagtgactacctgctgctgggcaactttgtgtacacctttgtggtgatcaccgtgtgcctgaaggccggcctggagaccagctactggacctggttcagccacatcgccatctggggcagcatcgccctgtgggtggtgttcttcggcatctacagcagcctgtggccagccatccccatggccccagacatgtctggagaggccgccatgctgttcagcagcggggtcttctggatgggcctgctcttcatccctgtggccagcctgctgctggatgtggtgtacaaggtgatcaagaggacagccttcaagaccctggtggatgaggtgcaggagctggaggccaagagccaggaccccggggctgtggtgctgggcaagagcctgacagagcgggcccagctgctgaagaatgtgttcaagaagaaccacgtgaacctgtacagaagtgagagcctgcagcagaacctgctgcacggctacgccttcagccaggatgaaaatggcatcgtgtcccagagcgaggtgatccgggcctatgacaccaccaagcagaggccagatgagtggtag

SEQ ID NO: 161806 - DNA, 3495 bp, Artificial Sequence
  derived and/or modified sequence
atgcccaccatgcggcggaccgtgagcgagatccggagccgggccgaggggtacgagaagaccgatgacgtatcagaaaaaacctccctagccgaccaagaagaagtccgcaccatctttattaatcagccccagcttacaaaattctgtaacaaccacgtatctaccgccaaatacaatataatcaccttcctccctaggttcctgtactctcagttccgccgagcggctaacagtttcttcctatttatcgccctgctccagcagattccggatgtctcacctacggggcgttacactacgctggtaccactactcttcattttagctgtcgctgccatcaaagaaattatagaagacatcaaaaggcacaaagcagacaatgcggtcaataaaaaacagacacaggtgctgcggaatggagcgtgggaaattgtgcattgggaaaaggtggccgtcggcgagatcgttaaagtgactaacggcgaacacctcccagcagatcttattagcttgtccagctctgaaccacaggctatgtgttacatcgagacctcaaatttagacggagaaactaacctgaagatacgacagggcctgcccgccacctcagacatcaaggacgtcgactcactgatgcgcatttctggccggatcgaatgcgagtccccaaaccgacacctctacgatttcgtgggcaacattagactagatgggcacgggacggtccctctcggtgccgaccagattctgctcaggggcgctcagctgagaaacacccaatgggtgcacggaatagtggtttatacaggtcacgacacaaaattgatgcagaacagcactagccccccactgaaactaagcaatgtggagaggatcacaaacgttcagatccttattctgttttgtatccttatagccatgagcctggtctgctcagttggcagtgcaatttggaataggaggcattcaggtaaggactggtatctgaatctcaattatggaggtgcttctaacttcggccttaatttcttgaccttcatcattctgttcaataacctaatccctatatccctcctggtgacactggaagtagtgaaattcacccaggcgtatttcatcaattgggatttggatatgcactacgaacccacagacacggctgctatggcaagaacctccaacttaaatgaggagctgggacaggttaaatatatatttagtgacaagacggggacgctgacctgcaacgtgatgcaatttaaaaaatgtaccatcgcaggcgtggcatatggccacgtacctgagcctgaggactatggctgttctcctgatgaatggcagaacagccagtttggcgacgagaagacattcagtgatagctctcttctagaaaacctgcagaataatcaccctacggctcccatcatctgcgaattcctgaccatgatggccgtttgccacaccgctgtgccagaacgagagggggacaaaattatctaccaggccgcatctccagacgaaggagctttggttcgggccgcaaaacaattaaactttgttttcactggacgcacacccgactccgtcattatcgactctctgggtcaggaggaaagatacgagctcctgaacgttctcgagttcacttcagccagaaagcgcatgtcagtcatcgtccggacaccttcgggcaagctgcgactttactgtaagggggcagataccgtgatctatgaccgactggccgaaacatcaaaatataaagagataaccctaaagcatcttgagcagttcgccaccgagggcttgagaacattatgctttgccgtggctgaaatttccgagtccgattttcaggagtggcgtgccgtgtaccaaagggcatccacctcagtgcagaatcggctgctcaagcttgaggaatcatatgagttaatcgaaaaaaacttacagttactgggagcgaccgccattgaagacaaacttcaggaccaagtgcccgagacaatcgagaccctcatgaaagctgacatcaagatctggattctgaccggcgacaaacaggaaacggccataaatatcgggcacagttgcaaattactcaaaaagaacatgggaatgatcgtgatcaacgaagggagcctcgatgggactcgcgagacactatctcggcattgtaccacactcggtgacgctttgcggaaggaaaacgacttcgccctcatcatcgatggcaagacacttaagtacgccctgacattcggggtgcgacagtattttctggacctggcattaagttgtaaggccgtcatctgttgtcgagtatcgcctctgcaaaagtccgaggtggtggagatggtgaagaaacaggtcaaggttgtcaccctggctataggcgatggcgctaatgatgtttcaatgatccaaacggctcacgtgggggttggaatttctggaaacgaagggctacaggcagcaaattccagcgactacagcatcgcccagtttaagtatctgaagaacttgttgatgatccacggagcctggaattacaatagggtgtctaaatgtatcttgtactgtttttacaaaaatatcgtgctgtacatcattgaaatctggttcgccttcgttaatggtttctccggccagattctcttcgagaggtggtgtatcggcctttacaacgttatgtttaccgctatgccccctcttacactcgggatatttgagcggtcctgccggaaagagaatatgctcaagtatcctgagttatacaagacttcacagaatgcgctagactttaacactaaagtgttctgggtgcattgcctgaacggcctgtttcactctgtcatcctgttttggttcccattgaaagccctacagtatggcacagcctttggcaatggcaaaacttcagattatctgctccttggaaatttcgtgtacactttcgtcgtcataaccgtctgcttgaaggcgggactcgagactagctattggacctggttctcacacatagctatctggggctcaattgcgctgtgggtagtcttcttcggcatctactcaagcctctggcctgccattccaatggcacctgatatgtctggggaggcggctatgctgttttcttctggcgttttctggatgggcctgttgtttattcccgtagcatccttactgctggacgtggtgtacaaagtaatcaaaaggacagcctttaaaacactcgtcgatgaggtccaggagctggaggccaagtcgcaggaccccggcgcggtagtgttgggcaaatctctgacagagagggctcagctgctgaaaaatgtgtttaagaaaaaccacgtcaacctttatcgaagcgagtcactccagcagaatctgctgcacggctacgccttcagccaggacgaaaacgggatagtgtcacagagtgaggtcatacgggcctacgatactacaaagcaacggcctgatgaatggtag

SEQ ID NO: 161807 - DNA, 3495 bp, Artificial Sequence
  derived and/or modified sequence
atgcctacaatgagaaggacagtctccgaaatccggtcccgcgctgaaggctacgagaagaccgacgacgtgtctgaaaaaactagtctggccgaccaggaggaggtgcgcaccatcttcattaaccaaccgcaactgaccaaattctgcaataaccacgtcagtaccgccaaatacaatatcatcacattcctcccgcgttttctgtacagccagttcaggcgtgccgcaaatagtttttttctgtttatcgctcttctccaacagatccccgatgtttctcctacagggaggtatacgactcttgtccccctcttatttattctggccgttgcagccattaaggaaattatcgaggacattaagcgtcacaaggccgacaatgcagtaaataaaaagcaaactcaggtcttgaggaacggggcatgggagatcgttcactgggaaaaagtggctgtgggagaaatcgtgaaggttacaaatggggagcacttacccgcagacctcatcagcctgtcttcatcagagccacaggcaatgtgttacatcgaaacatctaatcttgatggagagaccaacctgaagatccgccagggcctgccagccaccagtgacatcaaggacgttgatagcctgatgcggatctcaggtagaatagaatgtgagagtccaaataggcacctttacgatttcgtcggcaacatccgactggatggtcacgggaccgttccactgggcgcagaccagatcctgctgcgaggggctcagctcaggaatactcaatgggttcacggcatcgtggtttacaccggccacgacaccaaactgatgcagaattcaacatccccgccactgaaactgagcaatgttgagagaatcacaaatgtccagatcctcatactattctgcatcttgatcgccatgtctttagtgtgctctgtcggctccgctatttggaatcgccgacattccggcaaagattggtatttgaacttaaattatgggggtgcaagtaatttcgggctcaacttcctgaccttcattatactgtttaataatcttattcccattagcttactggttacactagaggttgtgaagttcactcaggcctactttatcaattgggatctggacatgcattacgaaccgactgacaccgcggcaatggcccgaaccagtaacctgaacgaggaactcgggcaagtgaaatacatcttctcggataaaaccggcactctgacgtgtaacgtaatgcagttcaagaagtgcaccattgccggagttgcttatgggcatgtcccagagccggaggactatggttgttcgcctgatgagtggcaaaacagtcagtttggtgatgagaagacattcagcgactcttccctactggagaaccttcaaaataatcaccctactgccccaatcatctgtgagttcctgaccatgatggccgtgtgccacacagctgtgccagagcgcgagggcgacaaaatcatctaccaagccgctagcccggatgagggcgcattggtgagggccgcaaaacagcttaacttcgtctttactggccgaacccctgattcagtgattattgactcactcgggcaagaagaaagatatgaattgctgaacgtgctggagttcacatcagccaggaagagaatgagtgttattgttcgtactcctagcggcaagctgcgactgtactgcaagggcgctgacactgtgatctacgataggctcgctgagacctccaaatacaaggaaataacactcaagcatctggagcaatttgcgactgaaggcctccggaccctgtgctttgccgtagctgaaatcagcgaatccgatttccaggaatggcgcgctgtttaccagcgcgcaagcacatctgtacagaatcgcctgctcaagctggaggagagctacgagctgattgaaaaaaacctgcagctgctgggagcgaccgccatcgaagacaaacttcaggatcaggtgcctgaaaccattgaaactctgatgaaagccgacattaagatctggatcttgacaggcgataaacaggaaactgctatcaacatcggccattcctgcaagctgcttaaaaagaatatggggatgatagtgattaacgaaggatcgctcgacgggactagagagacgctttcgaggcattgcaccacacttggagatgctttgcggaaagaaaatgactttgccctcattatcgacggtaaaaccttgaaatacgccctgacatttggggtccgtcagtatttcctggatctcgcactgagctgtaaagcagtcatctgttgcagggtgtcccctttacaaaagtcagaagtggtggagatggtgaaaaagcaggtcaaggtagtaacactggccattggcgatggcgcaaacgacgtgagtatgatccaaaccgctcatgtgggggtgggcatttcaggaaacgaggggttgcaggcagccaactcaagtgattattctattgcccagttcaaatatctgaaaaatctgctgatgatccacggagcctggaactacaaccgggtttctaagtgcattctctactgtttctacaagaatatcgtgttgtacattattgaaatctggttcgccttcgtcaacgggttttctggccagattctgttcgaaaggtggtgtatcggtctgtataatgtcatgtttacagcaatgccacctctgacattagggatattcgaacgctcttgtcggaaggaaaatatgctgaagtaccctgagttgtataagacctcacagaatgccttggattttaacaccaaagtgttttgggtccactgtttgaacgggctatttcattcagtgattcttttttggtttcctcttaaggccttgcagtatgggacagcgtttggcaatggaaaaacaagtgattatctgctgctcgggaattttgtttacacattcgtcgttattacagtctgcttgaaggccggactggagacctcgtattggacatggttctcacacattgctatctggggaagtatagctctttgggtcgtgttttttgggatttacagttctttgtggccggcaatcccaatggcccctgacatgtcaggggaagctgccatgcttttcagcagtggtgtcttttggatgggacttctgttcattcccgtggcttccctcttgctggatgtcgtgtacaaggttatcaaacgaacagcttttaaaacccttgtggacgaagtccaggaactggaggccaagtcccaagatcccggagctgtggttcttggtaagtccttaaccgagcgcgcacagctcttaaagaatgtttttaaaaaaaaccatgtcaacttatacaggagcgaaagcctccagcagaatctgttgcatgggtatgctttttcccaagatgagaatgggattgtctcacagagtgaggtcatacgcgcatacgatacaaccaaacagaggccagatgaatggtag

SEQ ID NO: 161808 - DNA, 8270 bp, Artificial Sequence
  derived and/or modified sequence
aagagctcgcccagctctgcgggcgccgccaccttcgccgccaccgctgcctttctcctcctcctgtcggcgtgcgggggccgcgcccggcggcagctctgccctaggtgggcggcggcgcggcccaggctgcagctgagcgctctgcgcggcgcagccgggtctcccgcgtgtaccacgccgtgacaggtgcagagtccgggctgaggacccacctgcagccgccgccgcgatgcccaccatgcggaggaccgtgtcggagatccgctcgcgcgccgaaggttatgagaagacagatgatgtttcagagaagacctcactggctgaccaggaggaagtaaggactattttcatcaaccagccccagctgacaaaattctgcaataaccatgtcagcactgcaaaatacaacataatcacattccttccaagatttctctactctcagttcagaagagctgctaattcattttttctctttattgcactgctgcagcaaatacctgatgtgtcaccaacaggtcgttatacaacactggttcctctcttatttattttagctgtggcagctatcaaagagataatagaagatattaaacgacataaagctgataatgcagtgaacaagaaacaaacgcaagttttgagaaatggtgcttgggaaattgtccactgggaaaaggtggcagtaggggagatagtgaaagtgaccaatggggaacatctcccagcagatctcatcagtctgtcctcaagtgagccccaagccatgtgctacattgaaacatccaacttagatggtgaaacaaacttgaaaattagacagggcttaccagcaacatcagatatcaaagacgttgacagtttgatgaggatttctggcagaattgagtgtgaaagtccaaacagacatctctacgattttgttggaaacataaggcttgatggacatggcaccgttccactgggagcagatcagattcttcttcgaggagctcagttgagaaatacacagtgggttcatggaatagttgtctacactggacatgacaccaagctgatgcagaattcaacaagtccaccacttaagctctcaaatgtggaacggattacaaatgtacaaattttgattttattttgtatcttaattgccatgtctcttgtctgttctgtgggctcagccatttggaatcgaaggcattctggaaaagactggtatctcaatctaaactatggtggcgctagtaattttggactgaatttcttgaccttcatcatccttttcaacaatctcattcctatcagcttattggttacattagaagttgtgaaatttacccaggcatacttcataaattgggatcttgacatgcactatgaacccacagacactgctgctatggctcgaacatctaatctgaatgaggaacttggccaggttaaatacatattttctgacaaaactggtactctgacatgcaatgtaatgcagtttaagaagtgcaccatagcgggagttgcttatggccatgtccctgaacctgaggattatggctgctctcctgatgaatggcagaactcacagtttggagatgaaaaaacatttagtgattcatcattgctggaaaatctccaaaataatcatccaactgcacctataatatgtgaatttcttacaatgatggcagtctgtcacacagcagtgccagagcgagaaggtgacaagattatttatcaagcagcatctccagatgagggagcattggtcagagcagccaagcaattgaattttgttttcactggaagaacacccgactcggtgattatagattcactggggcaggaagaaagatatgaattgctcaatgtcttggagtttaccagtgctaggaaaagaatgtcagtgattgttcgcactccatctggaaagttacgactctactgcaaaggagctgacactgtaatttatgatcgactggcagagacgtcaaaatacaaagaaattaccctaaaacatttagagcagtttgctacagaagggttaagaactttatgttttgctgtggctgagatttcagagagcgactttcaggagtggcgagcagtctatcagcgagcatctacatctgtgcagaacaggctactcaaactcgaagagagttatgagttgattgaaaagaatcttcagctacttggagcaacagccattgaggataaattacaagatcaagtgcctgaaaccatagaaacgctaatgaaagcagacatcaaaatctggatccttacaggggacaagcaagaaactgccattaacatcggacactcctgcaaactgttgaagaagaacatgggaatgattgttataaatgaaggctctcttgatggaacaagggaaactctcagtcgtcactgtactacccttggtgatgctctccggaaagagaatgattttgctcttataattgatgggaaaaccctcaaatatgccttaacctttggagtacgacagtatttcctggacttagctttgtcatgcaaagctgtcatttgctgtcgggtttctcctcttcaaaaatctgaagttgttgagatggttaagaaacaagtcaaagtcgtaacgcttgcaatcggtgatggagcaaatgatgtcagcatgatacagacagcgcacgttggtgttggtatcagtggcaatgaaggcctgcaggcagctaattcctctgactactccatagctcagttcaaatatttgaagaatttactgatgattcatggtgcctggaactataacagagtctccaagtgcatcttatactgcttctacaagaatatagtgctctatattatcgagatctggtttgcctttgttaatggcttttctggacagatcctctttgaaagatggtgtataggtctctataacgtgatgtttacagcaatgcctcctttaactcttggaatatttgagagatcatgcagaaaagagaacatgttgaagtaccctgaattatacaaaacatctcagaatgccctggacttcaacaccaaggttttctgggttcattgtttaaatggcctcttccactcagttattctgttttggtttccactaaaagcccttcagtatggtactgcatttggaaatgggaaaacctcggattatctgctactgggaaactttgtgtacacttttgtggtgataactgtgtgtttgaaagctggattggagacatcatattggacatggttcagccacatagcgatatgggggagcatcgcactctgggtggtgttttttggaatctactcatctctgtggcctgccattccgatggcccctgatatgtcaggagaggcagccatgttgttcagttctggagtcttttggatgggcttgttattcatccctgtggcatctctgctccttgatgtggtgtacaaggttatcaagaggactgcttttaaaacattggtcgatgaagttcaggagctggaggcaaaatctcaagacccaggagcagttgtacttggaaaaagcctgaccgagagggcgcaactgctcaagaacgtctttaagaagaaccacgtgaacttgtaccgctctgaatccttgcaacaaaatctgctccatgggtatgcgttctctcaagatgaaaatggaatcgtttcacagtctgaagtgataagagcatatgataccacgaaacagaggcccgacgaatggtgatggggagagcctgaaaggcaggctctgttacctctctaaggagagctaccaggttgtcaccgcagtctgctaaccaattccagtctggtccatgaagaggaaaggtagatctgagctcatctcgctgatggacattcagattcatgtatattatagacataagcactgtgcaactgtactgtaacaccatctcttttggatttttttaaggtatttgctaagtctttgtaaacggaaattgaaaatgacctggtatcttgccagagggctttcttaaacggagaataagtcagtattcttatgccattactgtggggctgtaactgactgtcagtttattggctgtaccacaaggtaaccaaccattaaaaaactctaaatgatatttagttaaagggactcttggtatccagacttagatttcaggatatgctgaaacaaaccagcattcttaaggaactgactcaccttcctgagcaaaatttctaaacaagcatttgtgtccaaaattgtcttgataaatgtttgccaaagaggttcagtaagtgtttttctagttcagtagtcatatgcccagaaatgtaagagaaagtttacttccagttccgctgtaagatctgcatgcctgactttccaaatgtaagagtgatttacaaaaatgaatatttcaaggcatttgctactaaaatcggtgatgttgcacctttggccttacaaatgcttctttgttgtttgtcgtgtttatttgttagaggacacacgtgttaatgtgactctgttgttatgacactgatttttcaaactatgtatgtttcaggtatttctgatgaagtttcatcatcatttagatttttctaaaaatctggctaatgcagtagattgagtgatgtcattttgtcttaaagtttttcctcttaagaaacatatgctacgtatttacgtgggatttccaaagcttctgttgcaatatttggaataacatgtcagataaatgcatgggcttttgtcctgtgttccagttcccactagagatgcctgtgtcttgtgtagcacacccagtgttatggtgactgccccctatactgaagactgaaaattatttcacagttcactcatcaaatagttcccaaaattcgtcacatgctgcttattgggacaaataggtagtacattttccccatttaaaaaatgcggattttactcaggccggtaactttacagtcagaggacacgttcatcatgagtagcttttgttagtatgttttaaaatgtatcttcagttcaattattttcagcatttacaagacatctgaaaatggctattttgctaccaacagtaaatgaaggggctgtttaaaaaccacaaccagttttctacactattttttaaataatactttcatttgaaaaaaaggaattagttttcagatacacttcagagattgaagcaaactatttgccttttactcaaaagcctgcttgcctttacatggacttaccagcaaaataggtagaactttctcttttaaaaaaagtcaactagaattgagaagaggtgattttttttcagatcgcttctcgagtttaatattttcacattcttttcaccctttttctcaatctagatttaaaattaggatatatgtcatttccttgtctgtatttgtagctccttagttaccagtatgcctctccattttctacaaataagaggttataacacatatacataattctaaccttaagggaacacacgtttacatactttacttcccaagcccttcctgtttggggtacagattgagagagtcatgaatcaacacatctagcaagaccacaggtgtaagagtctaagatcgtcttcaaaattctgaagtcccagtctttacctgtccagtgaatgaatattcagagcagcttttcctgggcttcccagtggtgatagctgaggtcaaaccacaaaaaataagaaagcaagagtgaaatgcacccctccagagaaacactttgtagtgtttaattctgttaatagagaagagctgcttctgtttgcgctcacttcatcagtggcacccttctgcagaattttaatataaaaacattatggatataatagaactggattttctgacttaaaaatgtaagttttattttaatcttgaaacgtggattgtttctgtggagctcttaaacatgagaagaatacttacggttgataatgtgtaacatgatctgaaatgtgactaatttgagcctctttgtcccatcgtcctgtttttgaattattgacattgtcagtctctttgcttcctgggtgagacttggggtttgagggacagggaatgaccttcttggtgaaacttaaaatataacattgcaattgcagtgactttacagtgttaaattagagaaaatagtctgattttttaaaccttccttaactggaaaaaagtcacatggttttaccaggattgaaataaacagtcaatgtgacttttaacatgtgtttttttgaaataaagggcacgtactcttcaattaaaaagttccttatagggactctggcaaatgctaacacagttgctttacaatgtttacaattcagacaatacgacttataatagaaaatcctcattcatttagcattgaaaagctggaagttgcttctttaatgttgaatagtatacagtggtattgagcatggactttctaaatgttttatatatacatataaaaatatattggtgtctcacacccagaaagatgttatattgtagatattattaggaaaacagtgtttctcaggaacgttgtaaattttaaatgatatatgtacttcccgtcctcccacctccactctgtgctctaatgtgagactgcttcagcagtgttgctaagttaatggaaaactttttctaatcaagtcaggtgaatgtgtattctgctaaataatgttagccatttacatgaattgtatggtcattaaatggaatcagtgattcctctttaatttccagaggggaaatgaattatggaaatcagtcagcattctgatcattaaattttatactttaattttgccgttcagcattctaaatatccaatgtgaaagtcacatgataatttgttttgcattgcgtgcactgtacaacacttacaacttgtcatttaaaatgttttctcgggaaatgaatgctagtcagaaagtaatagattgtattattcatagttttaaaattatgacaatgtcataattactacaaagctaaataatcgtgtttatttttgtgcagttgccctttgatagttcctggttttaaaacctattaagtgtataatcttacaaatagtcatctacaaaatttatggagaaagtgcccagcccattcacatcacatggaccaggaattcttttgtaaatgacttaaggtaacatcatgcagttcagtgcctaataaatgctttttaatgatgaacatttctataatgactcgtaagataccatagtctgatttttctcacattaaaataactgaagtcacttgtgtaacgtagttatactttgctgcattttaattaaccttcaacagctattaaagtggaatgtaagttaaattttgaaggaaaggaaataaatgttttccatatttcgtcttgatttactttctgtatgagaacagctgtgtttttgataggtttatggtttgcatgagttcatatttaaagtgatccaggccaatgcatggctattgctgtaaatcttgatgtttatttctgccttgtaaagttctatcacggcctacctggaatttaaaattcagtagacaaattaattggtcctctgcacaacttttttaataagtagattattttacaaagaaatttgaacaaatttaattgaatcttttgtttagcttgcctctaagaacttttcttaataaagctcccaaaacttctcagcaaataaatctcccttaagtaggaaagctagatttcatatttgcttactttgaattaacagcaactttccacaggtaaatctgttcttgcaaagatgtgagcagaatagttaaaaataatatttttatgtttcatggttctaaatggaagccataaatgcagtaaatactatctgttgtttaactactttaatcgtcattttttacattttcaagtttattaggttaagaaaaacagggcagccttggaaggcagctactacagaaaactgcagttttgcgttaaagataaagtagtattttcagctccctgaaaaaccattcctgctgaaactgctgtagaaattgtgaagctgcatgagtggagagtattgaatctgtggttatagtagttttctcaggtttgtttatcttgatgtttgatgcactgtgttttatagttattaaaattgagtaatattatttctatgcagtgttatgtgtcattggccttttgtgaatgtgcatgttttaaactgcaaattttaaacattttgtcctctaattgttattaaaaatgaaataaactttaccattacttaaaa

SEQ ID NO: 161809 - protein, 172 aa, Artificial Sequence
  derived and/or modified sequence
MSSKRAKAKTTKKRPQRATSNVFAMFDQSQIQEFKEAFNMIDQNRDGFIDKEDLHDMLASLGKNPTDEYLEGMMSEAPGPINFTMFLTMFGEKLNGTDPEDVIRNAFACFDEEASGFIHEDHLRELLTTMGDRFTDEEVDEMYREAPIDKKGNFNYVEFTRILKHGAKDKDD

SEQ ID NO: 161810 - DNA, 519 bp, Artificial Sequence
  derived and/or modified sequence
atgagcagcaagagagccaaggccaagaccaccaagaagagaccccagagagccaccagcaacgtgttcgccatgttcgaccagagccagatccaggagttcaaggaggccttcaacatgatcgaccagaacagagacggcttcatcgacaaggaggacctgcacgacatgctggccagcctgggcaagaaccccaccgacgagtacctggagggcatgatgagcgaggcccccggccccatcaacttcaccatgttcctgaccatgttcggcgagaagctgaacggcaccgaccccgaggacgtgatcagaaacgccttcgcctgcttcgacgaggaggccagcggcttcatccacgaggaccacctgagagagctgctgaccaccatgggcgacagattcaccgacgaggaggtggacgagatgtacagagaggcccccatcgacaagaagggcaacttcaactacgtggagttcaccagaatcctgaagcacggcgccaaggacaaggacgactag

SEQ ID NO: 161811 - DNA, 519 bp, Artificial Sequence
  derived and/or modified sequence
atgagctccaaacgggccaaggccaagactaccaaaaagcggccccaaagagccacatccaatgtatttgctatgtttgaccaaagccaaattcaagaatttaaggaggcgtttaacatgattgatcagaatcgtgatggcttcattgacaaggaagatcttcacgacatgttagcaagcctgggcaagaacccaacagatgaatacctggaggggatgatgtctgaagcccccggccctatcaactttacaatgttcctaacaatgtttggagaaaaattaaacggcaccgacccggaggatgtgattcggaacgccttcgcatgctttgacgaagaagcttcagggttcattcacgaagaccacctcagggagttgctgacaacaatgggcgatcgattcactgacgaggaggtggacgaaatgtaccgtgaggctcctattgataaaaagggcaactttaactatgtggagtttacaaggatcctcaagcatggcgccaaggataaagatgattag

SEQ ID NO: 161812 - DNA, 519 bp, Artificial Sequence
  derived and/or modified sequence
atgagcagcaagagggccaaggccaagaccaccaagaagaggccccagagggccaccagcaatgtgtttgccatgtttgaccagagccagatccaggagttcaaggaggccttcaacatgattgaccagaacagagatggcttcatcgacaaggaggacctgcatgacatgctggccagcctgggcaagaaccccacagatgagtacctggagggcatgatgtctgaggcccctggccccatcaacttcaccatgttcctgaccatgtttggagagaagctgaatggaacagatcctgaagatgtgatcagaaatgcctttgcctgctttgatgaggaggccagcggcttcatccacgaggaccacctgcgggagctgctgaccaccatgggagaccgcttcacagatgaggaggtggatgagatgtaccgggaggcccccatcgacaagaagggcaacttcaactacgtggagttcacccgcatcctgaagcatggagccaaggacaaggatgactag

SEQ ID NO: 161813 - DNA, 519 bp, Artificial Sequence
  derived and/or modified sequence
atgagcagcaagcgggccaaggccaagaccaccaagaagcggccccaaagggccaccagcaacgtgtttgcgatgttcgaccagtcgcagattcaggagttcaaggaagctttcaacatgatcgatcagaatcgcgatggcttcattgataaagaagacctgcacgatatgctcgcttccctggggaaaaatccgaccgacgaatacctcgagggcatgatgtctgaggcgcctggaccgatcaacttcactatgttcctaaccatgttcggggaaaagctaaacggaactgatccagaggacgtaatcaggaatgcttttgcttgcttcgatgaggaggcctctggatttattcacgaagaccacttgcgtgagctgcttactacgatgggcgatcgctttacagatgaagaggtagacgagatgtatagggaagctcccatagacaagaaaggcaacttcaactacgtggaatttaccagaatcctgaagcacggtgccaaggataaagacgactag

SEQ ID NO: 161814 - DNA, 1199 bp, Artificial Sequence
  derived and/or modified sequence
gcccccgcctggagtccagacccgacggccggcccagttccacgcacccagcgagcccaagcgccttctccgcaccagggaagccccacccaccagaagccaagatgtccagcaagcgggccaaagccaagaccaccaagaagcggccacagcgggccacatccaatgtcttcgcaatgtttgaccagtcccagatccaggagtttaaggaggctttcaacatgattgaccagaaccgtgatggcttcattgacaaggaggacctgcacgacatgctggcctcgctggggaagaaccccacagacgaatacctggagggcatgatgagcgaggccccggggcccatcaacttcaccatgttcctcaccatgtttggggagaagctgaacggcacggaccccgaggatgtgattcgcaacgcctttgcctgcttcgacgaggaagcctcaggtttcatccatgaggaccacctccgggagctgctcaccaccatgggtgaccgcttcacagatgaggaagtggacgagatgtaccgggaggcacccattgataagaaaggcaacttcaactacgtggagttcacccgcatcctcaaacatggcgccaaggataaagacgactaggccaccccagccccctgacaccccagcccccgccagtcacccctccccgcacacacccgtccataccagctccctgcccatgaccctcgctcagggatccccctttgaggggttagggtcccagttcccagtggaagaaacaggccaggagaagtgcgtgccgagctgaggcagatgttcccacagtgaccccagagccctgggctatagtctctgacccctccaaggaaagaccaccttctggggacatgggctggagggcaggacctagaggcaccaagggaaggccccattccggggctgttccccgaggaggaagggaaggggctctgtgtgccccccaggaggaagaggccctgagtcctgggatcagacaccccttcacgtgtatccccacacaaatgcaagctcaccaaggtcccctctcagtccccttccctacaccctgaccggccactgccgcacacccacccagagcacgccacccgccatgggagtgtgctcaggagtcgcgggcagcgtggacatctgtcccagagggggcagaatctccaatagaggactgagcactgcttc

SEQ ID NO: 161815 - DNA, 519 bp, Artificial Sequence
  derived and/or modified sequence
atgagctcgaagagagcgaaggctaagacaacaaaaaagcggccacagcgagctaccagtaacgtgttcgccatgtttgaccagtctcaaattcaggagttcaaggaagctttcaatatgatcgaccaaaatcgggatggcttcattgataaagaggacctgcacgacatgctggcaagtcttggaaagaacccgactgatgaatacctcgaaggcatgatgtctgaggcccctggccctatcaactttacaatgtttctcacgatgtttggggagaaactgaacggaactgatcccgaggacgtgatccggaatgctttcgcgtgtttcgacgaagaggcctcagggttcattcatgaagaccatttgagagagctgctgaccacaatgggcgaccgtttcacagatgaagaggtggatgaaatgtacagagaggccccaatcgacaagaagggtaatttcaactacgttgagtttacccgcattctgaaacatggagctaaagacaaggacgattag

SEQ ID NO: 161816 - DNA, 548 bp, Artificial Sequence
  derived and/or modified sequence
gggggcgcagcggcccgggagccctctattggagattctgcctcccctgggacagatggcttcttgagcacactcccacgatgggtggctgctctggtacatctcatccacttcttcatctgtgaagctgtcacccatggtggtgagcagctcctggaggtggtcctcatgaatgaaacctgaggattcctcgttgaagcaggtattcatccatggggttcttccgcggtgaagccagcttgtcgtgctgtcccccttgtcattgaagccatcatggttctggtcaatcatgttgaaagcctccttaaactcctggatgtggaactggtcgaacatcacgaagacattggatgtggccccttgtgctgtggtcgcttcttggtggtcttggctttggtccacttgctgaacattttggcttcaggaagcagtaccttgaagagaaattggagagggagtcaattcctaggatagcagagagatggacaacagacagaatgtcaccccagctctgatctttgccatcacagttgctacaatcggctctt

SEQ ID NO: 161817 - protein, 153 aa, Artificial Sequence
  derived and/or modified sequence
MTEQMTLRGTLKGHNGWVTQIATTPQFPDMILSASRDKTIIMWKLTRDETNYGIPQRALRGHSHFVSDVVISSDGQFALSGSWDGTLRLWDLTTGTTTRRFVGHTKDVLSVAFSSDNRQIVSGSRDKTIKLWNTLGVCKYTVQSHSVAQAGVQ

SEQ ID NO: 161818 - protein, 317 aa, Artificial Sequence [sequence omitted]

SEQ ID NO: 161819 - DNA, 462 bp, Artificial Sequence
  derived and/or modified sequence
atgaccgagcagatgaccctgagaggcaccctgaagggccacaacggctgggtgacccagatcgccaccaccccccagttccccgacatgatcctgagcgccagcagagacaagaccatcatcatgtggaagctgaccagagacgagaccaactacggcatcccccagagagccctgagaggccacagccacttcgtgagcgacgtggtgatcagcagcgacggccagttcgccctgagcggcagctgggacggcaccctgagactgtgggacctgaccaccggcaccaccaccagaagattcgtgggccacaccaaggacgtgctgagcgtggccttcagcagcgacaacagacagatcgtgagcggcagcagagacaagaccatcaagctgtggaacaccctgggcgtgtgcaagtacaccgtgcagagccacagcgtggcccaggccggcgtgcagtag

SEQ ID NO: 161820 - DNA, 954 bp, Artificial Sequence
  derived and/or modified sequence
atgaccgagcagatgaccctgagaggcaccctgaagggccacaacggctgggtgacccagatcgccaccaccccccagttccccgacatgatcctgagcgccagcagagacaagaccatcatcatgtggaagctgaccagagacgagaccaactacggcatcccccagagagccctgagaggccacagccacttcgtgagcgacgtggtgatcagcagcgacggccagttcgccctgagcggcagctgggacggcaccctgagactgtgggacctgaccaccggcaccaccaccagaagattcgtgggccacaccaaggacgtgctgagcgtggccttcagcagcgacaacagacagatcgtgagcggcagcagagacaagaccatcaagctgtggaacaccctgggcgtgtgcaagtacaccgtgcaggacgagagccacagcgagtgggtgagctgcgtgagattcagccccaacagcagcaaccccatcatcgtgagctgcggctgggacaagctggtgaaggtgtggaacctggccaactgcaagctgaagaccaaccacatcggccacaccggctacctgaacaccgtgaccgtgagccccgacggcagcctgtgcgccagcggcggcaaggacggccaggccatgctgtgggacctgaacgagggcaagcacctgtacaccctggacggcggcgacatcatcaacgccctgtgcttcagccccaacagatactggctgtgcgccgccaccggccccagcatcaagatctgggacctggagggcaagatcatcgtggacgagctgaagcaggaggtgatcagcaccagcagcaaggccgagcccccccagtgcaccagcctggcctggagcgccgacggccagaccctgttcgccggctacaccgacaacctggtgagagtgtggcaggtgaccatcggcaccagatag

SEQ ID NO: 161821 - DNA, 462 bp, Artificial Sequence
  derived and/or modified sequence
atgacagaacagatgacgctgaggggcactttgaagggccacaacgggtgggtgacacagatagcgactaccccacaattcccagatatgattctgtcagcatcgcgagataagacgataataatgtggaagctcactcgtgatgaaaccaattacggaataccacagcgggccttgaggggacactcccactttgtatccgacgtggttatttcttcagatgggcaattcgctttaagcggatcttgggatggcaccctgaggttgtgggatttgaccaccggtaccaccaccagaagattcgtgggccacacaaaggatgtgctctccgtggcattcagctctgacaaccgccaaatagtaagtggaagcagagacaagactatcaagctgtggaacacattaggtgtttgcaaatacacagtgcagtcgcactctgtcgcgcaggcaggcgtacagtag

SEQ ID NO: 161822 - DNA, 954 bp, Artificial Sequence
  derived and/or modified sequence
atgaccgagcaaatgaccttacggggaacgttgaaggggcataacgggtgggtcacgcaaatcgcaaccacccctcagtttcctgatatgatcctcagcgcgagtagagataagaccatcatcatgtggaagttgacgagggatgagactaattacgggattccgcagagggccttacgcggtcatagtcatttcgtgtctgacgtggtgatctcgtcagacggacaattcgccctgtcagggagctgggatggaactctgcgcctgtgggatctcaccacagggaccaccacccgccgctttgtggggcatacaaaggatgtgttatccgtggctttttctagtgataacagacaaatagtgtcagggagtagagataagactatcaagctttggaataccttgggagtctgtaagtacaccgttcaggacgagtcacattcagaatgggtgtcttgtgtgcgcttctccccaaactcttcaaatcccatcatcgtgagctgtggatgggataagctcgtaaaagtgtggaacttggcaaactgtaagctgaaaacaaatcatatcgggcatacggggtacttgaatactgtcaccgtgtccccggacgggtccttgtgcgcaagcgggggtaaggacgggcaggccatgttatgggatctaaatgaggggaaacacctgtatacgctggatggcggtgatattatcaacgccctgtgcttctctcccaatcgttactggctttgtgccgcaacggggccaagcattaagatctgggacctcgaaggcaagattatcgttgacgaactgaagcaggaggtgattagcacctctagcaaagcagaaccacctcaatgtactagtctggcctggtcagcggacggccagacactgttcgccgggtatactgacaatttggtgcgggtgtggcaggtgaccatcggaacccgttag

SEQ ID NO: 161823 - DNA, 1016 bp, Artificial Sequence
  derived and/or modified sequence
ttttctctctctctttcactgcaaggcggcggcaggagaggttgtggtgctagtttctctaagccatccagtgccatcctcgtcgctgcagcgacacacgctctcgccgccgccatgactgagcagatgacccttcgtggcaccctcaagggccacaacggctgggtaacccagatcgctactaccccgcagttcccggacatgatcctctccgcctctcgagataagaccatcatcatgtggaaactgaccagggatgagaccaactatggaattccacagcgtgctctgcggggtcactcccactttgttagtgatgtggttatctcctcagatggccagtttgccctctcaggctcctgggatggaaccctgcgcctctgggatctcacaacgggcaccaccacgaggcgatttgtgggccataccaaggatgtgctgagtgtggccttctcctctgacaaccggcagattgtctctggatctcgagataaaaccatcaagctatggaataccctgggtgtgtgcaaatacactgtccagtctcattctgtcgcccaggctggagtgcagtagtgcgatctcggctcactgcaagctctgcttcccgggttcacgccattctcctgcctcagcctcccgagtcgctgggactacaggcgcctgccatcaggtctggctaattttttgtatttttagtagagacagggtttcaccatgttagccaagatggtcttgatctcctgacctcatgatccatccaccttggcttcctaaagtgctgggattacaggcgtgagccaccacaccaggccctattattattattatattttttttggagatgaagtttcacttgttcgttgcccaggctggagtgcaatggcacaatcttggctcattgcacccttcgcttcctgggtttaagcagtgttcctgcctgagcctccccagtagctgggattacaggcacccgccgccacacctggttaatttttgtatttttggtagagaca

SEQ ID NO: 161824 - DNA, 1403 bp, Artificial Sequence
  derived and/or modified sequence
ataggggcggggaagcagcccggcggtcctcatgggaatgtgccgtacacttcacctctttcgcttctcgctctacatcatccctgagaagcctttttaaacacttgaatgtgcttgtttcagagtgtatttgtaaagtgcagtcagattttgttgtacggaagacgggactgtgatgccttgcaatttccctctgccttttgcattacatggcgccgccatcttgagcagaaatgtatcatggggctcgccattttgcatggtcgagcgggtatttccggttccggcggggggcttttctctctctctttcactgcaaggcggcggcaggagaggttgtggtgctagtttctctaagccatccagtgccatcctcgtcgctgcagcgacacacgctctcgccgccgccatgactgagcagatgacccttcgtggcaccctcaagggccacaacggctgggtaacccagatcgctactaccccgcagttcccggacatgatcctctccgcctctcgagataagaccatcatcatgtggaaactgaccagggatgagaccaactatggaattccacagcgtgctctgcggggtcactcccactttgttagtgatgtggttatctcctcagatggccagtttgccctctcaggctcctgggatggaaccctgcgcctctgggatctcacaacgggcaccaccacgaggcgatttgtgggccataccaaggatgtgctgagtgtggccttctcctctgacaaccggcagattgtctctggatctcgagataaaaccatcaagctatggaataccctgggtgtgtgcaaatacactgtccaggatgagagccactcagagtgggtgtcttgtgtccgcttctcgcccaacagcagcaaccctatcatcgtctcctgtggctgggacaagctggtcaaggtatggaacctggctaactgcaagctgaagaccaaccacattggccacacaggctatctgaacacggtgactgtctctccagatggatccctctgtgcttctggaggcaaggatggccaggccatgttatgggatctcaacgaaggcaaacacctttacacgctagatggtggggacatcatcaacgccctgtgcttcagccctaaccgctactggctgtgtgctgccacaggccccagcatcaagatctgggatttagagggaaagatcattgtagatgaactgaagcaagaagttatcagtaccagcagcaaggcagaaccaccccagtgcacctccctggcctggtctgctgatggccagactctgtttgctggctacacggacaacctggtgcgagtgtggcaggtgaccattggcacacgctagaagtttatggcagagctttacaaataaaaaaaaaactggc

SEQ ID NO: 161825 - DNA, 462 bp, Artificial Sequence
  derived and/or modified sequence
atgacagagcagatgaccctgcggggcaccctgaagggccacaacggctgggtgacccagatcgccaccaccccccagttcccagacatgatcctgagcgccagccgggacaagaccatcatcatgtggaagctgaccagagatgagaccaactacggcatcccccagagggccctgcggggccacagccactttgtgtctgatgtggtgatcagcagtgatggccagtttgccctgagcggctcctgggatggcaccctgcggctgtgggacctgaccaccggcaccaccaccaggagatttgtgggccacaccaaggatgtgctgtctgtggccttcagcagtgacaaccggcagatcgtgtctggcagccgggacaagaccatcaagctgtggaacaccctgggcgtgtgcaagtacacagtgcagagccacagcgtggcccaggccggcgtgcagtag

SEQ ID NO: 161826 - DNA, 954 bp, Artificial Sequence
  derived and/or modified sequence
atgacagagcagatgaccctgcggggcaccctgaagggccacaacggctgggtgacccagatcgccaccaccccccagttcccagacatgatcctgagcgccagccgggacaagaccatcatcatgtggaagctgaccagagatgagaccaactacggcatcccccagagggccctgcggggccacagccactttgtgtctgatgtggtgatcagcagtgatggccagtttgccctgagcggctcctgggatggcaccctgcggctgtgggacctgaccaccggcaccaccaccaggagatttgtgggccacaccaaggatgtgctgtctgtggccttcagcagtgacaaccggcagatcgtgtctggcagccgggacaagaccatcaagctgtggaacaccctgggcgtgtgcaagtacacagtgcaggatgagagccacagcgagtgggtgtcctgtgtgcgcttcagccccaacagcagcaaccccatcatcgtgtcctgtggctgggacaagctggtgaaggtgtggaacctggccaactgcaagctgaagaccaaccacatcggccacacaggctacctgaacacagtgacagtgtccccagatggcagcctgtgtgccagcggcggcaaggatggccaggccatgctgtgggacctgaatgaaggcaagcacctgtacaccctggatggaggagacatcatcaatgccctgtgcttcagccccaaccgctactggctgtgtgccgccaccggccccagcatcaagatctgggacctggagggcaagatcatcgtggatgagctgaagcaggaggtgatcagcaccagcagcaaggccgagcccccccagtgcaccagcctggcctggagcgcagatggccagaccctgtttgctggctacacagacaacctggtgcgggtgtggcaggtgaccatcggcaccaggtag

SEQ ID NO: 161827 - DNA, 462 bp, Artificial Sequence
  derived and/or modified sequence
atgaccgagcagatgaccctgcggggcaccctgaagggccacaacgggtgggtgacacaaatcgccacaaccccacagtttccagatatgatattgagcgcgagtagagataagacaatcatcatgtggaaattgacccgtgacgaaacaaattatggcatcccccagagagccttacgcgggcacagtcatttcgtgagcgacgtagtgatcagcagtgacggacagtttgcactatccgggagctgggacggaacgctgcggctttgggaccttaccacagggacgactaccaggaggtttgtaggccacacaaaggacgtcctgtccgttgctttctcatctgacaaccgacagatagtcagcggcagccgcgataaaacgattaaactgtggaacactctgggtgtatgcaagtacacagtgcagtcccattccgttgcccaggccggagtacagtag

SEQ ID NO: 161828 - DNA, 954 bp, Artificial Sequence
  derived and/or modified sequence
atgaccgagcagatgaccctgcggggcaccctgaagggccacaacggttgggtgacccagatcgccacaactcctcaatttcccgacatgattctcagtgcctcccgggacaaaacaatcatcatgtggaaactgacaagggacgagacaaactacggtattccccaaagggcgttaagaggacatagccactttgtgagcgacgttgtgatctcatctgatggtcagtttgccctgtcagggtcctgggacggcacgttaagactttgggatttgacaaccggtacaactacccgcagatttgtcgggcacactaaagatgttctcagcgtggcgtttagcagtgacaacaggcagatcgtgtccggcagtcgagacaagaccataaaattatggaatactttaggcgtgtgcaaatatactgtgcaggacgagtcccacagtgagtgggtcagttgcgttaggtttagtcctaattcttccaatcctatcatcgtgtcctgcggctgggataaactggtgaaggtttggaatctggccaactgcaagctgaaaactaatcatattggccacaccggatacctcaacaccgtgaccgtgagccctgacggctcattgtgtgccagtgggggaaaggatggccaggctatgttgtgggacctgaatgaggggaagcacctctacacactggatggcggtgatataatcaacgctctctgctttagccccaaccggtattggctctgcgctgctacgggaccatctatcaaaatctgggacctggaggggaagatcatcgtcgacgaactgaaacaggaggtcatctccacttcctccaaagccgagcctccacaatgcacgtcgctggcatggtccgctgatggacaaaccctgtttgcaggctacacagacaacctagtcagggtgtggcaagtgaccattggcactagatag

SEQ ID NO: 161829 - DNA, 462 bp, Artificial Sequence
  derived and/or modified sequence
atgacggaacagatgaccttaagaggcacactgaaagggcataacggctgggttacccaaatagcaacaactcctcagttcccggatatgatcctttcagcctcgcgggacaagacgatcataatgtggaagctgacgagggacgaaaccaactatggcatcccacagagagcgctgcgtgggcatagtcacttcgtgtccgatgtggtcattagcagtgatggacagtttgccctgagtggatcatgggacgggaccctgagactttgggatcttactacgggcacgactaccaggaggttcgtcggacacaccaaagacgtgctgtcagtggctttcagttccgacaacagacagatagtctccggaagtcgcgacaagactatcaagctctggaatacattgggcgtgtgcaaatataccgtgcagtcccattcagtagcgcaagctggcgttcaatag

SEQ ID NO: 161830 - DNA, 954 bp, Artificial Sequence
  derived and/or modified sequence
atgaccgaacaaatgacacttaggggtaccctcaaaggccataatgggtgggtaacgcagatagccacgacgccgcaattccccgacatgatcctatccgcatcccgtgataaaactattatcatgtggaagctcacccgggacgaaacgaactacggcatcccacagagggcattaagggggcactcacattttgtatcagacgtggttatctcttctgacggtcagttcgccctctccggctcttgggatggaacactccggttgtgggacctgaccactggcacaactaccaggagatttgtaggccataccaaagacgtgctgtctgtcgccttctcatctgacaaccgacagatagtcagtgggagtagagacaagacaattaaactgtggaacacgcttggtgtgtgcaagtataccgttcaggacgaatcacactccgagtgggtgtcttgcgtaaggtttagtcccaattcctctaaccccattattgtctcttgtggatgggataagcttgtgaaggtttggaacttggccaactgcaagctgaaaacaaaccacatcgggcacaccggctacttgaatacagtcacggtgtccccagacggtagtctgtgtgcctcggggggtaaggatggccaagccatgctctgggatcttaacgagggtaagcatctgtatactctggacggtggagacatcattaatgctttgtgcttcagccccaataggtattggctttgtgctgcaacaggaccctccattaaaatatgggatctggagggcaagatcatcgtcgacgaattgaaacaagaggtgattagcacctcctccaaggccgaaccaccacagtgcacaagcctcgcctggtccgcagacggccagactttgttcgcaggctataccgacaatctagttcgggtgtggcaggttactatcgggacacggtag

SEQ ID NO: 161831 - protein, 642 aa, Artificial Sequence
  derived and/or modified sequence
MKRSSVSSGGAGRLSMQELRSQDVNKQGLYTPQTKEKPTFGKLSINKPTSERKVSLFGKRTSGHGSRNSQLGIFSSSEKIKDPRPLNDKAFIQQCIRQLCEFLTENGYAHNVSMKSLQAPSVKDFLKIFTFLYGFLCPSYELPDTKFEEEVPRIFKDLGYPFALSKSSMYTVGAPHTWPHIVAALVWLIDCIKIHTAMKESSPLFDDGQPWGEETEDGIMHNKLFLDYTIKCYESFMSGADSFDEMNAELQSKLKDLFNVDAFKLESLEAKNRALNEQIARLEQEREKEPNRLESLRKLKASLQGDVQKYQAYMSNLESHSAILDQKLNGLNEEIARVELECETIKQENTRLQNIIDNQKYSVADIERINHERNELQQTINKLTKDLEAEQQKLWNEELKYARGKEAIETQLAEYHKLARKLKLIPKGAENSKGYDFEIKFNPEAGANCLVKYRAQVYVPLKELLNETEEEINKALNKKMGLEDTLEQLNAMITESKRSVRTLKEEVQKLDDLYQQKIKEAEEEDEKCASELESLEKHKHLLESTVNQGLSEAMNELDAVQREYQLVVQTTTEERRKVGNNLQRLLEMVATHVGSVEKHLEEQIAKVDREYEECMSEDLSENIKEIRDKYEKKATLIKSSEE

SEQ ID NO: 161832 - protein, 524 aa, Artificial Sequence
  derived and/or modified sequence
MKRSSVSSGGAGRLSMQELRSQDVNKQGLYTPQTKEKPTFGKLSINKPTSERKVSLFGKRTSGHGSRNSQLGIFSSSEKIKDPRPLNDKAFIQQCIRQLCEFLTENGYAHNVSMKSLQAPSVKDFLKIFTFLYGFLCPSYELPDTKFEEEVPRIFKDLGYPFALSKSSMYTVGAPHTWPHIVAALVWLIDCIKIHTAMKESSPLFDDGQPWGEETEDGIMHNKLFLDYTIKCYESFMSGADSFDEMNAELQSKLKDLFNVDAFKLESLEAKNRALNEQIARLEQEREKEPNRLESLRKLKASLQGDVQKYQAYMSNLESHSAILDQKLNGLNEEIARVELECETIKQENTRLQNIIDNQKYSVADIERINHERNELQQTINKLTKDLEAEQQKLWNEELKYARGKEAIETQLAEYHKLARKLKLIPKGAENSKGYDFEIKFNPEAGANCLVKYRAQVYVPLKELLNETEEEINKALNKKMGLEDTLEQLNAMITESKRSVRTLKEEVQKLDDLYQQKIKKERKK

SEQ ID NO: 161833 - DNA, 1575 bp, Artificial Sequence
  derived and/or modified sequence
atgaagagaagcagcgtgagcagcggcggcgccggcagactgagcatgcaggagctgagaagccaggacgtgaacaagcagggcctgtacaccccccagaccaaggagaagcccaccttcggcaagctgagcatcaacaagcccaccagcgagagaaaggtgagcctgttcggcaagagaaccagcggccacggcagcagaaacagccagctgggcatcttcagcagcagcgagaagatcaaggaccccagacccctgaacgacaaggccttcatccagcagtgcatcagacagctgtgcgagttcctgaccgagaacggctacgcccacaacgtgagcatgaagagcctgcaggcccccagcgtgaaggacttcctgaagatcttcaccttcctgtacggcttcctgtgccccagctacgagctgcccgacaccaagttcgaggaggaggtgcccagaatcttcaaggacctgggctaccccttcgccctgagcaagagcagcatgtacaccgtgggcgccccccacacctggccccacatcgtggccgccctggtgtggctgatcgactgcatcaagatccacaccgccatgaaggagagcagccccctgttcgacgacggccagccctggggcgaggagaccgaggacggcatcatgcacaacaagctgttcctggactacaccatcaagtgctacgagagcttcatgagcggcgccgacagcttcgacgagatgaacgccgagctgcagagcaagctgaaggacctgttcaacgtggacgccttcaagctggagagcctggaggccaagaacagagccctgaacgagcagatcgccagactggagcaggagagagagaaggagcccaacagactggagagcctgagaaagctgaaggccagcctgcagggcgacgtgcagaagtaccaggcctacatgagcaacctggagagccacagcgccatcctggaccagaagctgaacggcctgaacgaggagatcgccagagtggagctggagtgcgagaccatcaagcaggagaacaccagactgcagaacatcatcgacaaccagaagtacagcgtggccgacatcgagagaatcaaccacgagagaaacgagctgcagcagaccatcaacaagctgaccaaggacctggaggccgagcagcagaagctgtggaacgaggagctgaagtacgccagaggcaaggaggccatcgagacccagctggccgagtaccacaagctggccagaaagctgaagctgatccccaagggcgccgagaacagcaagggctacgacttcgagatcaagttcaaccccgaggccggcgccaactgcctggtgaagtacagagcccaggtgtacgtgcccctgaaggagctgctgaacgagaccgaggaggagatcaacaaggccctgaacaagaagatgggcctggaggacaccctggagcagctgaacgccatgatcaccgagagcaagagaagcgtgagaaccctgaaggaggaggtgcagaagctggacgacctgtaccagcagaagatcaagaaggagagaaagaagtag

SEQ ID NO: 161834 - DNA, 1929 bp, Artificial Sequence
  derived and/or modified sequence
atgaagcggagtagcgtttcctcagggggcgcaggacgcctgagcatgcaagaactgaggagccaggacgtcaataaacaaggtctgtacactcctcagaccaaggagaagcccacatttgggaagctgagtattaacaagcctacgagtgaaaggaaagtctctctcttcggaaaaaggacaagtggccatggttcgcgcaatagccagcttggcatcttctcatcttctgaaaagataaaggatcccaggcccctgaacgacaaggcctttattcagcagtgcataaggcagttatgcgaatttctgactgagaacggctacgcacataacgtctccatgaagtcccttcaagccccatccgttaaagactttttaaaaattttcacatttctctacgggtttctctgcccttcatacgaattgccggacaccaagttcgaggaggaagtgcctcgcatcttcaaagacctgggctatccttttgctctgtctaaaagctccatgtatacagtcggggctcctcacacatggccgcacattgtggcagctttggtgtggttgatcgactgtataaaaattcacactgccatgaaagaaagctcccctctattcgatgatggccagccctggggggaggagacggaggacggcattatgcacaataagctgtttttggactatacaatcaagtgttatgagagctttatgtctggagccgacagcttcgacgaaatgaatgccgagctgcagtccaagttgaaggatttatttaatgtggacgccttcaagctggaatccctggaagccaagaatcgagcactcaacgaacagatcgccaggctggaacaggagagagagaaagagcccaatcggcttgaatcactgcgaaagctaaaggcttccctccagggagacgtgcagaagtatcaagcttacatgtctaatctggagagccacagcgctattctcgatcagaaactcaacgggctgaatgaggaaattgctagagtggaacttgagtgtgagacaattaagcaagagaatacacgcctgcaaaacattatcgataaccagaaatactcagtggccgacatcgagaggatcaaccacgaacgaaacgagctgcagcagactatcaataagctgacaaaagaccttgaagcagagcaacagaaactgtggaacgaagagctgaagtacgcaaggggaaaggaggcgatcgagactcagctagcagagtaccacaaactagccaggaagctgaagctcatccctaaaggggcggagaattccaagggttacgacttcgaaattaagtttaaccctgaggctggcgccaattgcctcgtgaaatatagagctcaggtttatgtaccactgaaggagcttctgaacgaaaccgaggaggaaataaataaagccctcaacaagaagatgggactggaggatacactcgagcagttaaacgctatgatcactgagtccaaacgcagcgtgcggaccctgaaggaggaggttcagaagctggatgacctctatcagcagaaaataaaagaagcagaagaggaagacgagaaatgcgcaagcgagctggagagcctcgagaagcataaacacctgttggagtctacagtgaatcaaggtttatccgaagcaatgaatgagctggacgccgttcagagggaatatcaactcgtggtccaaaccacaactgaggaaaggcgcaaggtgggaaataatctgcagagactattggaaatggtcgcgacccacgtggggtctgttgagaaacatctcgaagagcagatcgcaaaggtggatcgggagtacgaagagtgtatgtctgaggatctgagcgaaaatatcaaggagatcagagacaagtatgaaaagaaggcgactctcatcaaatccagtgaagagtag

SEQ ID NO: 161835 - DNA, 1575 bp, Artificial Sequence
  derived and/or modified sequence
atgaagcgttctagcgtctcgtccggaggagccgggagactgagcatgcaggaactcaggagccaggatgttaacaagcaagggctgtatacaccccagaccaaggaaaaacccacattcggcaagctgagtatcaacaagcccacatctgaacggaaggtctcactgtttgggaagcggacctcaggtcacggtagtaggaactcgcaattaggcatatttagcagcagcgaaaagatcaaagaccctagacccctgaatgataaagcttttatccagcaatgtatccgacagctgtgcgagttcttgacagaaaatgggtacgcccataacgtgagcatgaagagtcttcaggccccatccgtgaaggatttcctcaagatctttaccttcttgtatgggttcctgtgtcctagctacgagctgcctgacaccaagtttgaggaggaggtcccaaggattttcaaggatctggggtatcccttcgccctaagcaagagttctatgtatacggtgggtgcaccgcacacttggccccatatagtggccgctctcgtgtggctgatagactgcatcaaaattcacactgccatgaaggaatcctcccctctgttcgatgacgggcagccatggggcgaagagactgaggacggcatcatgcacaataaactgttcctcgactacaccatcaagtgttatgaatcattcatgtcgggcgcagacagttttgatgagatgaatgctgaactacaatctaaattgaaagatctgtttaacgtggacgccttcaagttagaaagcctggaagccaaaaatcgagccctgaacgagcagattgcgcgattggagcaggagagagagaaagagcccaatcgccttgaatcccttcggaagctgaaggcatctcttcagggcgatgtgcagaagtatcaggcctacatgtcaaatctagagtcccacagtgcgatacttgatcagaaactcaacggactcaatgaggagatagcacgcgtggagctcgagtgcgaaactataaagcaggagaacactcgtctacagaatattatcgataaccagaaatactctgtcgctgacatcgagcgcatcaaccacgagcggaacgaactgcagcagaccattaataagcttaccaaggatctggaagccgagcagcagaagttgtggaacgaggaactcaaatatgccagagggaaagaagccatcgaaacgcagctggctgagtaccataagctggcacgtaagctgaaactaatcccaaagggtgcagagaattccaagggttacgatttcgaaatcaaattcaacccagaggctggtgcgaattgtctggtcaagtatcgcgcccaagtgtacgtccctctcaaagaactactgaatgagaccgaagaggagataaataaggcactgaacaaaaaaatgggtctggaagataccctggaacagcttaacgctatgatcactgagtctaaaagaagcgtgcgaacactcaaagaagaagtccagaaactggacgacctttatcagcagaaaattaagaaagaacggaagaagtag

SEQ ID NO: 161836 - DNA, 1929 bp, Artificial Sequence
  derived and/or modified sequence
atgaagaggagctctgtgagcagcggcggggccggccgcctgtccatgcaggagctgcggagccaggatgtgaacaagcagggcctgtacaccccccagaccaaggagaagcccaccttcggcaagctgagcatcaacaagcccaccagcgagaggaaggtgtccctgtttgggaagaggaccagcggccacggcagcaggaacagccagctgggcatcttcagcagcagcgagaagatcaaggacccccggcccctgaatgacaaggccttcatccagcagtgcatccggcagctgtgtgagttcctgacagaaaatggctacgcccacaacgtgtccatgaagagcctgcaggcccccagcgtgaaggacttcctgaagatcttcaccttcctgtatggcttcctgtgccccagctatgagctgcctgacaccaagtttgaggaggaggtgccccgcatcttcaaggacctgggctacccctttgccctgagcaagagctccatgtacacagtgggcgccccccacacctggccccacatcgtggccgccctggtgtggctgattgactgcatcaagatccacacagccatgaaggagagcagccccctgtttgatgatggccagccctggggcgaggagacagaagatggcatcatgcacaacaagctgttcctggactacaccatcaagtgctatgagagcttcatgtctggagctgacagctttgatgagatgaatgctgagctgcagagcaagctgaaggacctcttcaacgtggatgccttcaagctggagagcctggaggccaagaacagagccctgaatgagcagatcgcccggctggagcaggagcgggagaaggagcccaaccggctggagagcctgaggaagctgaaggccagcctgcagggagatgtgcagaagtaccaggcctacatgagcaacctggagagccacagcgccatcctggaccagaagctgaatggcctgaatgaggagatcgcccgggtggagctggagtgtgagaccatcaagcaggagaacacccggctgcagaacatcatcgacaaccagaagtacagcgtggccgacatcgagcgcatcaaccatgaaagaaatgagctgcagcagaccatcaacaagctgaccaaggacctggaggccgagcagcagaagctgtggaatgaggagctgaagtatgcccggggcaaggaggccatcgagacccagctggccgagtaccacaagctggccaggaagctgaagctgatccccaagggagctgagaacagcaagggctatgactttgagatcaagttcaaccctgaggccggggccaactgcctggtgaagtaccgggcccaggtgtatgtgcccctgaaggagctgctgaatgaaacagaggaggagatcaacaaggccctgaacaagaagatgggcctggaggacaccctggagcagctgaatgccatgatcacagagagcaagaggtctgtgaggaccctgaaggaggaggtgcagaagctggatgacctgtaccagcagaagatcaaggaggccgaggaggaggatgagaagtgtgccagcgagctggagagcctggagaagcacaagcacctgctggagagcacagtgaaccagggcctgtctgaggccatgaatgagctggatgctgtgcagcgggagtaccagctggtggtgcagaccaccacagaggagaggaggaaggtgggcaacaacctgcagaggctgctggagatggtggccacccacgtgggctctgtggagaagcacctggaggagcagatcgccaaggtggaccgggagtatgaggagtgcatgtctgaggacctgtctgagaacatcaaggagatccgggacaagtatgagaagaaggccaccctcatcaagagcagcgaggagtag

SEQ ID NO: 161837 - DNA, 1575 bp, Artificial Sequence
  derived and/or modified sequence
atgaagaggagctctgtgagcagcggcggggccggccgcctgtccatgcaggagctgcggagccaggatgtgaacaagcagggcctgtacaccccccagaccaaggagaagcccaccttcggcaagctgagcatcaacaagcccaccagcgagaggaaggtgtccctgtttgggaagaggaccagcggccacggcagcaggaacagccagctgggcatcttcagcagcagcgagaagatcaaggacccccggcccctgaatgacaaggccttcatccagcagtgcatccggcagctgtgtgagttcctgacagaaaatggctacgcccacaacgtgtccatgaagagcctgcaggcccccagcgtgaaggacttcctgaagatcttcaccttcctgtatggcttcctgtgccccagctatgagctgcctgacaccaagtttgaggaggaggtgccccgcatcttcaaggacctgggctacccctttgccctgagcaagagctccatgtacacagtgggcgccccccacacctggccccacatcgtggccgccctggtgtggctgattgactgcatcaagatccacacagccatgaaggagagcagccccctgtttgatgatggccagccctggggcgaggagacagaagatggcatcatgcacaacaagctgttcctggactacaccatcaagtgctatgagagcttcatgtctggagctgacagctttgatgagatgaatgctgagctgcagagcaagctgaaggacctcttcaacgtggatgccttcaagctggagagcctggaggccaagaacagagccctgaatgagcagatcgcccggctggagcaggagcgggagaaggagcccaaccggctggagagcctgaggaagctgaaggccagcctgcagggagatgtgcagaagtaccaggcctacatgagcaacctggagagccacagcgccatcctggaccagaagctgaatggcctgaatgaggagatcgcccgggtggagctggagtgtgagaccatcaagcaggagaacacccggctgcagaacatcatcgacaaccagaagtacagcgtggccgacatcgagcgcatcaaccatgaaagaaatgagctgcagcagaccatcaacaagctgaccaaggacctggaggccgagcagcagaagctgtggaatgaggagctgaagtatgcccggggcaaggaggccatcgagacccagctggccgagtaccacaagctggccaggaagctgaagctgatccccaagggagctgagaacagcaagggctatgactttgagatcaagttcaaccctgaggccggggccaactgcctggtgaagtaccgggcccaggtgtatgtgcccctgaaggagctgctgaatgaaacagaggaggagatcaacaaggccctgaacaagaagatgggcctggaggacaccctggagcagctgaatgccatgatcacagagagcaagaggtctgtgaggaccctgaaggaggaggtgcagaagctggatgacctgtaccagcagaagatcaagaaggagaggaagaagtag

SEQ ID NO: 161838 - DNA, 1929 bp, Artificial Sequence
  derived and/or modified sequence
atgaagcggagcagcgtgagcagcggcggcgccggccggctgagcatgcaggaactacgaagtcaggatgttaataagcagggactgtacactccacaaaccaaagaaaagcccacctttgggaagctcagtatcaacaagcccacaagtgagaggaaggttagcctgttcgggaagcgcacatccggacacggtagtaggaatagccaacttgggattttcagctcaagtgaaaagattaaagaccccaggcctctgaatgacaaggccttcatccaacagtgcatccggcagctatgcgaattcttgactgaaaacggttacgcccacaatgtgagcatgaagagtttgcaggccccaagtgttaaagattttctgaaaatcttcactttcctgtatggttttctgtgtcccagttatgaactcccagatacaaagttcgaggaggaagttccgcgcatctttaaggatctcggataccctttcgcattgtcaaaaagcagcatgtatacggtaggcgcccctcacacatggccacacattgtggccgcactggtatggttgatcgattgtattaagatccacactgcaatgaaggagagttcacctttattcgacgatggccaaccctggggggaagaaacagaggatggtattatgcataataaattgtttctggattacaccatcaaatgctacgaaagcttcatgtcaggagccgattcattcgacgagatgaatgccgaacttcagagcaaactgaaggatctctttaatgtagatgccttcaaattagaatcactggaagcaaagaatcgcgcacttaatgagcagattgccagactggagcaagagcgtgaaaaagaaccaaatcggctggagtccctgcgcaaactcaaggcaagcctccagggggacgtgcagaaatatcaggcatatatgagtaatctggaatcccattcagctatactcgaccaaaagcttaatggcctaaacgaagagatcgcccgcgtcgaactggaatgtgaaacgatcaagcaagagaatactcgcctgcaaaacataattgataatcagaaatattccgtggccgatattgaacgcatcaatcatgaaaggaacgaactgcagcagactataaataaactcacaaaggaccttgaggccgaacagcagaaactgtggaatgaggagcttaaatacgctcgggggaaagaagccattgagactcagctagctgaatatcataagctcgccaggaagctgaaactgatccccaagggcgccgaaaattcaaagggttatgatttcgaaatcaagtttaatcctgaagcaggcgccaactgtctggtgaaatatagggcgcaagtgtatgttccactcaaggagttgctcaacgagactgaggaggaaatcaacaaggcactgaacaaaaagatggggctggaggatacattggagcagctgaatgcgatgattaccgaatcaaaacgatcagtgagaacgctgaaagaggaagtccaaaagctggacgatttatatcaacagaaaatcaaagaggctgaagaagaggacgagaaatgcgcttctgaattggagtctcttgaaaaacacaaacatttgctagagtccaccgtgaaccaaggattgtcagaggccatgaatgagctagatgctgtgcaaagagagtaccaactggtcgtccagaccaccacagaagagagaagaaaggttggaaacaatctccaacgactcttggaaatggtggcgactcacgtgggctctgtggagaaacatcttgaagaacagatcgcaaaggtggatcgggaatacgaggaatgtatgtccgaggacttatcagaaaacatcaaggagatcagagataaatatgaaaagaaggcaactctgatcaagtctagtgaagagtag

SEQ ID NO: 161839 - DNA, 1575 bp, Artificial Sequence
  derived and/or modified sequence
atgaagcggagcagcgtgagcagcggcggcgccggccggctgagcatgcaggagctgagaagccaggacgtcaacaagcagggtctgtataccccacagaccaaagaaaaacctacgttcggtaagttgtctatcaacaaaccgaccagcgaaaggaaagtgtccctgtttggtaagcgtacgtccggacatggctctaggaatagccagcttggtattttctcgtccagtgaaaagataaaagatcccaggcccctaaatgacaaagcctttatccagcagtgcattcggcagctctgtgaattcctcaccgaaaatggttatgcccataacgtgtctatgaaatcgctgcaagctccaagtgtcaaggattttttaaagatcttcacattcctgtacggttttttgtgtccttcttacgagctacctgataccaaattcgaggaggaagtgccgcgtatcttcaaggacctcggctatcccttcgccttgagcaagtcatctatgtatacggtgggagcaccacatacctggccacacattgtggccgcgctcgtgtggctgatagactgcatcaagatacatacagccatgaaagagtcaagtccgctgtttgatgacggccagccgtggggagaggaaacagaggacggcattatgcataacaaactctttcttgattacaccattaaatgttatgagtccttcatgtcaggtgcggacagttttgatgagatgaacgctgaacttcagtccaagttgaaggatctgtttaatgtcgacgccttcaaactcgaatctcttgaggccaaaaaccgcgcactgaatgagcagatcgcacgtcttgagcaggagcgagagaaagaaccgaatagattagagagtttgcgcaagctaaaagccagcctgcagggggatgtgcagaagtaccaggcatatatgagcaaccttgaatctcacagcgctattcttgatcaaaagctaaatggcctcaatgaagagatcgctcgcgttgaacttgagtgtgagaccatcaaacaggaaaacactcgccttcagaatatcatcgataatcagaagtattcagtcgcagacattgaaaggataaatcacgagcgcaacgagctgcagcagacgatcaataaactgacgaaagacttagaggccgaacagcagaaactctggaacgaggaattgaagtatgcgcgggggaaagaggcaatcgagacacaactagccgaataccataagctcgcaagaaaactcaagctaatccccaagggagcggagaacagtaagggatatgatttcgagatcaaattcaaccccgaggccggggccaactgtcttgtgaaataccgcgcacaggtgtacgttccacttaaggagttattgaatgaaaccgaggaggaaattaacaaggcactgaataaaaaaatgggtcttgaagatacacttgagcagctcaacgccatgattaccgagtcaaagcgaagcgtaaggacgttgaaagaagaggtgcagaagttagatgatctttatcagcagaagattaagaaggagcgtaagaaatag

SEQ ID NO: 161840 - DNA, 1929 bp, Artificial Sequence
  derived and/or modified sequence
atgaagaggtcgagtgtgagcagtggaggagccggaagactgtcaatgcaggagctgcggtctcaggacgtgaacaaacagggcttgtataccccacaaaccaaggagaagccaactttcggtaaattatctatcaacaagccaaccagtgaaaggaaggtgagtctgttcggaaagcgtacctctgggcatgggagcaggaacagccagcttggaattttctccagctctgagaagatcaaggaccccaggcctctgaacgataaggcatttattcagcagtgtatcaggcagctgtgtgaattccttactgaaaatggttatgctcataatgtgagtatgaaatcgttgcaggccccatcagtcaaagatttcctcaaaatattcacttttctttacggttttctgtgcccttcatatgagctgcctgacacaaaatttgaagaggaagtgcctcggatttttaaggacctgggatacccatttgccctttcgaagagtagcatgtatacggtgggcgctccccacacttggccacacatagtagccgctttggtgtggctcatcgactgcattaaaattcacacagccatgaaggaatcaagtccgctgtttgacgacggacagccatggggggaagagaccgaggacggcatcatgcataataagctgtttttggactacactattaaatgctacgaatccttcatgagtggcgctgatagtttcgacgagatgaacgccgaactccagagcaagctgaaagatttgttcaacgtcgatgcatttaagcttgagtcgctcgaagcaaagaatcgtgccttgaacgagcagatcgcaagactggaacaagagagagagaaggaaccaaaccggctggaaagtctgcgaaaactaaaggcctctctccagggcgacgtccaaaagtatcaagcctacatgtctaacctggaatcccattccgccatcctcgatcaaaaactcaacggcctgaacgaagaaatagctagagttgagctcgaatgtgagacaatcaaacaagagaatacgagactacagaacattatcgataatcagaaatatagcgtcgccgacattgaacggattaaccatgagcggaatgagttgcagcagacaatcaataagctgactaaggacctggaagctgagcagcagaagttgtggaatgaagaactcaaatatgcgaggggtaaagaagcaattgagacgcagctcgccgagtatcataagctcgcacggaagttgaaactcatccctaagggagcagagaattccaagggatacgatttcgagataaaatttaatccagaagcaggggctaattgcctggtgaaatatcgagcccaggtgtacgtacctctcaaggaattgctgaacgaaaccgaagaggaaataaataaagcactcaataagaaaatgggattagaagatactctggagcagttgaacgcaatgatcactgaatccaaacgctctgtgcgaacactgaaagaggaggttcagaaactcgacgatctgtatcagcaaaaaatcaaggaggccgaggaggaggacgaaaaatgcgcaagcgagctggaatccctcgagaaacacaagcacctactggaaagcacggttaaccagggtctttcggaagctatgaacgagctggatgcggtacagcgggaataccagcttgtcgtccaaacaaccacggaggaacgtagaaaagttgggaacaatctccagcggctgctggaaatggtggcaacgcacgttggatcagtcgaaaagcatctggaggaacaaatcgcgaaggtggaccgagagtacgaagagtgtatgtccgaggatttgagcgagaatatcaaagaaatccgggataagtacgaaaagaaggcaacattaattaagagctccgaagaatag

SEQ ID NO: 161841 - DNA, 1575 bp, Artificial Sequence
  derived and/or modified sequence
atgaagcggtcatccgtttccagcggaggcgctggaaggctgagcatgcaggagctcagatcacaagatgtgaacaagcaggggttgtacacccctcaaaccaaggaaaaaccaacttttggtaagttgagcatcaacaagcccacctcggagcgcaaggtaagtttgtttggcaaacgcacttcagggcatggctctagaaactcacagctcggtatttttagcagcagcgaaaagattaaggaccctagacctttgaacgacaaagcattcatccagcaatgcatcaggcagctttgcgagtttctgaccgagaacggctatgcacataacgtgagcatgaagagcctacaggctcctagcgtcaaggattttctgaagatttttacctttctatacgggttcctttgcccgagttacgagttgccagataccaagttcgaagaggaagtgcctcgcatctttaaggatctgggttacccattcgctctgtctaagtcatcaatgtacacagtgggggctcctcacacttggcctcatattgttgccgcactggtgtggctgatcgactgcataaagatccacaccgccatgaaggagtcttctccattgtttgacgacgggcaaccctggggcgaggaaaccgaagatgggattatgcacaataagctctttctcgattacaccattaagtgttacgagagtttcatgtcaggtgctgactccttcgacgagatgaacgcggaattacagagtaaactgaaagatctttttaacgtcgatgcctttaagttggagtcactggaagcaaagaatagggcactgaatgaacagatagccagactggagcaggaaagggagaaggagcccaatcgtcttgagtctctccgcaagctcaaggcctccttgcaaggcgatgtgcaaaaatatcaagcatatatgtctaatctggagtctcactcagcaatcctggaccagaagctgaacggacttaatgaagagatagctcgtgtggagctggaatgtgaaacaatcaaacaagagaacactagactgcagaacataatagataaccagaagtatagcgtggctgacattgaacgcatcaatcacgagaggaacgaactccagcagaccattaacaagctcactaaagatctcgaggccgaacaacagaaactctggaatgaagagctcaagtatgcacgaggaaaggaagccatagaaacccagctagcggaatatcacaagcttgccagaaagctaaaattaatccccaaaggggctgagaactctaagggctacgactttgaaattaaattcaacccagaggccggagccaactgtctggtgaagtaccgtgcccaggtttacgttcccttaaaagaactactgaatgagacggaagaagagattaataaggccctcaataaaaaaatggggctggaggacacactggagcagctgaacgccatgattacagagagtaagcgctctgtgcgcacccttaaggaagaggtgcaaaaacttgacgacttataccaacagaagattaaaaaagagaggaagaaatag

SEQ ID NO: 161842 - DNA, 2172 bp, Artificial Sequence
  derived and/or modified sequence
actgcgcgcgtcgtgcgtaatgacgtcagcgccggcggagaatttcaaattcgaacggctttggcgggccgaggaaggacctggtgttttgatgaccgctgtcctgtctagcagatacttgcacggtttacagaaattcggtccctgggtcgtgtcaggaaactggaaaaaaggtcataagcatgaagcgcagttcagtttccagcggtggtgctggccgcctctccatgcaggagttaagatcccaggatgtaaataaacaaggcctctatacccctcaaaccaaagagaaaccaacctttggaaagttgagtataaacaaaccgacatctgaaagaaaagtctcgctatttggcaaaagaactagtggacatggatcccggaatagtcaacttggtatattttccagttctgagaaaatcaaggacccgagaccacttaatgacaaagcattcattcagcagtgtattcgacaactctgtgagtttcttacagaaaatggttatgcacataatgtgtccatgaaatctctacaagctccctctgttaaagacttcctgaagatcttcacatttctttatggcttcctgtgcccctcatacgaacttcctgacacaaagtttgaagaagaggttccaagaatctttaaagaccttgggtatccttttgcactatccaaaagctccatgtacacagtgggggctcctcatacatggcctcacattgtggcagccttagtttggctaatagactgcatcaagatacatactgccatgaaagaaagctcacctttatttgatgatgggcagccttggggagaagaaactgaagatggaattatgcataataagttgtttttggactacaccataaaatgctatgagagttttatgagtggtgccgacagctttgatgagatgaatgcagagctgcagtcaaaactgaaggatttatttaatgtggatgcttttaagctggaatcattagaagcaaaaaacagagcattgaatgaacagattgcaagattggaacaagaaagagaaaaagaaccgaatcgtctagagtcgttgagaaaactgaaggcttccttacaaggagatgttcaaaagtatcaggcatacatgagcaatttggagtctcattcagccattcttgaccagaaattaaatggtctcaatgaggaaattgctagagtagaactagaatgtgaaacaataaaacaggagaacactcgactacagaatatcattgacaaccagaagtactcagttgcagacattgagcgaataaatcatgaaagaaatgaattgcagcagactattaataaattaaccaaggacctggaagctgaacaacagaagttgtggaatgaggagttaaaatatgccagaggcaaagaagcgattgaaacacaattagcagagtatcacaaattggctagaaaattaaaacttattcctaaaggtgctgagaattccaaaggttatgactttgaaattaagtttaatcccgaggctggtgccaactgccttgtcaaatacagggctcaagtttatgtacctcttaaggaactcctgaatgaaactgaagaagaaattaataaagccctaaataaaaaaatgggtttggaggatactttagaacaattgaatgcaatgataacagaaagcaagagaagtgtgagaactctgaaagaagaagttcaaaagctggatgatctttaccaacaaaaaattaaggaagcagaggaagaggatgaaaaatgtgccagtgagcttgagtccttggagaaacacaagcacctgctagaaagtactgttaaccaggggctcagtgaagctatgaatgaattagatgctgttcagcgggaataccaactagttgtgcaaaccacgactgaagaaagacgaaaagtgggaaataacttgcaacgtctgttagagatggttgctacacatgttgggtctgtagagaaacatcttgaggagcagattgctaaagttgatagagaatatgaagaatgcatgtcagaagatctctcggaaaatattaaagagattagagataagtatgagaagaaagctactctaattaagtcttctgaagaatgaagataaaatgttgatcatgtatatatatccatagtgaataaaattgtctcagtaaagtgta

SEQ ID NO: 161843 - DNA, 1685 bp, Artificial Sequence
  derived and/or modified sequence
cgaggaaggacctggtgttttgatgaccgctgtcctgtctagcagatacttgcacggtttacagaaattcggtccctgggtcgtgtcaggaaactggaaaaaaggtcataagcatgaagcgcagttcagtttccagcggtggtgctggccgcctctccatgcaggagttaagatcccaggatgtaaataaacaaggcctctatacccctcaaaccaaagagaaaccaacctttggaaagttgagtataaacaaaccgacatctgaaagaaaagtctcgctatttggcaaaagaactagtggacatggatcccggaatagtcaacttggtatattttccagttctgagaaaatcaaggacccgagaccacttaatgacaaagcattcattcagcagtgtattcgacaactctgtgagtttcttacagaaaatggttatgcacataatgtgtccatgaaatctctacaagctccctctgttaaagacttcctgaagatcttcacatttctttatggcttcctgtgcccctcatacgaacttcctgacacaaagtttgaagaagaggttccaagaatctttaaagaccttgggtatccttttgcactatccaaaagctccatgtacacagtgggggctcctcatacatggcctcacattgtggcagccttagtttggctaatagactgcatcaagatacatactgccatgaaagaaagctcacctttatttgatgatgggcagccttggggagaagaaactgaagatggaattatgcataataagttgtttttggactacaccataaaatgctatgagagttttatgagtggtgccgacagctttgatgagatgaatgcagagctgcagtcaaaactgaaggatttatttaatgtggatgcttttaagctggaatcattagaagcaaaaaacagagcattgaatgaacagattgcaagattggaacaagaaagagaaaaagaaccgaatcgtctagagtcgttgagaaaactgaaggcttccttacaaggagatgttcaaaagtatcaggcatacatgagcaatttggagtctcattcagccattcttgaccagaaattaaatggtctcaatgaggaaattgctagagtagaactagaatgtgaaacaataaaacaggagaacactcgactacagaatatcattgacaaccagaagtactcagttgcagacattgagcgaataaatcatgaaagaaatgaattgcagcagactattaataaattaaccaaggacctggaagctgaacaacagaagttgtggaatgaggagttaaaatatgccagaggcaaagaagcgattgaaacacaattagcagagtatcacaaattggctagaaaattaaaacttattcctaaaggtgctgagaattccaaaggttatgactttgaaattaagtttaatcccgaggctggtgccaactgccttgtcaaatacagggctcaagtttatgtacctcttaaggaactcctgaatgaaactgaagaagaaattaataaagccctaaataaaaaaatgggtttggaggatactttagaacaattgaatgcaatgataacagaaagcaagagaagtgtgagaactctgaaagaagaagttcaaaagctggatgatctttaccaacaaaaaattaagaaagaaagaaagaaa

SEQ ID NO: 161844 - DNA, 1929 bp, Artificial Sequence
  derived and/or modified sequence
atgaagagaagcagcgtgagcagcggcggcgccggcagactgagcatgcaggagctgagaagccaggacgtgaacaagcagggcctgtacaccccccagaccaaggagaagcccaccttcggcaagctgagcatcaacaagcccaccagcgagagaaaggtgagcctgttcggcaagagaaccagcggccacggcagcagaaacagccagctgggcatcttcagcagcagcgagaagatcaaggaccccagacccctgaacgacaaggccttcatccagcagtgcatcagacagctgtgcgagttcctgaccgagaacggctacgcccacaacgtgagcatgaagagcctgcaggcccccagcgtgaaggacttcctgaagatcttcaccttcctgtacggcttcctgtgccccagctacgagctgcccgacaccaagttcgaggaggaggtgcccagaatcttcaaggacctgggctaccccttcgccctgagcaagagcagcatgtacaccgtgggcgccccccacacctggccccacatcgtggccgccctggtgtggctgatcgactgcatcaagatccacaccgccatgaaggagagcagccccctgttcgacgacggccagccctggggcgaggagaccgaggacggcatcatgcacaacaagctgttcctggactacaccatcaagtgctacgagagcttcatgagcggcgccgacagcttcgacgagatgaacgccgagctgcagagcaagctgaaggacctgttcaacgtggacgccttcaagctggagagcctggaggccaagaacagagccctgaacgagcagatcgccagactggagcaggagagagagaaggagcccaacagactggagagcctgagaaagctgaaggccagcctgcagggcgacgtgcagaagtaccaggcctacatgagcaacctggagagccacagcgccatcctggaccagaagctgaacggcctgaacgaggagatcgccagagtggagctggagtgcgagaccatcaagcaggagaacaccagactgcagaacatcatcgacaaccagaagtacagcgtggccgacatcgagagaatcaaccacgagagaaacgagctgcagcagaccatcaacaagctgaccaaggacctggaggccgagcagcagaagctgtggaacgaggagctgaagtacgccagaggcaaggaggccatcgagacccagctggccgagtaccacaagctggccagaaagctgaagctgatccccaagggcgccgagaacagcaagggctacgacttcgagatcaagttcaaccccgaggccggcgccaactgcctggtgaagtacagagcccaggtgtacgtgcccctgaaggagctgctgaacgagaccgaggaggagatcaacaaggccctgaacaagaagatgggcctggaggacaccctggagcagctgaacgccatgatcaccgagagcaagagaagcgtgagaaccctgaaggaggaggtgcagaagctggacgacctgtaccagcagaagatcaaggaggccgaggaggaggacgagaagtgcgccagcgagctggagagcctggagaagcacaagcacctgctggagagcaccgtgaaccagggcctgagcgaggccatgaacgagctggacgccgtgcagagagagtaccagctggtggtgcagaccaccaccgaggagagaagaaaggtgggcaacaacctgcagagactgctggagatggtggccacccacgtgggcagcgtggagaagcacctggaggagcagatcgccaaggtggacagagagtacgaggagtgcatgagcgaggacctgagcgagaacatcaaggagatcagagacaagtacgagaagaaggccaccctgatcaagagcagcgaggagtag

SEQ ID NO: 161845 - protein, 881 aa, Artificial Sequence
  derived and/or modified sequence
MVLRRMHRPRSCSYQLLLEHQRPSCIQGLRWTPLTNSEESLDFSESLEQASTERVLRAGRQLHRHLLATCPNLIRDRKYHLRLYRQCCSGRELVDGILALGLGVHSRSQVVGICQVLLDEGALCHVKHDWAFQDRDAQFYRFPGPEPEPVRTHEMEEELAEAVALLSQRGPDALLTVALRKPPGQRTDEELDLIFEELLHIKAVAHLSNSVKRELAAVLLFEPHSKAGTVLFSQGDKGTSWYIIWKGSVNVVTHGKGLVTTLHEGDDFGQLALVNDAPRAATIILREDNCHFLRVDKQDFNRIIKDVEAKTMRLEEHGKVVLVLERASQGAGPSRPPTPGRNRYTVMSGTPEKILELLLEAMGPDSSAHDPTETFLSDFLLTHRVFMPSAQLCAALLHHFHVEPAGGSEQERSTYVCNKRQQILRLVSQWVALYGSMLHTDPVATSFLQKLSDLVGRDTRLSNLLREQWPERRRCHRLENGCGNASPQMKARNLPVWLPNQDEPLPGSSCAIQVGDKVPYDICRPDHSVLTLQLPVTASVREVMAALAQEDGWTKGQVLVKVNSAGDAIGLQPDARGVATSLGLNERLFVVNPQEVHELIPHPDQLGPTVGSAEGLDLVSAKDLAGQLTDHDWSLFNSIHQVELIHYVLGPQHLRDVTTANLERFMRRFNELQYWVATELCLCPVPGPRAQLLRKFIKLAAHLKEQKNLNSFFAVMFGLSNSAISRLAHTWERLPHKVRKLYSALERLLDPSWNHRVYRLALAKLSPPVIPFMPLLLKDMTFIHEGNHTLVENLINFEKMRMMARAARMLHHCRSHNPVPLSPLRSRVSHLHEDSQVARISTCSEQSLSTRSPASTWAYVQQLKVIDNQRELSRLSRELEP

SEQ ID NO: 161846 - protein, 141 aa, Artificial Sequence
  derived and/or modified sequence
MVLRRMHRPRSCSYQLLLEHQRPSCIQGLRWTPLTNSEESLDFSESLEQASTERVLRAGRQLHRHLLATCPNLIRDRKYHLRLYRQCCSGRELVDGILALGLGVHSRSQVVGICQVLLDEGALCHVKHDWAFQDRDAQFYR

SEQ ID NO: 161847 - protein, 570 aa, Artificial Sequence
  derived and/or modified sequence
MRLEEHGKVVLVLERASQGAGPSRPPTPGRNRYTVMSGTPEKILELLLEAMGPDSSAHDPTETFLSDFLLTHRVFMPSAQLCAALLHHFHVEPAGGSEQERSTYVCNKRQQILRLVSQWVALYGSMLHTDPVATSFLQKLSDLVGRDTRLSNLLREQWPERRRCHRLENGCGNASPQMKARNLPVWLPNQDEPLPGSSCAIQVGDKVPYDICRPDHSVLTLQLPVTASVREVMAALAQEDGWTKGQVLVKVNSAGDAIGLQPDARGVATSLGLNERLFVVNPQEVHELIPHPDQLGPTVGSAEGLDLVSAKDLAGQLTDHDWSLFNSIHQVELIHYVLGPQHLRDVTTANLERFMRRFNELQYWVATELCLCPVPGPRAQLLRKFIKLAAHLKEQKNLNSFFAVMFGLSNSAISRLAHTWERLPHKVRKLYSALERLLDPSWNHRVYRLALAKLSPPVIPFMPLLLKDMTFIHEGNHTLVENLINFEKMRMMARAARMLHHCRSHNPVPLSPLRSRVSHLHEDSQVARISTCSEQSLSTRSPASTWAYVQQLKVIDNQRELSRLSRELEP

SEQ ID NO: 161848 - DNA, 426 bp, Artificial Sequence
  derived and/or modified sequence
atggtgctgagaagaatgcacagacccagaagctgcagctaccagctgctgctggagcaccagagacccagctgcatccagggcctgagatggacccccctgaccaacagcgaggagagcctggacttcagcgagagcctggagcaggccagcaccgagagagtgctgagagccggcagacagctgcacagacacctgctggccacctgccccaacctgatcagagacagaaagtaccacctgagactgtacagacagtgctgcagcggcagagagctggtggacggcatcctggccctgggcctgggcgtgcacagcagaagccaggtggtgggcatctgccaggtgctgctggacgagggcgccctgtgccacgtgaagcacgactgggccttccaggacagagacgcccagttctacagatag

SEQ ID NO: 161849 - DNA, 1713 bp, Artificial Sequence
  derived and/or modified sequence
atgagactggaggagcacggcaaggtggtgctggtgctggagagagccagccagggcgccggccccagcagaccccccacccccggcagaaacagatacaccgtgatgagcggcacccccgagaagatcctggagctgctgctggaggccatgggccccgacagcagcgcccacgaccccaccgagaccttcctgagcgacttcctgctgacccacagagtgttcatgcccagcgcccagctgtgcgccgccctgctgcaccacttccacgtggagcccgccggcggcagcgagcaggagagaagcacctacgtgtgcaacaagagacagcagatcctgagactggtgagccagtgggtggccctgtacggcagcatgctgcacaccgaccccgtggccaccagcttcctgcagaagctgagcgacctggtgggcagagacaccagactgagcaacctgctgagagagcagtggcccgagagaagaagatgccacagactggagaacggctgcggcaacgccagcccccagatgaaggccagaaacctgcccgtgtggctgcccaaccaggacgagcccctgcccggcagcagctgcgccatccaggtgggcgacaaggtgccctacgacatctgcagacccgaccacagcgtgctgaccctgcagctgcccgtgaccgccagcgtgagagaggtgatggccgccctggcccaggaggacggctggaccaagggccaggtgctggtgaaggtgaacagcgccggcgacgccatcggcctgcagcccgacgccagaggcgtggccaccagcctgggcctgaacgagagactgttcgtggtgaacccccaggaggtgcacgagctgatcccccaccccgaccagctgggccccaccgtgggcagcgccgagggcctggacctggtgagcgccaaggacctggccggccagctgaccgaccacgactggagcctgttcaacagcatccaccaggtggagctgatccactacgtgctgggcccccagcacctgagagacgtgaccaccgccaacctggagagattcatgagaagattcaacgagctgcagtactgggtggccaccgagctgtgcctgtgccccgtgcccggccccagagcccagctgctgagaaagttcatcaagctggccgcccacctgaaggagcagaagaacctgaacagcttcttcgccgtgatgttcggcctgagcaacagcgccatcagcagactggcccacacctgggagagactgccccacaaggtgagaaagctgtacagcgccctggagagactgctggaccccagctggaaccacagagtgtacagactggccctggccaagctgagcccccccgtgatccccttcatgcccctgctgctgaaggacatgaccttcatccacgagggcaaccacaccctggtggagaacctgatcaacttcgagaagatgagaatgatggccagagccgccagaatgctgcaccactgcagaagccacaaccccgtgcccctgagccccctgagaagcagagtgagccacctgcacgaggacagccaggtggccagaatcagcacctgcagcgagcagagcctgagcaccagaagccccgccagcacctgggcctacgtgcagcagctgaaggtgatcgacaaccagagagagctgagcagactgagcagagagctggagccctag

SEQ ID NO: 161850 - DNA, 426 bp, Artificial Sequence
  derived and/or modified sequence
atggtgctccggaggatgcacagacctaggtcatgcagttaccagctcttgttggagcaccagagaccaagttgcatacaggggctgcgatggacccctctaactaacagcgaagagtctcttgattttagtgagagtctggagcaggcttccacagagagagttctgagggctggacggcaactgcaccggcacctgctcgccacatgccccaatctaatccgcgacagaaaatatcatctaagactgtatcgtcagtgttgctctggccgtgagctagtagacggaatcttagcgctggggctcggggttcactcaaggtcccaggtggtcgggatatgtcaagttctcctcgacgaaggcgccctttgccacgtaaaacatgactgggcatttcaggatagagacgctcagttctataggtag

SEQ ID NO: 161851 - DNA, 1713 bp, Artificial Sequence
  derived and/or modified sequence
atgcggctcgaggagcatggcaaggttgtgctggttctggagagggcttctcagggcgcaggcccttcacgtccacccacccctggccgcaaccgttatacagttatgagcggtacacccgagaagatcctagaactcctgctggaggccatgggccctgatagctccgctcacgaccccaccgagacattcttatctgacttcttgctgacacatcgagttttcatgcctagcgctcagctctgcgctgcccttctacaccatttccacgtggaaccagcgggcggctctgagcaggaaagaagcacctacgtttgcaataaacgacagcagatccttcgtctcgttagccagtgggtggcactctacgggtctatgctacatacagacccagttgccacctcgtttcttcagaaactgtctgacctggtcggcagggatacccggttgtccaatctgttgcgagaacagtggccagagcggcgtcggtgccaccgcttggagaacggctgcggaaatgccagcccccaaatgaaagcacgtaacttacccgtgtggttgcccaaccaggatgagcccttaccgggcagttcctgtgccatccaagttggagacaaagtcccatatgatatatgtagacccgaccatagtgtactaactcttcagcttcccgttaccgcaagcgtcagggaggtaatggcagccttggcacaggaggatggatggacaaagggacaagtattggtgaaagtcaattcagcaggggatgctatcgggcttcaacctgatgcgaggggcgtggccaccagcctaggcctgaacgaaagactgtttgtggtaaatcctcaagaggtacacgaactcatcccccaccctgatcagttggggccaacggttgggtccgcagagggattggacctcgtctccgccaaggacctggccggccagttaacagatcatgactggtccctcttcaacagcatccatcaagttgaactgatccactacgtcctgggcccacagcatcttagggatgttacgacagccaatctggaacgctttatgcggcgttttaatgagcttcagtattgggtggccaccgagctttgcctttgccccgtgccaggcccccgagcacagttactccggaaattcatcaaactggcggctcacctgaaggagcagaagaacttgaatagttttttcgccgtgatgtttggcctctctaattcagccatctcacggctggctcacacgtgggaacggctgccccataaagtccggaagctgtactccgcactcgagcggctcttggatccttcctggaaccatcgggtgtaccgactggcactggctaagctctctcctcctgtgatcccctttatgccacttttgctgaaggacatgacattcatccacgagggtaaccataccctagtcgagaacctgatcaacttcgaaaaaatgagaatgatggcacgcgccgcgaggatgctgcatcactgccggtcccacaaccctgtgcctctcagtcctttgcggagtagagtgtcacacctacacgaggattcgcaagttgctaggatcagtacatgctccgaacaatccctatctaccagatccccagcatcaacgtgggcatatgtccaacagctgaaggtaattgataaccaaagggagttgtcccgcctttccagggagcttgagccatag

SEQ ID NO: 161852 - DNA, 426 bp, Artificial Sequence
  derived and/or modified sequence
atggtgctgcggaggatgcaccggcccaggagctgcagctaccagctgctgctggagcaccagaggcccagctgcatccagggcctgcgctggacccccctgaccaacagcgaggagagcctggacttcagcgagagcctggagcaggccagcacagagcgggtgctgcgggccggccggcagctgcaccgccacctgctggccacctgccccaacctgatccgggacaggaagtaccacctgcggctgtaccggcagtgctgcagcggccgggagctggtggatggcatcctggccctgggcctgggcgtgcacagccgcagccaggtggtgggcatctgccaggtgctgctggatgaaggagccctgtgccacgtgaagcatgactgggccttccaggacagagatgcccagttctacagatag

SEQ ID NO: 161853 - DNA, 1713 bp, Artificial Sequence
  derived and/or modified sequence
atgaggctggaggagcacggcaaggtggtgctggtgctggagcgggccagccagggcgccggccccagcaggcctcccaccccaggcaggaaccgctacacagtgatgagcggcaccccagagaagatcctggagctgctgctggaggccatgggccctgacagcagcgcccatgaccccacagagaccttcctgagtgacttcctgctgacccacagggtcttcatgcccagcgcccagctgtgtgccgccctgctgcaccacttccacgtggagcctgctgggggcagcgagcaggagaggagcacctacgtgtgcaacaagaggcagcagatcctgcggctggtgtcccagtgggtggccctgtatggctccatgctgcacacagatcctgtggccaccagcttcctgcagaagctgagtgacctggtgggccgggacacccggctgagcaacctgctgcgggagcagtggccagagcggcggcgctgccaccggctggagaatggctgtggaaatgccagcccccagatgaaggccaggaacctgcctgtgtggctgcccaaccaggatgagcccctgcccggcagcagctgtgccatccaggtgggggacaaggtgccctatgacatctgcaggccagaccacagcgtgctgaccctgcagctgcctgtgacagcctctgtgcgggaggtgatggccgccctggcccaggaggatggctggaccaagggccaggtgctggtgaaggtgaacagcgctggagatgccatcggcctgcagccagatgcccggggcgtggccaccagcctgggcctgaatgaaagactctttgtggtgaacccccaggaggtgcatgagctgatcccccacccagaccagctgggccccaccgtgggcagcgctgagggcctggacctggtgtctgccaaggacctggccggccagctgacagaccatgactggagcctcttcaacagcatccaccaggtggagctgatccactacgtgctgggcccccagcacctgagagatgtgaccacagccaacctggagcgcttcatgaggcgcttcaatgagctgcagtactgggtggccacagagctgtgcctgtgccctgtgcccggcccccgggcccagctgctgaggaagttcatcaagctggccgcccacctgaaggagcagaagaacctgaacagcttctttgctgtgatgtttggcctgagcaacagcgccatcagccggctggcccacacctgggagcggctgccccacaaggtgaggaagctgtacagcgccctggagcggctgctggaccccagctggaaccaccgggtgtaccgcctggccctggccaagctgagcccccctgtgatccccttcatgcccctgctgctgaaggacatgaccttcatccacgagggcaaccacaccctggtggagaacctgatcaactttgagaagatgaggatgatggcccgggccgccaggatgctgcaccactgccgcagccacaaccctgtgcccctgagccccctgcggagccgggtgagccacctgcacgaggacagccaggtggcccgcatcagcacctgcagcgagcagagcctgagcaccaggagccctgccagcacctgggcctacgtgcagcagctgaaggtgattgacaaccagcgggagctgagccggctgagccgggagctggagccctag

SEQ ID NO: 161854 - DNA, 426 bp, Artificial Sequence
  derived and/or modified sequence
atggtgctgcggcggatgcaccggccccggagctgcagctaccagctccttctggagcatcagcgccccagctgcatacaaggattgcgctggactcctctgaccaacagcgaggagagtttggactttagtgaatctttggaacaagcttcgaccgagagggtgctgagggcaggccgtcagctccatcgtcacctgctggccacctgtcctaatctgatacgtgaccggaagtaccatttaaggctgtaccggcaatgttgctctggcagagagcttgtggatggcattctggctttaggcctgggagtgcattctcgttcacaggtagtgggaatttgtcaggtgctgctggatgagggggcattgtgccacgtcaagcacgattgggcctttcaggatcgcgacgcacaattttaccgatag

SEQ ID NO: 161855 - DNA, 1713 bp, Artificial Sequence
  derived and/or modified sequence
atgcggctggaggagcacggcaaggtggtgctggtgctggagcgggcctctcagggcgcggggccaagccgccccccaactccagggagaaatcggtacaccgtcatgagcggaacccctgaaaagattcttgagctactgctcgaggcaatgggccccgactcttcagcgcatgaccccactgagacattcctatcagattttctcctcacccatagagtgtttatgccctcagctcagctctgtgcagcactgctgcatcatttccacgtagagccagcaggaggttccgaacaagagagaagtacctacgtctgcaataagaggcagcaaatacttaggttggtgtcccagtgggtagccttatatggctcgatgctacacaccgatccagtggccacttcctttctgcagaagctctcggatttggtcggtagagacacccgcctgtcaaacctgttgcgtgaacagtggcctgaaaggcggaggtgccatagactagaaaatgggtgcggtaacgccagcccccagatgaaggctcgaaaccttcctgtgtggctgcctaatcaggatgagcctcttcctgggagctcgtgtgctatccaggtaggagacaaggtcccttacgacatctgtcgtccagaccactcagtgttgacccttcaacttccagtcactgcctctgtgcgagaagtgatggcagccttggcgcaggaagacgggtggacaaagggacaggtgctcgtcaaggtaaactccgcaggcgacgccattgggttacagcccgacgctcgcggcgtcgctacttctcttggactgaacgagcggttatttgtggtgaatcctcaggaagtgcatgagctaattccacaccctgaccagctgggcccaacagtggggagtgcggaggggctagatctggtctcagcaaaggacctggctggccagctgaccgatcatgactggtcccttttcaattccattcatcaggttgaactcattcactacgtgttaggtccacagcacctccgcgacgtgaccaccgccaacctggagcgctttatgagaagattcaatgagcttcagtattgggtggcgaccgaactgtgcctgtgccctgtccccggtccccgggcacagctgctgcgcaagtttataaagctggcagcccaccttaaggagcaaaagaaccttaatagcttttttgccgtgatgtttggtctgtctaattctgccatctcccggctcgcccacacatgggaacgcctcccccacaaggtgaggaaactttattccgccctcgagaggctccttgacccgtcttggaaccaccgcgtataccgcctggctctggccaaactgtccccccctgtaatccctttcatgccactgttgctcaaggatatgactttcatccacgaaggcaaccacaccctggttgagaatctcatcaacttcgaaaagatgaggatgatggcaagagcagcaagaatgcttcaccactgtcgcagccacaatcccgttccgctgtctccactacgatccagggtgtctcacctgcatgaagacagccaggtggctcggatttccacctgctcggagcagtccttgagtacccggagccccgcatctacctgggcctatgtccaacagctgaaagttatagataatcagcgagagttatcaaggctgtcccgagaactcgaaccatag

SEQ ID NO: 161856 - DNA, 426 bp, Artificial Sequence
  derived and/or modified sequence
atggtcttgcggaggatgcaccgtcctcgctcctgtagctatcagttgcttctggaacaccagcggccaagttgcattcagggtctgcggtggacccccctgaccaattccgaggagtcactggacttctccgaaagcctcgaacaggctagcactgagcgtgtgctgcgcgctggacgacagctgcacaggcacctattagccacatgtcccaacctcatcagggatagaaaatatcacctccggctttatcgccaatgttgttcaggacgcgagttggttgatggaattctggctctggggctgggcgtccatagccgatcacaggtggtgggtatctgccaggtgttgctcgatgaaggagctctgtgtcatgtgaaacacgattgggctttccaggatcgagacgcccagttctataggtag

SEQ ID NO: 161857 - DNA, 1713 bp, Artificial Sequence
  derived and/or modified sequence
atgaggctggaggagcatggtaaagtggtgcttgtcctagaacgcgcttcccaaggggcaggcccttcacggcctcccacccccggaagaaatagatacactgtcatgagcggcactcctgaaaagattctcgagctgctgctcgaagctatgggaccagattcgagtgcacacgatccaaccgagacatttctttctgattttcttctgacacacagggtgttcatgcccagcgcccagttatgtgcagcactgctgcatcacttccatgtggagccagctggaggcagcgagcaggagcggtcaacttacgtatgtaacaaaaggcaacagattctgcgtctcgtttcccagtgggtagctttgtacggttccatgttacacactgatcccgtcgctactagcttcctgcagaagctgtctgatctggtagggcgtgacacccgattgagtaaccttctcagagaacagtggccagagcgaaggcggtgccacagactcgaaaacggttgcggcaacgcttcccctcaaatgaaggccagaaatctgccggtgtggctgcctaaccaagatgaacccctgcccggttctagctgcgcaatccaggtgggtgacaaggtcccctatgatatttgccgacccgatcactctgtgctaaccttacagctgccagttactgctagcgttagggaagtgatggcagccctggcacaggaggacggatggactaaaggtcaggtgttagtgaaggtgaactccgcaggggacgccattggattgcagcccgacgctagaggcgtagccaccagtctgggcttgaacgagaggctcttcgtggtcaacccccaggaagttcatgaacttattccacatcccgaccagctaggacctactgtcggcagcgctgaggggctggatcttgtaagcgctaaggacctcgcgggtcagctcacagatcacgactggagtctgttcaatagcatccatcaagtggaactcatccactacgtcttgggaccacaacatttgagagatgtcacaaccgccaacctcgagcgctttatgcgccgtttcaacgagctgcaatactgggtcgctacggaactgtgcttatgtcctgtgcccggtccaagagctcagctgctccggaagttcatcaagttggctgcacatcttaaggaacagaaaaatctgaattcattcttcgcagttatgtttggattaagcaattcagctatcagtcgactggcccatacctgggaacgcctgccacataaggtgaggaagctttacagcgccctggaacgcttgcttgaccccagctggaatcatagggtctaccgccttgcgctggctaagttgtctccacccgtcattccctttatgccgctgttgcttaaggacatgacttttatacatgaggggaaccatactctggtggaaaatttaatcaactttgaaaaaatgcgtatgatggcccgtgccgcacggatgttacatcattgccggagtcataacccagtgcctctatcaccattgcggtcacgcgtgtcccacctgcacgaagacagccaagtggcaaggatctctacctgtagtgagcagtccctttcgacccggtcaccagccagcacttgggcctatgttcagcaactgaaggtgattgacaaccaacgcgagttgagtagactctcaagggagctggagccctag

SEQ ID NO: 161858 - DNA, 2663 bp, Artificial Sequence
  derived and/or modified sequence
gtgcgagcttgaaaagaaacatgaaggtgggctggccaggtgagagctgctggcaggtgggcctggctgtggaggatagcccagctctgggagcaccgcgggtgggagccctccctgacgtggtgccggaggggacactactcaacatggtgttgagaaggatgcaccggccccgaagctgctcctaccagctgctgctggagcaccagcgtccgagctgcatccaggggctgcgctggcccaggtcagcgcacggatgaagagctggacctcatctttgaggagctgctgcacatcaaggctgtggcccacctctccaactcggtgaagcgagaattagcggctgttctgctctttgaaccacacagcaaggcagggaccgtgttgttcagccagggggacaagggcacttcgtggtacattatctggaagggatctgtcaacgtggtgacccatggcaaggggctggtgaccaccctgcatgagggagatgattttggacagctggctctggtgaatgatgcaccccgggcagccaccatcatcctgcgagaagacaactgtcatttcctgcgtgtggacaagcaggacttcaaccgtatcatcaaggatgtggaggcaaagaccatgcggctggaagaacatggcaaagtggtgctggtgctggagagagcctctcagggcgccggcccttcccgacccccaaccccaggcaggaaccggtatacagtgatgtctggcaccccagagaagatcctagagcttctgttggaggccatgggaccagattccagtgctcatgacccaacagagacattcctcagcgacttcctcctgacccacagggtcttcatgcccagcgcccaactctgcgctgcccttctgcaccacttccatgtggagcctgcgggtggcagcgagcaggagcgcagcacctacgtctgcaacaagaggcagcagatcttgcggctggtcagccagtgggtggccctgtatggctccatgctccacactgaccctgtggccaccagcttcctccagaaactctcagacctggtgggcagggacacccgactcagcaacctgctgagggagcagtggccagagaggcggcgatgccacaggttggagaatggctgtgggaatgcatctcctcagatgaaggcccggaacttgcctgtttggctccccaaccaggacgagccccttcctggcagcagctgtgccatccaagttggggataaagtcccctatgacatctgccggccagaccactcagtgttgaccctgcagctgcctgtgacagcctccgtgagagaggtgatggcagcgttggcccaggaggatggctggaccaaggggcaggtgctggtgaaggtcaattctgcaggtgatgccattggcctgcagccagatgcccgtggtgtggccacatctctggggctcaatgagcgtctctttgttgtcaacccacaggaagtgcatgagctgatcccacaccctgaccagctggggcccactgtgggctctgctgaggggctggacctggtgagtgccaaggacctggcaggccagctgacggaccacgactggagcctcttcaacagtatccaccaggtggagctgatccactatgtgctgggcccccagcatctgcgggatgtcaccaccgccaacctggagcgcttcatgcgccgcttcaatgagctgcagtactgggtggccaccgagctgtgtctctgccccgtgcccggcccccgggcccagctgctcaggaagttcattaagctggcggcccacctcaaggagcagaagaatctcaattccttctttgccgtcatgtttggcctcagcaactcggccatcagccgcctagcccacacctgggagcggctgcctcacaaagtccggaagctgtactccgccctcgagaggctgctggatccctcatggaaccaccgggtataccgactggccctcgccaagctctcccctcctgtcatccccttcatgccccttcttctcaaagacatgaccttcattcatgagggaaaccacacactagtggagaatctcatcaactttgagaagatgagaatgatggccagagccgcgcggatgctgcaccactgccgaagccacaaccctgtgcctctctcaccactcagaagccgagtttcccacctccacgaggacagccaggtggcgaggatttccacatgctcggagcagtccctgagcacccggagtccagccagcacctgggcttatgtccagcagctgaaggtcattgacaaccagcgggaactctcccgcctctcccgagagctggagccatgaggaggggctgggactggagctggagcaggcacttgcagccgggaaagccagggtgtgccgggccaagatactcacaggctggccacagctgggcaaggctctccgtggagtggactcgagtccctggagcaggcagtgtggaggcagccatcccctgtgatgactggcagctaaggaggacctcggagtggacccgagccaggaataacgaatgacccaaggccaaggaagggaggacagagaggccccaggagtgggtggagagtggagtgcgctgggacgttgtgtgcaatagagaggtctccacaccagatgtcttccag

SEQ ID NO: 161859 - protein, 450 aa, Artificial Sequence
  derived and/or modified sequence
MDPGQQPPPQPAPQGQGQPPSQPPQGQGPPSGPGQPAPAATQAAPQAPPAGHQIVHVRGDSETDLEALFNAVMNPKTANVPQTVPMRLRKLPDSFFKPPEPKSHSRQASTDAGTAGALTPQHVRAHSSPASLQLGAVSPGTLTPTGVVSGPAATPTAQHLRQSSFEIPDDVPLPAGWEMAKTSSGQRYFLNHIDQTTTWQDPRKAMLSQMNVTAPTSPPVQQNMMNSASAMNQRISQSAPVKQPPPLAPQSPQGGVMGGSNSNQQQQMRLQQLQMEKERLRLKQQELLRQELALRSQLPTLEQDGGTQNPVSSPGMSQELRTMTTNSSDPFLNSGTYHSRDESTDSGLSMSSYSVPRTPDDFLNSVDEMDTGDTINQSTLPSQQNRFPDYLEAIPGTNVDLGTLEGDGMNIEGEELMPSLQEALSSDILNDMESVLAATKLDKESFLTWL

SEQ ID NO: 161860 - DNA, 1353 bp, Artificial Sequence
  derived and/or modified sequence
atggaccccggccagcagccccccccccagcccgccccccagggccagggccagccccccagccagcccccccagggccagggcccccccagcggccccggccagcccgcccccgccgccacccaggccgccccccaggccccccccgccggccaccagatcgtgcacgtgagaggcgacagcgagaccgacctggaggccctgttcaacgccgtgatgaaccccaagaccgccaacgtgccccagaccgtgcccatgagactgagaaagctgcccgacagcttcttcaagccccccgagcccaagagccacagcagacaggccagcaccgacgccggcaccgccggcgccctgaccccccagcacgtgagagcccacagcagccccgccagcctgcagctgggcgccgtgagccccggcaccctgacccccaccggcgtggtgagcggccccgccgccacccccaccgcccagcacctgagacagagcagcttcgagatccccgacgacgtgcccctgcccgccggctgggagatggccaagaccagcagcggccagagatacttcctgaaccacatcgaccagaccaccacctggcaggaccccagaaaggccatgctgagccagatgaacgtgaccgcccccaccagcccccccgtgcagcagaacatgatgaacagcgccagcgccatgaaccagagaatcagccagagcgcccccgtgaagcagcccccccccctggccccccagagcccccagggcggcgtgatgggcggcagcaacagcaaccagcagcagcagatgagactgcagcagctgcagatggagaaggagagactgagactgaagcagcaggagctgctgagacaggagctggccctgagaagccagctgcccaccctggagcaggacggcggcacccagaaccccgtgagcagccccggcatgagccaggagctgagaaccatgaccaccaacagcagcgaccccttcctgaacagcggcacctaccacagcagagacgagagcaccgacagcggcctgagcatgagcagctacagcgtgcccagaacccccgacgacttcctgaacagcgtggacgagatggacaccggcgacaccatcaaccagagcaccctgcccagccagcagaacagattccccgactacctggaggccatccccggcaccaacgtggacctgggcaccctggagggcgacggcatgaacatcgagggcgaggagctgatgcccagcctgcaggaggccctgagcagcgacatcctgaacgacatggagagcgtgctggccgccaccaagctggacaaggagagcttcctgacctggctgtag

SEQ ID NO: 161861 - DNA, 1353 bp, Artificial Sequence
  derived and/or modified sequence
atggaccccggacagcaacctcccccacagcctgctcctcaaggccagggccaacctcccagccaaccacctcagggacagggccctccttccggccccggtcagcctgcccctgccgcaacccaagccgccccccaggccccacccgctggccatcagatcgtgcatgttcgaggcgactcagaaactgatctggaagctttatttaatgccgtcatgaaccctaaaacagccaatgtgcctcaaacggttcctatgcgccttaggaaactgcctgactcctttttcaaacccccggagccgaagtcacactcccggcaggccagcaccgatgccggcacagccggggctctaactccccaacacgtgcgcgcccacagttccccagcatccctacaactcggagctgtatcccccggcactcttactccaaccggtgtggtttccggccctgccgccactccaaccgctcaacacctgagacagagttcctttgaaatcccggatgatgtgcctctgcctgccggctgggagatggccaagacctccagcggccagagatatttcctgaaccacatcgaccagacaactacctggcaggacccaagaaaggccatgttatcgcagatgaacgtcactgctccaacttccccacctgtgcagcaaaatatgatgaatagcgcctctgccatgaatcagaggatatcacagtccgctcccgtgaaacagcctccacctctggctccacaatccccgcaagggggggttatgggtggtagcaattcaaatcagcaacagcagatgcgactgcagcagcttcagatggagaaggaaagactgcggctgaagcagcaagagctgctgcgccaggaattagcactgcgctcccagctgcccacactagagcaggacggggggactcagaaccccgtgagcagtcctggtatgtcgcaggaactgcggacgatgacgactaatagttcggacccttttctcaactctgggacataccacagcagggatgaaagtacggatagcggcctgagtatgtcatcatattcagtcccaagaacacccgacgactttctgaatagcgtcgatgagatggacaccggagacacaatcaaccagagcacccttccgtcccagcagaaccgattccctgactatctcgaagcgattcccggcacaaacgttgatctgggcaccctggagggcgacggaatgaacattgagggcgaagagctgatgccaagtctccaggaggcattgagcagcgatattttgaacgatatggaatcagtactggccgctacaaaactcgataaggagtctttccttacatggttgtag

SEQ ID NO: 161862 - DNA, 1353 bp, Artificial Sequence
  derived and/or modified sequence
atggaccccggccagcagcccccaccccagcctgccccccagggccagggccagccccccagccagcccccccagggccagggccccccatctggccctggccagcctgccccagctgccacccaggccgccccccaggcccccccagctggccaccagatcgtgcacgtgcggggggacagcgagacagacctggaggccctcttcaatgctgtgatgaaccccaagacagccaacgtgccccagacagtgcccatgaggctgaggaagctgcctgacagcttcttcaagcccccagagcccaagagccacagccggcaggccagcacagatgctggaacagctggggccctgaccccccagcacgtgcgggcccacagcagccctgccagcctgcagctgggcgctgtgtccccaggcaccctgacccccactggagtggtgtctggccctgctgccacccccacagcccagcacctgcggcagagcagctttgagatcccagatgatgtgcccctgcctgctggctgggagatggccaagaccagcagcggccagcgctacttcctgaaccacatcgaccagaccaccacctggcaggaccccaggaaggccatgctgagccagatgaatgtgacagcccccaccagcccccctgtgcagcagaacatgatgaacagcgccagcgccatgaaccagaggatcagccagagcgcccctgtgaagcagcccccacccctggccccccagagcccccagggcggcgtgatgggcggcagcaacagcaaccagcagcagcagatgaggctgcagcagctgcagatggagaaggagcggctgcggctgaagcagcaggagctgctgcggcaggagctggccctgcggagccagctgcccaccctggagcaggacggcggcacccagaaccctgtgagcagccctggcatgagccaggagctgcggaccatgaccaccaacagcagtgaccccttcctgaacagcggcacctaccacagcagagatgagagcacagacagcggcctgtccatgagcagctacagcgtgcccaggaccccagatgacttcctgaacagcgtggatgagatggacacaggagacaccatcaaccagagcaccctgcccagccagcagaaccgcttcccagactacctggaggccatccctggcaccaacgtggacctgggcaccctggagggagatggcatgaacattgaaggagaggagctgatgcccagcctgcaggaggccctgagcagtgacatcctgaatgacatggagagcgtgctggccgccaccaagctggacaaggagagcttcctgacctggctgtag

SEQ ID NO: 161863 - DNA, 1353 bp, Artificial Sequence
  derived and/or modified sequence
atggaccccggccagcagccccccccccagcccgccccccagggccagggacagcctcctagccagcctccccaggggcagggtcctcccagtggccctgggcagccggcgcctgcggccacacaggctgcgccgcaagctccccctgctggccaccagattgtgcacgttaggggggactcagagaccgatctagaggccctattcaacgcagtgatgaaccccaaaacggctaatgtgcctcagacagttcccatgcgcctgcgcaaactcccagacagcttctttaaaccgcccgagcctaaatctcattcaaggcaggctagcaccgacgccgggacagcaggcgctctgactccacagcatgtgagagcccacagcagtccagcgtccctgcaacttggggccgtttctcctggcaccttgacgcctactggggttgtttccgggcctgccgccacccctacggcacaacacttgaggcaatccagtttcgaaattcctgatgacgtgcctctgcccgcagggtgggaaatggccaagacgtccagcggtcagagatactttttgaaccatatcgaccagactacaacatggcaggatcctagaaaagccatgctcagccaaatgaacgtcacagctcctacctcacctcccgtccagcagaatatgatgaactcggcttccgctatgaaccaacgcatctcccaatcagcccccgttaaacagccccctcctctggccccgcagtcaccgcaggggggagttatgggagggtccaacagcaatcagcagcaacagatgaggcttcagcagctgcagatggagaaggagaggttgcgtcttaaacaacaggagctcctgcggcaagagctcgccctgagatcccagttgcctaccctggagcaagacggtggaacgcagaacccggtctcctctcccggaatgtcccaagaactgcgaactatgacgactaattcaagtgatccgttcttgaattcaggaacatatcactcccgagacgaatccacagattccggcctgagcatgagctcttattccgtgccacgcactcctgacgattttttgaatagcgtggacgaaatggatacgggagacaccattaaccagagtacgctgccttcccagcagaataggttcccagattatctcgaggcgatccccggtacaaatgttgaccttggcactctcgaaggagatggcatgaacatcgagggagaagagcttatgccgagtctccaagaggccttaagtagtgatatccttaatgatatggaaagcgtgctggccgcaacaaagcttgacaaggaaagcttccttacctggctgtag

SEQ ID NO: 161864 - DNA, 1353 bp, Artificial Sequence
  derived and/or modified sequence
atggatcccggacaacagccacccccacagcctgcaccccagggtcagggtcagcctccaagtcagccccctcaggggcagggcccaccaagcggccctggtcaacctgcccctgccgctactcaagccgctccccaggcccctccagccggtcatcagatagtccatgtgaggggagattcagagaccgacttagaagcgttgtttaatgccgtcatgaacccaaaaaccgccaatgtgccgcagacagtgcccatgagactccgcaagctgcctgattctttcttcaagcctcccgagccaaagagtcactctcggcaggcgagcactgacgcaggcactgcaggcgctcttaccccacaacacgtccgcgctcattccagtccagctagcctgcagctgggggcagtgagtcccggaactctgacccccacaggcgtggtgagtggtcccgctgccacccccactgcccaacacctcagacagtccagcttcgagattcccgatgatgttccgctgcctgctggctgggaaatggcaaagacaagttccgggcagcggtacttcctgaatcacatcgatcaaactacaacgtggcaagacccgcgaaaggccatgttgtcccagatgaatgttaccgcccctacaagcccaccagtgcaacaaaacatgatgaactctgcttcagccatgaaccagaggattagccagagtgccccagtgaagcagccgcctccactcgctccccagtctccacagggcggagtaatgggaggctctaacagcaaccaacaacagcagatgcgactgcagcaactacaaatggaaaaggagcggctgcggttaaagcagcaggaacttttgcgtcaggagttagccctgcggagtcagctccctacgctagagcaagatggaggaacccagaacccggtctccagtcccggtatgagccaggaattgcgaaccatgacaactaattcaagcgatccctttctgaactcgggaacataccattcccgggatgagtccaccgactccggcctgtcaatgagctcctactcagtacccaggactccagacgatttcctcaattccgtggacgagatggacaccggagacactataaatcagtcaacgctccctagccaacaaaataggtttccagactaccttgaagcaatcccgggaaccaatgtagatctcggcacattagagggagatggcatgaacatcgagggcgaggagttgatgcctagcctccaagaggcactctcctcggacatccttaatgatatggagtccgtcctagcagccactaaactggataaagaatctttcctgacgtggctctag

SEQ ID NO: 161865 - DNA, 2393 bp, Artificial Sequence
  derived and/or modified sequence
gccgccgccagggaaaagaaagggaggaaggaaggaacaagaaaaggaaataaagagaaaggggaggcggggaaaggcaacgagctgtccggcctccgtcaagggagttggagggaaaaagttctcaggcgccgcaggtccgagtgcctcgcagcccctcccgaggcgcagccgccagaccagtggagccggggcgcagggcgggggcggaggcgccggggcgggggatgcggggccgcggcgcagccccccggccctgagagcgaggacagcgccgcccggcccgcagccgtcgccgcttctccacctcggcccgtggagccggggcgtccgggcgtagccctcgctcgcctgggtcagggggtgcgcgtcgggggaggcagaagccatggatcccgggcagcagccgccgcctcaaccggccccccagggccaagggcagccgccttcgcagcccccgcaggggcagggcccgccgtccggacccgggcaaccggcacccgcggcgacccaggcggcgccgcaggcaccccccgccgggcatcagatcgtgcacgtccgcggggactcggagaccgacctggaggcgctcttcaacgccgtcatgaaccccaagacggccaacgtgccccagaccgtgcccatgaggctccggaagctgcccgactccttcttcaagccgccggagcccaaatcccactcccgacaggccagtactgatgcaggcactgcaggagccctgactccacagcatgttcgagctcattcctctccagcttctctgcagttgggagctgtttctcctgggacactgacccccactggagtagtctctggcccagcagctacacccacagctcagcatcttcgacagtcttcttttgagatacctgatgatgtacctctgccagcaggttgggagatggcaaagacatcttctggtcagagatacttcttaaatcacatcgatcagacaacaacatggcaggaccccaggaaggccatgctgtcccagatgaacgtcacagcccccaccagtccaccagtgcagcagaatatgatgaactcggcttcagccatgaaccagagaatcagtcagagtgctccagtgaaacagccaccacccctggctccccagagcccacagggaggcgtcatgggtggcagcaactccaaccagcagcaacagatgcgactgcagcaactgcagatggagaaggagaggctgcggctgaaacagcaagaactgcttcggcaggagttagccctgcgtagccagttaccaacactggagcaggatggtgggactcaaaatccagtgtcttctcccgggatgtctcaggaattgagaacaatgacgaccaatagctcagatcctttccttaacagtggcacctatcactctcgagatgagagtacagacagtggactaagcatgagcagctacagtgtccctcgaaccccagatgacttcctgaacagtgtggatgagatggatacaggtgatactatcaaccaaagcaccctgccctcacagcagaaccgtttcccagactaccttgaagccattcctgggacaaatgtggaccttggaacactggaaggagatggaatgaacatagaaggagaggagctgatgccaagtctgcaggaagctttgagttctgacatccttaatgacatggagtctgttttggctgccaccaagctagataaagaaagctttcttacatggttatagagccctcaggcagactgaattctaaatctgtgaaggatctaaggagacacatgcaccggaaatttccataagccagttgcagttttcaggctaatacagaaaaagatgaacaaacgtccagcaagatactttaatcctctattttgctcttccttgtccattgctgctgttaatgtattgctgacctctttcacagttggctctaaagaatcaaaagaaaaaaactttttatttcttttgctattaaaactactgttcattttgggggctgggggaagtgagcctgtttggatgatggatgccattccttttgcccagttaaatgttcaccaatcattttaactaaatactcagacttagaagtcagatgcttcatgtcacagcatttagtttgttcaacagttgtttcttcagcttcctttgtccagtggaaaaacatgatttactggtctgacaagccaaaaatgttatatctgatattaaatacttaatgctgatttgaagagatagctgaaaccaaggctgaagactgttttactttcagtattttcttttcctcctagtgctatcattagtcacataatgaccttgattttattttaggagcttataaggcatgagacaatttccatataaatatattaattattgc

SEQ ID NO: 161866 - DNA, 369 bp, Artificial Sequence
  derived and/or modified sequence
atgtccgcaacatggtgctcacccgaaggccaaggtatgggccagggaccagggagggaggtcggcggcaattcggctgcatccgggcctgctagtcctataagagatccgtgtctctctgaggcaggactcaaagggccccccagtgcccaccccaggcgactttgtctactacatcgcctggtgtgcttctcggggggcttgacttccattcagctgagccctagaacctgctgcagtcaccagtgggcacagttattcagtccagcttgtttcccacagtggagggcccctgggtgctcactagatgattccaggtctcttactcggatcagaccagtgcatctgcctgggccctcactcgactag

SEQ ID NO: 161867 - DNA, 369 bp, Artificial Sequence
  derived and/or modified sequence
atgtctgccacctggtgcagccctgagggccagggcatgggccagggccctggccgggaggtgggcggcaacagcgctgccagcggccctgccagccccatccgggacccctgcctgtctgaggccggcctgaagggccccccatctgcccacccccggcggctgtgcctgctgcaccggctggtgtgcttcagcggcggcctgaccagcatccagctgagccccaggacctgctgcagccaccagtgggcccagctgttctccccagcctgcttcccccagtggagggcccctggctgcagcctggatgacagccgcagcctgacccgcatccggcctgtgcacctgcccggccccagcctggactag

SEQ ID NO: 161868 - protein, 806 aa, Artificial Sequence
  derived and/or modified sequence
MRLSPAPLKLSRTPALLALALPLAAALAFSDETLDKVPKSEGYCSRILRAQGTRREGYTEFSLRVEGDPDFYKPGTSYRVTLSAAPPSYFRGFTLIALRENREGDKEEDHAGTFQIIDEEETQFMSNCPVAVTESTPRRRTRIQVFWIAPPAGTGCVILKASIVQKRIIYFQDEGSLTKKLCEQDSTFDGVTDKPILDCCCGTAKYRLTFYGNWSEKTHPKDYPRRANHWSAIIGGSHSKNYVLWEYGGYASEGVKQVAELGSPVKMEEEIRQQSDEVLTVIKAKAQWPAWQPLNVRAAPSAEFSVDRTRHLMSFLTMMGPSPDWNVGLSAEDLCTKECGWVQKVVQDLIPWDAGTDSGVTYESPNKPTIPQEKIRPLTSLDHPQSPFYDPEGGSITQVARVVIERIARKGEQCNIVPDNVDDIVADLAPEEKDEDDTPETCIYSNWSPWSACSSSTCDKGKRMRQRMLKAQLDLSVPCPDTQDFQPCMGPGCSDEDGSTCTMSEWITWSPCSISCGMGMRSRERYVKQFPEDGSVCTLPTEETEKCTVNEECSPSSCLMTEWGEWDECSATCGMGMKKRHRMIKMNPADGSMCKAETSQAEKCMMPECHTIPCLLSPWSEWSDCSVTCGKGMRTRQRMLKSLAELGDCNEDLEQVEKCMLPECPIDCELTEWSQWSECNKSCGKGHVIRTRMIQMEPQFGGAPCPETVQRKKCRIRKCLRNPSIQKLRWREARESRRSEQLKEESEGEQFPGCRMRPWTAWSECTKLCGGGIQERYMTVKKRFKSSQFTSCKDKKEIRACNVHPC

SEQ ID NO: 161869 - protein, 807 aa, Artificial Sequence
  derived and/or modified sequence
MRLSPAPLKLSRTPALLALALPLAAALAFSDETLDKVPKSEGYCSRILRAQGTRREGYTEFSLRVEGDPDFYKPGTSYRVTLSAAPPSYFRGFTLIALRENREGDKEEDHAGTFQIIDEEETQFMSNCPVAVTESTPRRRTRIQVFWIAPPAGTGCVILKASIVQKRIIYFQDEGSLTKKLCEQDSTFDGVTDKPILDCCACGTAKYRLTFYGNWSEKTHPKDYPRRANHWSAIIGGSHSKNYVLWEYGGYASEGVKQVAELGSPVKMEEEIRQQSDEVLTVIKAKAQWPAWQPLNVRAAPSAEFSVDRTRHLMSFLTMMGPSPDWNVGLSAEDLCTKECGWVQKVVQDLIPWDAGTDSGVTYESPNKPTIPQEKIRPLTSLDHPQSPFYDPEGGSITQVARVVIERIARKGEQCNIVPDNVDDIVADLAPEEKDEDDTPETCIYSNWSPWSACSSSTCDKGKRMRQRMLKAQLDLSVPCPDTQDFQPCMGPGCSDEDGSTCTMSEWITWSPCSISCGMGMRSRERYVKQFPEDGSVCTLPTEETEKCTVNEECSPSSCLMTEWGEWDECSATCGMGMKKRHRMIKMNPADGSMCKAETSQAEKCMMPECHTIPCLLSPWSEWSDCSVTCGKGMRTRQRMLKSLAELGDCNEDLEQVEKCMLPECPIDCELTEWSQWSECNKSCGKGHVIRTRMIQMEPQFGGAPCPETVQRKKCRIRKCLRNPSIQKLRWREARESRRSEQLKEESEGEQFPGCRMRPWTAWSECTKLCGGGIQERYMTVKKRFKSSQFTSCKDKKEIRACNVHPC

SEQ ID NO: 161870 - DNA, 2421 bp, Artificial Sequence
  derived and/or modified sequence
atgcgtctgtctccagcacctctgaaattaagccggacgcctgcactacttgccctggcactgccactggccgctgctcttgctttctcggacgagaccttggacaaggtcccgaagtctgaagggtattgctcccggatcttacgagcccaggggacccgcagggaggggtacactgagttctctctccgggtcgagggggaccccgatttttataaacccggaacgtcttaccgagtgactctctctgccgcacccccttcttactttcgcggttttactctgatagctctccgagagaatagggagggtgataaggaggaagaccatgccggtactttccagattatcgatgaggaggagactcagtttatgagcaattgtcccgtcgccgtcactgagagtaccccaagacgacgcacaagaatccaagtcttttggatcgcacccccagccggaacaggttgcgtcattttaaaggcctcgatagttcagaagaggattatctactttcaggacgaggggtctttgacaaaaaagctgtgcgagcaagatagcacatttgacggcgtcaccgacaagccaatcctggattgttgctgcggaactgccaagtatagactgacattttacggcaactggtccgaaaagactcatccaaaagattaccccagacgggctaaccactggagtgctatcataggcggaagccacagtaaaaattacgtgctgtgggaatacggtggttacgccagcgagggcgtgaagcaagtagctgaactgggttcccctgtgaaaatggaagaagagatccgccagcagagtgatgaggtcctcaccgttataaaggccaaagcgcaatggcctgcctggcagcccttgaatgtgcgcgcagcaccttccgccgaattctccgtggataggacccggcacctgatgtcattcctgaccatgatggggccaagtcccgattggaacgtaggtctgtccgctgaggacctgtgcacgaaggagtgcggatgggtccagaaggtagtccaggacctgattccatgggacgccggaactgattctggcgtcacttacgaatctccaaataaaccgactattcctcaggagaaaattcggccactgacaagtctcgatcatccacagtccccgttttatgaccctgagggaggttctataactcaggtggcaagggtggtgatcgaacgaatcgcccgaaaaggggaacaatgcaatatcgtaccagacaacgtcgacgatattgtcgccgacctcgctcctgaagaaaaggacgaagatgacactcctgagacctgtatctactcgaattggtcaccttggtcagcatgctccagttctacttgtgacaaggggaagcgcatgcggcagcgaatgctgaaagcgcagctggacttgtcagtgccatgtccagacacccaggattttcagccatgtatggggcctgggtgctctgacgaggatggaagtacttgtaccatgtcagaatggatcacatggtccccctgcagtattagttgcggaatgggcatgaggtcaagggagcggtatgtcaaacagttccccgaagatggctctgtgtgcactctgcccactgaggagactgagaagtgtactgtcaatgaggagtgtagtccctcctcttgcttgatgaccgaatggggtgaatgggatgaatgttccgcaacttgtgggatgggcatgaagaaacgacacaggatgattaaaatgaaccctgcagacgggagcatgtgtaaggctgaaacatcgcaggccgaaaaatgtatgatgcccgaatgtcacaccatcccctgcctgctgtccccttggagtgaatggtcagactgttcggtaacttgtggcaagggaatgaggacccggcagagaatgcttaagtctcttgccgagctgggggattgtaacgaggacctggagcaggttgagaagtgcatgcttcccgagtgtccgatagactgcgagctgacagagtggtcccagtggtcagagtgcaacaagagttgcggaaaaggccacgtgatcaggacccgcatgattcagatggagccccagttcggaggcgctccgtgtcctgaaaccgtccagagaaagaagtgtcggattagaaaatgtttacgtaatccttctattcagaaactgagatggagggaagcccgagaaagcaggcgatcggaacaactgaaagaggagagcgaaggcgaacagtttccaggatgtcgcatgcggccatggactgcttggtccgagtgtacaaagctgtgcgggggaggtatccaggaacgctatatgaccgtgaagaagagatttaagtcctctcagttcacctcatgtaaggacaagaaagagatccgggcatgtaatgttcatccatgttag

SEQ ID NO: 161871 - DNA, 2421 bp, Artificial Sequence
  derived and/or modified sequence
atgcgcctgtctcccgcaccactcaaactgagccggacgccagctctcttggcactggcactgcctctcgccgctgcactcgccttctctgacgagactctcgacaaggtcccaaagtctgaaggatattgcagccgcatcctgcgcgctcaggggactcgacgagaggggtataccgaattctccctccgggtggaaggggaccccgacttttacaagccaggcacaagctacagagttacactgtctgcagcaccaccgagttattttagaggtttcaccctcatcgccttgcgcgaaaatagagaaggggataaagaggaggaccacgcaggtacgttccagataattgatgaagaggagactcagtttatgtctaactgtcccgtggctgtaaccgagtccacccctagaaggagaactagaatccaagttttctggatagcaccccctgctgggaccgggtgtgtgattctcaaggcatctattgttcagaagagaatcatctatttccaggacgagggctccctcactaagaagctctgcgagcaggacagcacattcgacggtgtgactgataaacctattttagactgctgttgcggcaccgctaaataccggctaacattctatggcaactggtctgaaaaaacacacccaaaagactatccacgcagagcgaaccattggtccgccatcattggtggcagccattcaaaaaactacgtcctgtgggagtacggaggttacgcatctgaaggcgtcaaacaggtagccgaactgggcagcccggtgaagatggaggaggagatacgccagcagagcgacgaggttctgaccgtaatcaaggctaaggcccaatggcccgcctggcagcctttaaatgtccgcgccgcaccctccgctgagtttagtgtagacaggactcggcatctgatgtcttttctgaccatgatgggcccgtctcccgactggaacgtaggactgtcagccgaggatttatgtactaaggaatgcggttgggtacagaaggtagtgcaggatctaatcccttgggacgctggaacagactctggggttacctacgaatcacctaacaagcctacaatcccacaggagaaaatccgccccctgactagtttggatcatccacagagtcccttttatgatcccgagggtggctcaatcacacaggtggcacgcgtggtgatcgaaaggattgcaagaaagggtgagcagtgtaatatcgtacctgataacgtggatgacatcgtggctgacctggcccctgaagaaaaggacgaagacgacacacccgagacctgtatatattccaattggagcccttggtccgcttgttctagttccacctgtgacaaaggaaagcggatgcggcagcgtatgctcaaagcgcagctggacctgtctgttccatgtcccgacacacaggacttccagccttgtatggggcccggatgctccgacgaggacggttccacctgtactatgagtgaatggattacctggagtccatgtagtatctcatgtggcatgggaatgcgtagcagggagcgatacgtgaagcaattccccgaggacggatccgtgtgcaccctgcctaccgaagagaccgagaagtgcaccgtaaacgaagagtgttccccttcttcatgcctgatgaccgagtggggagagtgggacgaatgttcggcaacatgtggaatggggatgaagaaaaggcacagaatgatcaagatgaatcccgcagatggaagtatgtgcaaagccgaaactagccaagctgaaaaatgcatgatgcccgagtgtcataccataccatgcctgcttagtccctggagtgaatggagcgactgcagcgttacctgtggtaagggaatgaggacacgacagcggatgctgaagagcctcgccgagctcggcgactgcaatgaggatctggagcaagtggagaaatgtatgctgcccgagtgtccaatagactgtgaacttactgagtggtctcagtggagcgagtgtaataaaagctgcggaaaaggacacgtgataaggaccagaatgattcagatggagccacagtttgggggagcaccttgcccggaaaccgtacagcggaagaaatgtcgcattcgaaagtgtcttagaaacccaagtatacagaagctccgatggcgggaggcacgcgagtcccggaggtccgagcaactaaaggaagagtcagaaggggagcaatttcccggttgtcggatgaggccttggactgcgtggagcgaatgcaccaagctatgcggagggggaatccaggaaagatatatgaccgtcaaaaagcgatttaaatcatcccaatttacttcttgtaaagataagaaagagatacgagcgtgtaatgttcacccttgttag

SEQ ID NO: 161872 - DNA, 2421 bp, Artificial Sequence
  derived and/or modified sequence
atgaggcttagtcccgcgccactcaagttatccagaactcccgcactgctggcactggccctcccgctagccgccgcgctcgccttttctgacgaaacacttgataaagttcctaaatccgaggggtactgctcgagaatcctgcgagcccagggtactagacgcgaaggatacactgaattctcgttgcgggtggaaggtgatccagacttttacaagcccggcacctcatatcgtgtaactctttctgccgctcctccatcatatttccggggttttacgctgattgccctcagagaaaacagagagggggataaggaagaggatcatgcaggcacattccagataattgacgaagaagaaactcaattcatgagcaactgtcccgttgcggttaccgagagtacccccaggcgtcgaaccagaattcaggttttttggatcgctcccccagcagggactggatgcgttattttaaaggctagcattgtacagaaacggattatttattttcaggacgaggggtccttgactaaaaagttgtgtgagcaagacagtacatttgatggcgtgacagacaagccaattttggactgctgttgcggaacggccaagtatcgactaactttttatgggaactggtctgagaaaacccaccccaaagattatccccgcagagccaaccattggtccgccatcattggcggttcccactctaagaactatgtgctctgggagtatggcggatatgcaagtgaaggagtgaaacaggtcgccgaattggggagcccagttaaaatggaagaagaaatccggcaacaaagcgacgaagttctcaccgtgatcaaggccaaggctcagtggccggcatggcaaccactaaacgttagggcagcaccgagcgctgagttctccgtagacagaactagacacctcatgagcttcctcacgatgatgggtcccagcccagactggaatgtcggactctctgcagaagacctatgcacgaaagagtgcggttgggtccaaaaagtggtacaagaccttataccctgggatgcaggcacagacagcggcgtgacttacgaaagccctaacaaaccaaccatcccacaggaaaaaatcagacccctgacttctttagaccatccgcaaagccccttctatgacccggagggtggatccatcacacaagtggcccgcgtggtgattgaacggattgctcgaaagggcgaacaatgcaacattgtgcctgataacgttgatgatatcgtagcagatttagcacctgaggaaaaggatgaggatgacacacccgagacttgtatctactccaactggagcccatggtccgcatgttcaagtagtacctgtgataagggcaaaaggatgagacaaaggatgttaaaggcccagctagacctctcagtcccatgcccagacacacaagacttccagccatgtatgggtcctggatgttccgatgaggatggctctacctgcacaatgagtgagtggatcacctggtctccctgcagcatctcctgtggcatgggaatgcgctcaagggaaagatatgtgaaacagttccccgaggatggatccgtgtgcacattacccaccgaagagactgaaaagtgcactgttaacgaggagtgctcgccaagctcttgcttaatgactgaatggggagaatgggacgaatgtagcgcaacttgcggtatggggatgaagaaaagacatagaatgataaagatgaacccagctgatggtagcatgtgcaaagctgaaacaagtcaggcagagaagtgtatgatgccagaatgccacacaattccctgcctcctaagcccttggtcagaatggtcggattgctcagtcacctgtggcaagggaatgcgcacacgccagagaatgttgaaatccctggctgaactgggggactgtaacgaggatctggaacaggtagaaaagtgcatgctacccgagtgtcccattgattgtgagttaaccgagtggtctcaatggtctgagtgcaataaatcatgcgggaaaggtcacgtgattaggactagaatgattcaaatggagccacagttcggaggagcaccttgcccagagacagtgcagaggaaaaagtgcaggatccgaaaatgtttaaggaacccaagtatccagaagctgcgatggcgcgaggcaagagagagccgcagatccgaacaactgaaagaggaaagtgaaggggagcaattcccagggtgcagaatgaggccttggacggcatggtctgaatgtactaagctgtgtggaggaggaatccaggaacggtacatgactgtgaagaagcgatttaaatccagccagttcaccagttgcaaagacaaaaaagaaattcgtgcatgtaatgttcacccgtgctag

SEQ ID NO: 161873 - DNA, 2421 bp, Artificial Sequence
  derived and/or modified sequence
atgagactgagccccgcccccctgaagctgagcagaacccccgccctgctggccctggccctgcccctggccgccgccctggccttcagcgacgagaccctggacaaggtgcccaagagcgagggctactgcagcagaatcctgagagcccagggcaccagaagagagggctacaccgagttcagcctgagagtggagggcgaccccgacttctacaagcccggcaccagctacagagtgaccctgagcgccgccccccccagctacttcagaggcttcaccctgatcgccctgagagagaacagagagggcgacaaggaggaggaccacgccggcaccttccagatcatcgacgaggaggagacccagttcatgagcaactgccccgtggccgtgaccgagagcacccccagaagaagaaccagaatccaggtgttctggatcgccccccccgccggcaccggctgcgtgatcctgaaggccagcatcgtgcagaagagaatcatctacttccaggacgagggcagcctgaccaagaagctgtgcgagcaggacagcaccttcgacggcgtgaccgacaagcccatcctggactgctgctgcggcaccgccaagtacagactgaccttctacggcaactggagcgagaagacccaccccaaggactaccccagaagagccaaccactggagcgccatcatcggcggcagccacagcaagaactacgtgctgtgggagtacggcggctacgccagcgagggcgtgaagcaggtggccgagctgggcagccccgtgaagatggaggaggagatcagacagcagagcgacgaggtgctgaccgtgatcaaggccaaggcccagtggcccgcctggcagcccctgaacgtgagagccgcccccagcgccgagttcagcgtggacagaaccagacacctgatgagcttcctgaccatgatgggccccagccccgactggaacgtgggcctgagcgccgaggacctgtgcaccaaggagtgcggctgggtgcagaaggtggtgcaggacctgatcccctgggacgccggcaccgacagcggcgtgacctacgagagccccaacaagcccaccatcccccaggagaagatcagacccctgaccagcctggaccacccccagagccccttctacgaccccgagggcggcagcatcacccaggtggccagagtggtgatcgagagaatcgccagaaagggcgagcagtgcaacatcgtgcccgacaacgtggacgacatcgtggccgacctggcccccgaggagaaggacgaggacgacacccccgagacctgcatctacagcaactggagcccctggagcgcctgcagcagcagcacctgcgacaagggcaagagaatgagacagagaatgctgaaggcccagctggacctgagcgtgccctgccccgacacccaggacttccagccctgcatgggccccggctgcagcgacgaggacggcagcacctgcaccatgagcgagtggatcacctggagcccctgcagcatcagctgcggcatgggcatgagaagcagagagagatacgtgaagcagttccccgaggacggcagcgtgtgcaccctgcccaccgaggagaccgagaagtgcaccgtgaacgaggagtgcagccccagcagctgcctgatgaccgagtggggcgagtgggacgagtgcagcgccacctgcggcatgggcatgaagaagagacacagaatgatcaagatgaaccccgccgacggcagcatgtgcaaggccgagaccagccaggccgagaagtgcatgatgcccgagtgccacaccatcccctgcctgctgagcccctggagcgagtggagcgactgcagcgtgacctgcggcaagggcatgagaaccagacagagaatgctgaagagcctggccgagctgggcgactgcaacgaggacctggagcaggtggagaagtgcatgctgcccgagtgccccatcgactgcgagctgaccgagtggagccagtggagcgagtgcaacaagagctgcggcaagggccacgtgatcagaaccagaatgatccagatggagccccagttcggcggcgccccctgccccgagaccgtgcagagaaagaagtgcagaatcagaaagtgcctgagaaaccccagcatccagaagctgagatggagagaggccagagagagcagaagaagcgagcagctgaaggaggagagcgagggcgagcagttccccggctgcagaatgagaccctggaccgcctggagcgagtgcaccaagctgtgcggcggcggcatccaggagagatacatgaccgtgaagaagagattcaagagcagccagttcaccagctgcaaggacaagaaggagatcagagcctgcaacgtgcacccctgctag

SEQ ID NO: 161874 - DNA, 5372 bp, Artificial Sequence
  derived and/or modified sequence
ccgccaagcatattgctaggcacagagcaggtgtgcaacaaaagttatttctcaggctttccctcctctgagcgccgtcctccagagggtccggagtgtagctgggggttggagcagcagcctcctaggcgatgggacagagcccacagggtccggtatgccacggtttcttcgtcagaccctgggaatccaacgtcgcaaaataaacacggccgcgccgctaatcgccagttcggaggaaacaaaacagcgctgcgctgggggatctgggcaaaatcagccctccctcctcccgctccttcgccgcggccctcccctcctcgcgctgctctcgttcgcttggctcagctcagctcagctcagcgcagctccgcggccgccaagccgaggcgggcacggtctccgagtcgcggacgccagctccgagctccctctctccgccgcgcctccgccaggtcgcgccttcgtcgggaccacttcgggcaggagtcgcgtggcgaaggcctgcggccgcggcacaaagttgggggccgcgaagatgaggctgtccccggcgcccctgaagctgagccggactccggcactgctggccctggcgctgcccctggccgcggcgctggccttctccgacgagaccctggacaaagtgcccaagtcagagggctactgcagccgtatcctgcgcgcccagggcacgcggcgcgagggctacaccgagttcagcctccgcgtggagggcgaccccgacttctacaagccgggaaccagctaccgcgtaacactttcagctgctcctccctcctacttcagaggattcacattaattgccctcagagagaacagagagggtgataaggaagaagaccatgctgggaccttccagatcatagacgaagaagaaactcagtttatgagcaattgccctgttgcagtcactgaaagcactccacggaggaggacccggatccaggtgttttggatagcaccaccagcgggaacaggctgcgtgattctgaaggccagcatcgtacaaaaacgcattatttattttcaagatgagggctctctgaccaagaaactttgtgaacaagattccacatttgatggggtgactgacaaacccatcttagactgctgttgcggaactgccaagtacagactcacattttatgggaattggtccgagaagacacacccaaaggattaccctcgtcgggccaaccactggtctgcgatcatcggaggatcccactccaagaattatgtactgtgggaatatggaggatatgccagcgaaggcgtcaaacaagttgcagaattgggctcacccgtgaaaatggaggaagaaattcgacaacagagtgatgaggtcctcaccgtcatcaaagccaaagcccaatggccagcctggcagcctctcaacgtgagagcagcaccttcagctgaattttccgtggacagaacgcgccatttaatgtccttcctgaccatgatgggccctagtcccgactggaacgtaggcttatctgcagaagatctgtgcaccaaggaatgtggctgggtccagaaggtggtgcaagacctgattccctgggacgctggcaccgacagcggggtgacctatgagtcacccaacaaacccaccattccccaggagaaaatccggcccctgaccagcctggaccatcctcagagtcctttctatgacccagagggtgggtccatcactcaagtagccagagttgtcatcgagagaatcgcacggaagggtgaacaatgcaatattgtacctgacaatgtcgatgatattgtagctgacctggctccagaagagaaagatgaagatgacacccctgaaacctgcatctactccaactggtccccatggtccgcctgcagctcctccacctgtgacaaaggcaagaggatgcgacagcgcatgctgaaagcacagctggacctcagcgtcccctgccctgacacccaggacttccagccctgcatgggccctggctgcagtgacgaagacggctccacctgcaccatgtccgagtggatcacctggtcgccctgcagcatctcctgcggcatgggcatgaggtcccgggagaggtatgtgaagcagttcccggaggacggctccgtgtgcacgctgcccactgaggaaacggagaagtgcacggtcaacgaggagtgctctcccagcagctgcctgatgaccgagtggggcgagtgggacgagtgcagcgccacctgcggcatgggcatgaagaagcggcaccgcatgatcaagatgaaccccgcagatggctccatgtgcaaagccgagacatcacaggcagagaagtgcatgatgccagagtgccacaccatcccatgcttgctgtccccatggtccgagtggagtgactgcagcgtgacctgcgggaagggcatgcgaacccgacagcggatgctcaagtctctggcagaacttggagactgcaatgaggatctggagcaggtggagaagtgcatgctccctgaatgccccattgactgtgagctcaccgagtggtcccagtggtcggaatgtaacaagtcatgtgggaaaggccacgtgattcgaacccggatgatccaaatggagcctcagtttggaggtgcaccctgcccagagactgtgcagcgaaaaaagtgccgcatccgaaaatgccttcgaaatccatccatccaaaagctacgctggagggaggcccgagagagccggcggagtgagcagctgaaggaagagtctgaaggggagcagttcccaggttgtaggatgcgcccatggacggcctggtcagaatgcaccaaactgtgcggaggtggaattcaggaacgttacatgactgtaaagaagagattcaaaagctcccagtttaccagctgcaaagacaagaaggagatcagagcatgcaatgttcatccttgttagcaagggtacgagttccccagggctgcactctagattccagagtcaccaatggctggattatttgcttgtttaagacaatttaaattgtgtacgctagttttcatttttgcagtgtggttcgcccagtagtcttgtggatgccagagacatcctttctgaatacttcttgatgggtacaggctgagtggggcgccctcacctccagccagcctcttcctgcagaggagtagtgtcagccaccttgtactaagctgaaacatgtccctctggagcttccacctggccagggaggacggagactttgacctactccacatggagaggcaaccatgtctggaagtgactatgcctgagtcccagggtgcggcaggtaggaaacattcacagatgaagacagcagattccccacattctcatctttggcctgttcaatgaaaccattgtttgcccatctcttcttagtggaactttaggtctcttttcaagtctcctcagtcatcaatagttcctggggaaaaacagagctggtagacttgaagaggagcattgatgttgggtggcttttgttctttcactgagaaattcggaatacatttgtctcacccctgatattggttcctgatgcccccccaacaaaaataaataaataaattatggctgctttatttaaatataaggtagctagtttttacacctgagataaataataagcttagagtgtatttttcccttgcttttgggggttcagaggagtatgtacaattcttctgggaagccagccttctgaactttttggtactaaatccttattggaaccaagacaaaggaagcaaaattggtctctttagagaccaatttgcctaaattttaaaatcttcctacacacatctagacgttcaagtttgcaaatcagtttttagcaagaaaacatttttgctatacaaacattttgctaagtctgcccaaagcccccccaatgcattccttcaacaaaatacaatctctgtactttaaagttattttagtcatgaaattttatatgcagagagaaaaagttaccgagacagaaaacaaatctaagggaaaggaatattatgggattaagctgagcaagcaattctggtggaaagtcaaacctgtcagtgctccacaccagggctgtggtcctcccagacatgcataggaatggccacaggtttacactgccttcccagcaattataagcacaccagattcagggagactgaccaccaagggatagtgtaaaaggacattttctcagttgggtccatcagcagtttttcttcctgcatttattgttgaaaactattgtttcatttcttcttttataggccttattactgcttaatccaaatgtgtaccattggtgagacacatacaatgctctgaatacactacgaatttgtattaaacacatcagaatatttccaaatacaacatagtatagtcctgaatatgtacttttaacacaagagagactattcaataaaaactcactgggtctttcatgtctttaagctaagtaagtgttcagaaggttcttttttatattgtcctccacctccatcattttcaataaaagatagggcttttgctcccttgttcttggagggaccattattacatctctgaactacctttgtatccaacatgttttaaatccttaaatgaattgctttctcccaaaaaaagcacaatataaagaaacacaagatttaattatttttctacttggggggaaaaaagtcctcatgtagaagcacccacttttgcaatgttgttctaagctatctatctaactctcagcccatgataaagttccttaagctggtgattcctaatcaaggacaagccaccctagtgtctcatgtttgtatttggtcccagttgggtacattttaaaatcctgattttggagacttaaaaccaggttaatggctaagaatgggtaacatgactcttgttggattgttattttttgtttgcaatggggaatttataagaagcatcaagtctctttcttaccaaagtcttgttaggtggtttatagttcttttggctaacaaatcattttggaaataaagattttttactacaaaaatgaaatttgtttggacttccacttgagacagtaaagagagtattagacacccagtaaaaactgccatataaagaagttgtaattgtttgttgtgtatgtatttttttcaatgccaaaccagctgtgatccaatttacatccacattttaggtccaacagcaagaagttcagagagagatttcccaaccagacattgggtcactcactggtcaccttgccagtgcattttattagaagggaatctgttgtagcaaatgggaataaacctgggtttctatagacccagaactg

SEQ ID NO: 161875 - DNA, 2421 bp, Artificial Sequence
  derived and/or modified sequence
atgcgcctgtcccccgcacctcttaaactctcacgcacaccagcgcttctcgcactggccctccctttggcagccgcgttagccttctcagatgagactctggataaggtgccaaagtctgagggttactgttcaaggatcctgcgggcccagggtacccggcgtgagggatacacagagtttagcttacgagttgaaggcgacccagatttttacaagccaggtacctcgtatagggtgaccctgtccgctgccccaccttcctatttcagggggtttacgctcatagcacttcgcgaaaaccgtgagggtgataaagaagaagatcacgccggaaccttccagatcatagacgaggaggagacgcagttcatgagcaattgtccggtggctgtgacagagagtacccctcggcgacgcacccgaattcaggtgttctggatcgcaccacctgctgggactggctgcgtcatcctgaaggcttcaattgtgcagaaacgtataatatattttcaggacgagggaagcctcaccaagaaactctgcgaacaggactccacatttgacggcgtgaccgacaagccaatcctggattgctgctgcggcaccgctaaataccgattaaccttttatggaaactggagcgagaagacacaccccaaagactatccccgacgggctaatcattggtccgctatcattggcggatctcatagcaagaactatgtactatgggagtatggcgggtacgcatccgagggggtcaagcaggtggctgagctcggttcaccagtcaagatggaagaagaaattcgtcagcagtccgatgaagtgctcaccgtcatcaaagctaaggcccagtggccggcatggcaaccgctcaacgtcagagccgccccatcagccgagttctccgtcgacagaacgcgacacctgatgagctttctcactatgatgggtccctcgcccgattggaacgtgggcctcagcgcagaggacctatgcacgaaagagtgcggatgggtccaaaaggtggtgcaggacttgatcccctgggacgcaggtaccgacagtggagttacttacgagtctccgaacaagcctaccattccccaggagaaaatccgaccattgacatcgctagaccatccccagtcgcccttctacgaccccgaaggtggctccatcacccaggtagctcgagttgtcatcgaacggatcgctaggaagggagagcagtgcaacattgttcccgacaacgtggacgacatagttgccgaccttgcccctgaggaaaaggacgaagatgacacacccgagacctgcatctatagtaactggtcaccttggagcgcatgcagctctagtacctgtgacaagggaaagcgcatgaggcagaggatgttgaaggctcaactggatctctctgtcccctgccccgacacgcaagacttccagccctgtatggggccaggctgctctgatgaggatgggtcaacttgtacgatgagcgagtggataacctggagtccatgtagtataagctgcggcatgggtatgaggagtcgagaacggtacgtgaaacagtttccagaagatggctccgtgtgtacactgcccaccgaagagaccgagaaatgcactgttaacgaggagtgttcgccttcctcttgtcttatgaccgaatggggagagtgggacgagtgcagcgccacctgtggcatggggatgaagaagcggcatagaatgattaaaatgaacccggcggacggttctatgtgtaaggctgaaacctcccaggctgagaaatgcatgatgccagagtgtcatactatcccctgcctcctttctccatggagtgaatggagcgattgttctgttacatgtggcaaagggatgaggaccaggcagaggatgctgaaaagcctggccgagctgggcgattgcaacgaagatttggagcaggttgagaaatgcatgcttccggagtgtcccatcgattgtgagttgactgaatggtcccagtggtcagagtgcaacaaatcctgcggtaagggtcacgtcatccgtacccgtatgattcagatggaaccacagtttgggggggccccctgccccgagaccgtccaacgcaaaaaatgcaggattcgcaagtgcttgaggaacccatctatccagaagctcagatggagagaagcaagagaatctaggagatctgagcagttgaaggaagaatccgagggagagcaatttcccggttgccgcatgagaccgtggacagcatggtctgagtgtacaaagctgtgcggcggcggcatccaggagagatacatgacagtcaagaaaaggtttaagagctcacagtttacctcttgcaaagataagaaggagatacgggcttgcaatgttcacccttgctag

SEQ ID NO: 161876 - DNA, 2421 bp, Artificial Sequence
  derived and/or modified sequence
atgaggctgagccctgcccccctgaagctgagcaggaccccagccctgctggccctggccctgcccctggccgccgccctggccttcagtgatgagaccctggacaaggtgcccaagtctgagggctactgcagccgcatcctgcgggcccagggcacccggcgggagggctacacagagttcagcctgcgggtggagggggaccctgacttctacaagccaggcaccagctacagagtgaccctgtctgctgccccacccagctacttccggggcttcaccctcatcgccctgcgggagaaccgggagggggacaaggaggaggaccatgctggcaccttccagatcattgatgaggaggagacccagttcatgagcaactgccctgtggccgtgacagagagcacccccaggaggaggacccgcatccaggtgttctggatcgcccccccagctggcaccggctgcgtcatcctgaaggccagcatcgtgcagaagaggatcatctacttccaggatgagggcagcctgaccaagaagctgtgtgagcaggacagcacctttgatggagtgacagacaagcccatcctggactgctgctgcggcacagccaagtaccgcctgaccttctacggcaactggagcgagaagacccaccccaaggactacccccggcgggccaaccactggagcgccatcatcggcggcagccacagcaagaactacgtgctgtgggagtatggaggctacgccagcgagggcgtgaagcaggtggccgagctgggcagccctgtgaagatggaggaggagatccggcagcagagtgatgaggtgctgaccgtcatcaaggccaaggcccagtggccagcctggcagcccctgaatgtgcgggccgcccccagcgctgagttctctgtggacaggaccaggcacctgatgtccttcctgaccatgatgggccccagcccagactggaatgtgggcctgtctgctgaggacctgtgcaccaaggaatgtggctgggtgcagaaggtggtgcaggacctgatcccctgggatgctggaacagacagcggcgtgacctatgagagccccaacaagcccaccatcccccaggagaagatccggcccctgaccagcctggaccacccccagagccccttctatgaccctgagggcggcagcatcacccaggtggcccgggtggtgattgaaagaattgccaggaagggggagcagtgcaacatcgtgcctgacaacgtggatgacatcgtggccgacctggcccctgaggagaaggatgaagatgacaccccagagacctgcatctacagcaactggagcccctggagcgcctgcagcagcagcacctgtgacaagggcaagaggatgaggcagaggatgctgaaggcccagctggacctgtctgtgccctgcccagacacccaggacttccagccctgcatgggccctggctgcagtgatgaagatggcagcacctgcaccatgtctgagtggatcacctggagcccctgcagcatcagctgtggcatgggcatgaggagccgggagcgctacgtgaagcagtttcctgaagatggctctgtgtgcaccctgcccacagaggagacagagaagtgcaccgtgaatgaggagtgcagccccagcagctgcctgatgacagagtggggcgagtgggatgagtgcagcgccacctgtggcatgggcatgaagaagaggcacaggatgatcaagatgaacccagcagatggctccatgtgcaaggccgagaccagccaggccgagaagtgcatgatgcctgagtgccacaccatcccctgcctgctgagcccctggagcgagtggagcgactgcagcgtgacctgtgggaagggcatgaggacccggcagaggatgctgaagagcctggccgagctgggggactgcaatgaagacctggagcaggtggagaagtgcatgctgcctgaatgtcccatcgactgtgagctgacagagtggagccagtggagcgagtgcaacaagagctgtgggaaaggacatgtgatccgcaccaggatgatccagatggagccccagtttggaggagccccctgcccagagaccgtgcagaggaagaagtgccgcatcaggaagtgcctgaggaaccccagcatccagaagctgcgctggagggaggcccgggagagcagaagaagtgagcagctgaaggaggagagcgagggggagcagtttcctggctgcaggatgaggccctggacagcctggagcgagtgcaccaagctgtgtggcggcggcatccaggagcgctacatgacagtgaagaagcgcttcaagagcagccagttcaccagctgcaaggacaagaaggagatccgggcctgcaatgtgcacccctgctag

SEQ ID NO: 161877 - DNA, 2421 bp, Artificial Sequence
  derived and/or modified sequence
atgcggctgagccccgcccccctgaagctgagccggacccccgccctactggcactggcactgccgctggccgccgctcttgcattcagcgacgagaccttggacaaggtaccaaaatcagaaggctattgttcacggatacttcgggcccaggggacgaggagagagggatatacagagttcagcctcagggttgaaggcgatccagatttttacaagcccggtacctcctaccgcgtgactctaagcgcagcgcccccttcttatttccgagggtttacacttattgccttgcgggagaatagggaaggagacaaggaggaagaccatgcaggcacatttcagatcattgacgaggaggagacccagttcatgagcaattgtcctgtcgctgtcacagagagtacaccccggcggaggactcgcatccaggtgttttggatcgcacccccagcaggcactggatgtgtcatacttaaagcctcaattgtccaaaaacgaataatctattttcaggacgagggatccctaacaaagaagctttgcgaacaggattctacgtttgatggcgttacagataagcccattctggactgctgttgtggcacagctaaatacaggttaacattctacggcaattggtctgagaaaacacaccccaaggactacccacggcgggccaaccattggagcgcgattatcggaggcagtcatagcaagaactatgtgctctgggagtatggaggatatgctagcgagggcgtcaagcaggtagcagagttggggtccccagtgaaaatggaagaagagattagacagcagtctgatgaagtgctgaccgtgatcaaggccaaggctcagtggcctgcttggcagccgttaaacgtgagggctgcgccaagcgcagagttctccgtcgatcgtacccggcacctgatgagcttcctgacgatgatgggcccttccccagattggaacgtgggcctttcagccgaggacctgtgcaccaaggaatgcggctgggttcagaaggtggtgcaggatctgatcccatgggacgccggaaccgactctggagtcacctatgagtcgccgaataaacctactatcccgcaggaaaagattcgtccccttaccagcctcgatcacccccaatccccattttatgaccctgaaggagggtctattactcaggttgcccgggttgtcatcgaacgcattgcacggaagggcgaacagtgtaacatcgtgccagacaatgtggatgatattgtggccgatttagcaccagaggaaaaggatgaggacgacactcctgagacctgcatttacagcaactggtctccatggtctgcatgctctagctcgacttgtgacaaaggtaagcggatgagacagcggatgttgaaggcccagcttgatctgtcagtgccttgcccagatacacaggatttccagccatgcatgggacctggatgctccgatgaagatggatccacttgcacaatgtcggaatggattacgtggagtccgtgttctatatcatgcggcatgggtatgcgcagccgggagagatatgtgaagcagtttccagaggacggttcagtgtgtacattgcccactgaggagacagagaagtgtacggtgaatgaagagtgctctccctccagttgcttaatgacagagtggggcgagtgggatgagtgctcggccacttgcggaatgggaatgaagaaacgccataggatgatcaaaatgaatcccgcagatggctccatgtgcaaagccgagacctcgcaggcggaaaagtgcatgatgcccgagtgccacacaattccttgccttctgagcccttggtccgagtggtcagactgttccgtgacttgtggaaagggcatgcggacacgccagcgcatgctgaagtccctagctgagctgggagactgcaatgaggacctcgaacaggtagagaaatgtatgttaccagagtgcccaatcgactgtgagctgaccgaatggtctcagtggtctgagtgcaataaaagttgtggaaagggacatgtaatcagaactcggatgattcagatggaaccccagtttggcggagccccatgccccgaaaccgtacagaggaagaagtgccgaatcagaaaatgtctaaggaatccttctattcagaaacttaggtggcgagaggcacgtgagtccaggaggagtgagcagctgaaggaggagagcgaaggtgaacagttcccaggatgtcgcatgagaccttggacagcttggtctgagtgtacgaagctttgtgggggaggaatccaggaacggtacatgactgtcaagaagaggttcaagagctctcagttcactagctgtaaggacaaaaaagaaataagagcctgcaatgtgcacccctgttag

SEQ ID NO: 161878 - DNA, 2424 bp, Artificial Sequence
  derived and/or modified sequence
atgagactgagccccgcccccctgaagctgagcagaacccccgccctgctggccctggccctgcccctggccgccgccctggccttcagcgacgagaccctggacaaggtgcccaagagcgagggctactgcagcagaatcctgagagcccagggcaccagaagagagggctacaccgagttcagcctgagagtggagggcgaccccgacttctacaagcccggcaccagctacagagtgaccctgagcgccgccccccccagctacttcagaggcttcaccctgatcgccctgagagagaacagagagggcgacaaggaggaggaccacgccggcaccttccagatcatcgacgaggaggagacccagttcatgagcaactgccccgtggccgtgaccgagagcacccccagaagaagaaccagaatccaggtgttctggatcgccccccccgccggcaccggctgcgtgatcctgaaggccagcatcgtgcagaagagaatcatctacttccaggacgagggcagcctgaccaagaagctgtgcgagcaggacagcaccttcgacggcgtgaccgacaagcccatcctggactgctgcgcctgcggcaccgccaagtacagactgaccttctacggcaactggagcgagaagacccaccccaaggactaccccagaagagccaaccactggagcgccatcatcggcggcagccacagcaagaactacgtgctgtgggagtacggcggctacgccagcgagggcgtgaagcaggtggccgagctgggcagccccgtgaagatggaggaggagatcagacagcagagcgacgaggtgctgaccgtgatcaaggccaaggcccagtggcccgcctggcagcccctgaacgtgagagccgcccccagcgccgagttcagcgtggacagaaccagacacctgatgagcttcctgaccatgatgggccccagccccgactggaacgtgggcctgagcgccgaggacctgtgcaccaaggagtgcggctgggtgcagaaggtggtgcaggacctgatcccctgggacgccggcaccgacagcggcgtgacctacgagagccccaacaagcccaccatcccccaggagaagatcagacccctgaccagcctggaccacccccagagccccttctacgaccccgagggcggcagcatcacccaggtggccagagtggtgatcgagagaatcgccagaaagggcgagcagtgcaacatcgtgcccgacaacgtggacgacatcgtggccgacctggcccccgaggagaaggacgaggacgacacccccgagacctgcatctacagcaactggagcccctggagcgcctgcagcagcagcacctgcgacaagggcaagagaatgagacagagaatgctgaaggcccagctggacctgagcgtgccctgccccgacacccaggacttccagccctgcatgggccccggctgcagcgacgaggacggcagcacctgcaccatgagcgagtggatcacctggagcccctgcagcatcagctgcggcatgggcatgagaagcagagagagatacgtgaagcagttccccgaggacggcagcgtgtgcaccctgcccaccgaggagaccgagaagtgcaccgtgaacgaggagtgcagccccagcagctgcctgatgaccgagtggggcgagtgggacgagtgcagcgccacctgcggcatgggcatgaagaagagacacagaatgatcaagatgaaccccgccgacggcagcatgtgcaaggccgagaccagccaggccgagaagtgcatgatgcccgagtgccacaccatcccctgcctgctgagcccctggagcgagtggagcgactgcagcgtgacctgcggcaagggcatgagaaccagacagagaatgctgaagagcctggccgagctgggcgactgcaacgaggacctggagcaggtggagaagtgcatgctgcccgagtgccccatcgactgcgagctgaccgagtggagccagtggagcgagtgcaacaagagctgcggcaagggccacgtgatcagaaccagaatgatccagatggagccccagttcggcggcgccccctgccccgagaccgtgcagagaaagaagtgcagaatcagaaagtgcctgagaaaccccagcatccagaagctgagatggagagaggccagagagagcagaagaagcgagcagctgaaggaggagagcgagggcgagcagttccccggctgcagaatgagaccctggaccgcctggagcgagtgcaccaagctgtgcggcggcggcatccaggagagatacatgaccgtgaagaagagattcaagagcagccagttcaccagctgcaaggacaagaaggagatcagagcctgcaacgtgcacccctgctag

SEQ ID NO: 161879 - DNA, 2424 bp, Artificial Sequence
  derived and/or modified sequence
atgcggctgtctccagcacccttgaaattatctagaacgcccgcactgctggccctggccctgcctctagctgcagcactggcgttttcagatgagactctggataaggtgcccaagtctgagggatattgtagtcgaatactacgagctcaaggtaccaggagagagggatacactgagttcagtctgcgcgtcgaaggggacccagacttttataagccaggcacctcataccgagtcaccctgtctgcggcaccacctagttactttaggggattcaccttaatcgccctgagagaaaatagggaaggggacaaagaagaggaccatgcaggcaccttccagattatcgatgaggaggaaacgcaattcatgagtaactgccctgtcgctgtgactgaatctactcctcgccgcagaacgcgaatccaggtgttctggatcgctcctccagccggaactggctgcgtgatactcaaggccagtattgtgcagaaacgaatcatctacttccaagacgagggcagcctaaccaagaaactgtgtgaacaggattccacctttgatggcgttactgacaaacccatcctcgactgctgcgcatgcggcactgccaaatatcgcctcactttttacgggaattggtcggaaaagacgcatcccaaagactatccccgtcgcgctaatcactggtcagcaataatcggggggtctcactctaaaaactacgtcctgtgggagtacggagggtacgcgagcgagggggtcaagcaggtagccgaactcggaagcccagtgaagatggaggaggagattaggcaacagtccgatgaagtgctcaccgtaatcaaagctaaggcccaatggcccgcatggcagcctttgaacgtgagagctgccccgagcgccgagttcagcgtcgatcgcaccagacatctgatgagcttcctgactatgatgggcccttctccggactggaatgtcgggctctccgcagaggacctctgcaccaaggaatgtggctgggtgcaaaaggtcgtgcaggacttaatcccttgggacgctggtactgatagcggtgtgacttacgaatctcccaacaaaccaacaattcctcaagaaaaaattagacctctaacttcgttggatcacccacagagtcccttctatgacccagaggggggatcaataactcaagtggcgagagtggtcatcgagaggatagctagaaaaggggagcagtgcaatatcgttccggataacgtggacgatatcgtcgctgatttagcacctgaggagaaggatgaggacgatactccagagacctgcatctactcaaattggtccccgtggagcgcctgctcgtccagcacctgcgataaaggcaaacggatgcgccaaagaatgctgaaagcacagctggacttgtcagtgccatgccccgatacgcaggactttcaaccatgcatgggacccggatgctcagatgaagatggctctacgtgcaccatgtcggagtggatcacgtggagcccctgctccatctcctgtggaatgggcatgcgctctagggagcgttatgtcaagcaattccccgaggatggcagcgtgtgcaccctgccaacggaagaaacagaaaaatgtacagtgaacgaggagtgtagtccatcctcctgtttaatgaccgaatggggcgagtgggatgaatgctctgccacatgtggcatgggcatgaaaaagaggcacagaatgataaaaatgaacccagcggacgggtccatgtgcaaagctgagacctctcaggccgaaaagtgcatgatgccagaatgtcacacgatcccatgcttgctcagtccgtggtcagaatggtctgattgttctgttacctgtggaaaagggatgagaaccagacagcgtatgttgaaatccctggctgaattgggggactgcaacgaggacttagagcaggttgagaagtgtatgctgccagagtgccccatcgattgcgagcttacggaatggtcacagtggtctgagtgtaacaagtcgtgtggaaagggccacgtgataaggactaggatgattcagatggagcctcagtttgggggagcaccgtgtccggagacagtccagaggaaaaagtgtagaatccgaaagtgtcttagaaaccccagcatccagaagctgaggtggcgagaagcgcgagaatcccggcgcagtgagcagctgaaagaggagtccgagggagagcagtttcccgggtgtcgcatgcgaccttggactgcctggagcgagtgtactaagctgtgcggaggcgggatccaggaaagatacatgacggtgaaaaagcgcttcaagtcaagtcaattcacttcttgtaaggacaaaaaggagattcgggcctgcaacgtacatccctgctag

SEQ ID NO: 161880 - DNA, 2424 bp, Artificial Sequence
  derived and/or modified sequence
atgaggctgagccctgcccccctgaagctgagcaggaccccagccctgctggccctggccctgcccctggccgccgccctggccttcagtgatgagaccctggacaaggtgcccaagtctgagggctactgcagccgcatcctgcgggcccagggcacccggcgggagggctacacagagttcagcctgcgggtggagggggaccctgacttctacaagccaggcaccagctacagagtgaccctgtctgctgccccacccagctacttccggggcttcaccctcatcgccctgcgggagaaccgggagggggacaaggaggaggaccatgctggcaccttccagatcattgatgaggaggagacccagttcatgagcaactgccctgtggccgtgacagagagcacccccaggaggaggacccgcatccaggtgttctggatcgcccccccagctggcaccggctgcgtcatcctgaaggccagcatcgtgcagaagaggatcatctacttccaggatgagggcagcctgaccaagaagctgtgtgagcaggacagcacctttgatggagtgacagacaagcccatcctggactgctgtgcctgtggcacagccaagtaccgcctgaccttctacggcaactggagcgagaagacccaccccaaggactacccccggcgggccaaccactggagcgccatcattggaggcagccacagcaagaactacgtgctgtgggagtatggaggctacgccagcgagggcgtgaagcaggtggccgagctgggcagccctgtgaagatggaggaggagatccggcagcagagtgatgaggtgctgaccgtcatcaaggccaaggcccagtggccagcctggcagcccctgaatgtgcgggccgcccccagcgctgagttctctgtggacaggaccaggcacctgatgtccttcctgaccatgatgggccccagcccagactggaatgtgggcctgtctgctgaggacctgtgcaccaaggaatgtggctgggtgcagaaggtggtgcaggacctgatcccctgggatgctggaacagattctggagtgacctatgagagccccaacaagcccaccatcccccaggagaagatccggcccctgaccagcctggaccacccccagagccccttctatgaccctgagggcggcagcatcacccaggtggcccgggtggtgattgagcgcatcgccaggaaaggagagcagtgcaacatcgtgcctgacaacgtggatgacatcgtggccgacctggcccctgaggagaaggatgaagatgacaccccagagacctgcatctacagcaactggagcccctggagcgcctgcagcagcagcacctgtgacaagggcaagaggatgaggcagaggatgctgaaggcccagctggacctgtctgtgccctgcccagacacccaggacttccagccctgcatgggccctggctgcagtgatgaagatggcagcacctgcaccatgtctgagtggatcacctggagcccctgcagcatcagctgtggcatgggcatgaggagccgggagagatatgtgaagcagttcccagaagatggctctgtgtgcaccctgcccacagaggagacagagaagtgcaccgtgaatgaagaatgtagccccagcagctgcctgatgacagagtggggcgagtgggatgaatgttctgccacctgtggcatgggcatgaagaagaggcacaggatgatcaagatgaacccagcagatggctccatgtgcaaggccgagaccagccaggccgagaagtgcatgatgcctgagtgccacaccatcccctgcctgctgagcccctggagcgagtggagcgactgcagcgtgacctgtgggaagggcatgaggacccggcagaggatgctgaagagcctggccgagctgggggactgcaatgaagacctggagcaggtggagaagtgcatgctgcctgagtgccccatcgactgtgagctgacagagtggagccagtggagcgagtgcaacaagagctgtgggaagggccacgtgatccgcaccaggatgatccagatggagccccagtttggaggagccccctgcccagagaccgtgcagaggaagaagtgccgcatcaggaagtgcctgaggaaccccagcatccagaagctgcgctggagggaggcccgggagagccgccgctctgagcagctgaaggaggagagcgagggggagcagtttcctggctgcaggatgaggccctggacagcctggagcgaatgtaccaagctgtgtggcggcggcatccaggagcgctacatgacagtgaagaagcgcttcaagagcagccagttcaccagctgcaaggacaagaaggagatccgggcctgcaatgtgcacccctgctag

SEQ ID NO: 161881 - DNA, 2424 bp, Artificial Sequence
  derived and/or modified sequence
atgcggctgagccccgcccccctgaagctgagccggacccccgccctcctcgccctggcattgcctctcgctgctgctctggccttctccgatgagacactggataaagtgcctaaaagcgagggatattgttccaggattcttcgagcccagggcacgcgaagggagggttacaccgaattctctctcagggtggagggggatccggatttctataaaccaggaacaagctatcgggttacactatcagccgcccccccgtcctactttcgggggttcactcttatcgcattgagagaaaaccgggaaggtgacaaagaagaggaccacgctggcacctttcagattatcgacgaggaggagacccagtttatgtccaattgcccggtggcagttaccgaatcaaccccccgtagaaggacgcgtatacaagttttttggatcgctcctcctgccggcactggttgtgtcatcctcaaggccagtatcgtgcagaagaggataatttactttcaggatgagggcagcctcactaaaaagctctgcgaacaggattccacattcgacggggtcaccgataagcctattctggactgctgcgcctgcgggaccgccaagtaccggctgactttctatggaaactggtccgagaagacccaccctaaagattacccccgcagagccaaccactggagtgcgataattggcggtagtcatagcaagaattacgtgttgtgggagtatggcggctacgcctcggagggggtgaagcaggtcgcggagcttggatctccagtgaaaatggaggaggagattcgccaacagtcagacgaggtcctgaccgtgataaaggcgaaagcacagtggccggcttggcagccgttgaacgtgcgcgcagccccctcagcggagtttagcgtagaccgcacgcggcatctgatgagcttcctaaccatgatgggcccttctccagattggaacgttgggctgtccgctgaagatctgtgcactaaggagtgcggatgggtgcagaaagtcgtgcaggacctgatcccatgggatgccggcaccgacagcggagtaacctacgagtcgcctaacaaaccgaccattccacaggagaaaatcagacctctgacgtctctcgatcatccccagtctccattttatgaccccgaaggcggcagcatcactcaggttgctcgagtggtcattgaacggattgcaaggaaaggagagcagtgtaatatcgtgccagataatgtcgacgatattgtggccgatctcgcgcctgaagagaaagacgaggacgacacgcccgagacgtgtatctattctaactggtcaccctggtccgcctgttcatccagcacctgcgacaaagggaagagaatgcgtcagaggatgttgaaagcccagctggacctttcagtgccctgccccgacacccaggactttcagccatgtatgggtcccgggtgcagtgacgaggacggttctacctgtaccatgtccgagtggatcacttggtctccctgctctatatcttgtggaatgggcatgagatcgcgcgagcggtatgtcaaacaattccctgaggacggatccgtatgcaccctgccaacggaggaaaccgaaaaatgcacggtgaatgaggaatgctccccttccagctgcctcatgacagagtggggggagtgggacgagtgctcggccacttgtggcatgggtatgaaaaagcgtcatagaatgatcaagatgaatcccgcagacgggtcgatgtgcaaagccgaaacaagtcaggccgagaagtgtatgatgcccgaatgccacaccattccctgtctgctttctccctggagtgagtggtcagattgtagcgtaacttgtggtaaaggcatgcgcactcgacaacgtatgctgaaatcacttgctgagctgggcgattgtaatgaggatctcgagcaagtcgagaaatgtatgctccccgaatgcccaatagattgcgaattaactgagtggtctcagtggtcggagtgcaacaaaagttgcggaaagggccacgtcattagaacgcgcatgattcaaatggaaccccagtttggaggggccccttgccccgaaactgtgcagcgcaaaaaatgcagaattcgcaaatgtctaagaaacccctccatacagaagctgcgctggagggaggcccgcgagtccagacgtagcgaacagctcaaggaagagagcgaaggtgaacagttccccggttgtaggatgcgcccatggacagcctggtctgaatgtaccaagctttgcggaggcgggattcaagaacggtacatgaccgtgaagaaaaggttcaaatcctctcagttcacctcctgtaaagacaaaaaggaaatcagggcctgcaacgtccatccatgctag

SEQ ID NO: 161882 - DNA, 2424 bp, Artificial Sequence
  derived and/or modified sequence
atgcgcctcagtcctgcacccctgaaactttccagaacacctgctttgcttgccttggctctgcccctcgcagctgccctggccttctccgacgaaacgcttgataaggtccctaaatcagagggatattgctcgcgtattctgcgagcccaggggacccgcagagagggctacaccgagttcagtcttcgggttgaaggtgatccagacttctacaaaccaggtacctcctaccgagtcaccttaagtgcagcgcctccgtcttactttcggggattcacacttattgcccttcgagaaaaccgggagggggacaaggaagaagaccacgcaggaacttttcagataatcgatgaggaggagacccagttcatgagcaactgcccggttgctgtgacagagagtaccccaagacgcaggacaagaattcaggtattctggattgcccctcccgctggaactggctgcgtgattctgaaggcctctattgtgcaaaagcgaatcatctattttcaagacgaaggtagcctgacaaagaagctttgtgagcaggacagtacgttcgatggggtcactgacaaaccaatcctggactgttgcgcctgcgggaccgccaagtaccggctgaccttctacggcaattggtctgagaaaacccatcccaaggattatcccaggagagcaaaccattggagtgctatcataggtggctctcactctaaaaattacgtcctgtgggagtacggaggttatgcctcggaaggcgtgaaacaggttgcagagttagggagcccagtgaaaatggaggaggagatccggcagcagagcgacgaagttttgaccgtcattaaggccaaggcccagtggcccgcatggcagcctttgaacgtgcgagctgctccttccgccgaatttagtgtggaccgaaccaggcacttgatgagcttcttgaccatgatgggcccttcccccgattggaatgttggtctgtcagctgaggatctctgcacaaaagagtgcggctgggtccagaaggtcgtgcaggacctgatcccttgggatgctggtacagattccggcgtgacatacgagtctcctaacaagcctactattccacaggagaagattaggcccctcacgtctctagaccatcctcagtcgccattttacgatcctgagggagggagcatcacacaggttgcacgggtagtgatagaacgcatagcacgaaaaggcgaacagtgtaatatcgtgcccgacaacgtggatgacatagtggcagacttagctcctgaggagaaggacgaagatgatacgcccgagacttgcatctacagtaactggtcgccatggtccgcctgctcgtcctcaacatgtgataaaggcaagcggatgcgccagcgcatgttaaaagcccagctggatcttagcgttccttgccccgacacacaggatttccagccctgcatgggtccgggttgcagtgacgaggacggcagtacatgtaccatgagtgagtggattacttggagcccttgctctataagctgtggaatgggcatgaggtccagagaacggtatgttaagcaatttcccgaagatgggtcggtgtgcaccttaccaaccgaggaaactgagaagtgtaccgtaaatgaagagtgctccccctcctcctgtctcatgacagaatggggggagtgggacgagtgttccgccacctgtgggatgggcatgaagaaaaggcaccgtatgataaagatgaaccctgccgatgggtccatgtgcaaggccgagacctcacaggccgagaagtgtatgatgccggagtgtcatacaatcccttgcctcctgtctccttggagcgaatggtccgactgttccgtcacatgtggaaaggggatgcggacccgccagcgaatgctgaagtcccttgctgaacttggcgattgcaatgaggatctagaacaggtcgagaaatgtatgctccccgaatgccctattgactgcgaattaacagaatggagccagtggagcgaatgcaacaaaagttgcggcaaggggcatgtcatcagaacaagaatgatccagatggagcctcagtttggcggtgcaccatgtcctgaaactgtacaacgcaagaagtgtcgaatccgtaaatgcctgaggaatccctcaatacaaaagcttcgatggcgggaggccagagagtccagacggagtgagcagctcaaggaagaatctgaaggcgagcagttcccaggttgtagaatgcgcccatggacggcctggtctgagtgtactaaattatgtggcggtggaattcaggagagatacatgaccgtgaagaagcggtttaagagttctcagttcacatcttgcaaggacaagaaagagatccgagcatgtaatgtacacccttgctag

SEQ ID NO: 161883 - DNA, 4757 bp, Artificial Sequence
  derived and/or modified sequence
gcgctgctctcgttcgcttggctcagctcagctcagctcagcgcagctccgcggccgccaagccgaggcgggcacggtctccgagtcgcggacgccagctccgagctccctctctccgccgcgcctccgccaggtcgcgccttcgtcgggaccacttcgggcaggagtcgcgtggcgaaggcctgcggccgcggcacaaagttgggggccgcgaagatgaggctgtccccggcgcccctgaagctgagccggactccggcactgctggccctggcgctgcccctggccgcggcgctggccttctccgacgagaccctggacaaagtgcccaagtcagagggctactgcagccgtatcctgcgcgcccagggcacgcggcgcgagggctacaccgagttcagcctccgcgtggagggcgaccccgacttctacaagccgggaaccagctaccgcgtaacactttcagctgctcctccctcctacttcagaggattcacattaattgccctcagagagaacagagagggtgataaggaagaagaccatgctgggaccttccagatcatagacgaagaagaaactcagtttatgagcaattgccctgttgcagtcactgaaagcactccacggaggaggacccggatccaggtgttttggatagcaccaccagcgggaacaggctgcgtgattctgaaggccagcatcgtacaaaaacgcattatttattttcaagatgagggctctctgaccaagaaactttgtgaacaagattccacatttgatggggtgactgacaaacccatcttagactgctgtgcctgcggaactgccaagtacagactcacattttatgggaattggtccgagaagacacacccaaaggattaccctcgtcgggccaaccactggtctgcgatcatcggaggatcccactccaagaattatgtactgtgggaatatggaggatatgccagcgaaggcgtcaaacaagttgcagaattgggctcacccgtgaaaatggaggaagaaattcgacaacagagtgatgaggtcctcaccgtcatcaaagccaaagcccaatggccagcctggcagcctctcaacgtgagagcagcaccttcagctgaattttccgtggacagaacgcgccatttaatgtccttcctgaccatgatgggccctagtcccgactggaacgtaggcttatctgcagaagatctgtgcaccaaggaatgtggctgggtccagaaggtggtgcaagacctgattccctgggacgctggcaccgacagcggggtgacctatgagtcacccaacaaacccaccattccccaggagaaaatccggcccctgaccagcctggaccatcctcagagtcctttctatgacccagagggtgggtccatcactcaagtagccagagttgtcatcgagagaatcgcacggaagggtgaacaatgcaatattgtacctgacaatgtcgatgatattgtagctgacctggctccagaagagaaagatgaagatgacacccctgaaacctgcatctactccaactggtccccatggtccgcctgcagctcctccacctgtgacaaaggcaagaggatgcgacagcgcatgctgaaagcacagctggacctcagcgtcccctgccctgacacccaggacttccagccctgcatgggccctggctgcagtgacgaagacggctccacctgcaccatgtccgagtggatcacctggtcgccctgcagcatctcctgcggcatgggcatgaggtcccgggagaggtatgtgaagcagttcccggaggacggctccgtgtgcacgctgcccactgaggaaacggagaagtgcacggtcaacgaggagtgctctcccagcagctgcctgatgaccgagtggggcgagtgggacgagtgcagcgccacctgcggcatgggcatgaagaagcggcaccgcatgatcaagatgaaccccgcagatggctccatgtgcaaagccgagacatcacaggcagagaagtgcatgatgccagagtgccacaccatcccatgcttgctgtccccatggtccgagtggagtgactgcagcgtgacctgcgggaagggcatgcgaacccgacagcggatgctcaagtctctggcagaacttggagactgcaatgaggatctggagcaggtggagaagtgcatgctccctgaatgccccattgactgtgagctcaccgagtggtcccagtggtcggaatgtaacaagtcatgtgggaaaggccacgtgattcgaacccggatgatccaaatggagcctcagtttggaggtgcaccctgcccagagactgtgcagcgaaaaaagtgccgcatccgaaaatgccttcgaaatccatccatccaaaagctacgctggagggaggcccgagagagccggcggagtgagcagctgaaggaagagtctgaaggggagcagttcccaggttgtaggatgcgcccatggacggcctggtcagaatgcaccaaactgtgcggaggtggaattcaggaacgttacatgactgtaaagaagagattcaaaagctcccagtttaccagctgcaaagacaagaaggagatcagagcatgcaatgttcatccttgttagcaagggtacgagttccccagggctgcactctagattccagagtcaccaatggctggattatttgcttgtttaagacaatttaaattgtgtacgctagttttcatttttgcagtgtggttcgcccagtagtcttgtggatgccagagacatcctttctgaatacttcttgatgggtacaggctgagtggggcgccctcacctccagccagcctcttcctgcagaggagtagtgtcagccaccttgtactaagctgaaacatgtccctctggagcttccacctggccagggaggacggagactttgacctactccacatggagaggcaaccatgtctggaagtgactatgcctgagtcccagggtgcggcaggtaggaaacattcacagatgaagacagcagattccccacattctcatctttggcctgttcaatgaaaccattgtttgcccatctcttcttagtggaactttaggtctcttttcaagtctcctcagtcatcaatagttcctggggaaaaacagagctggtagacttgaagaggagcattgatgttgggtggcttttgttctttcactgagaaattcggaatacatttgtctcacccctgatattggttcctgatgcccccccaacaaaaataaataaataaattatggctgctttatttaaatataaggtagctagtttttacacctgagataaataataagcttagagtgtatttttcccttgcttttgggggttcagaggagtatgtacaattcttctgggaagccagccttctgaactttttggtactaaatccttattggaaccaagacaaaggaagcaaaattggtctctttagagaccaatttgcctaaattttaaaatcttcctacacacatctagacgttcaagtttgcaaatcagtttttagcaagaaaacatttttgctatacaaacattttgctaagtctgcccaaagcccccccaatgcattccttcaacaaaatacaatctctgtactttaaagttattttagtcatgaaattttatatgcagagagaaaaagttaccgagacagaaaacaaatctaagggaaaggaatattatgggattaagctgagcaagcaattctggtggaaagtcaaacctgtcagtgctccacaccagggctgtggtcctcccagacatgcataggaatggccacaggtttacactgccttcccagcaattataagcacaccagattcagggagactgaccaccaagggatagtgtaaaaggacattttctcagttgggtccatcagcagtttttcttcctgcatttattgttgaaaactattgtttcatttcttcttttataggccttattactgcttaatccaaatgtgtaccattggtgagacacatacaatgctctgaatacactacgaatttgtattaaacacatcagaatatttccaaatacaacatagtatagtcctgaatatgtacttttaacacaagagagactattcaataaaaactcactgggtctttcatgtctttaagctaagtaagtgttcagaaggttcttttttatattgtcctccacctccatcattttcaataaaagatagggcttttgctcccttgttcttggagggaccattattacatctctgaactacctttgtatccaacatgttttaaatccttaaatgaattgctttctcccaaaaaaagcacaatataaagaaacacaagatttaattatttttctacttggggggaaaaaagtcctcatgtagaagcacccacttttgcaatgttgttctaagctatctatctaactctcagcccatgataaagttccttaagctggtgattcctaatcaaggacaagccaccctagtgtctcatgtttgtatttggtcccagttgggtacattttaaaatcctgattttggagacttaaaaccaggttaatggctaagaatgggtaacatgactcttgttggattgttattttttgtttgcaatggggaatttataagaagcatcaagtctctttcttaccaaagtcttgttaggtggtttatagttcttttggctaacaaatcattttggaaataaagattttttactac

SEQ ID NO: 161884 - RNA, 2421 nt, Artificial Sequence
  derived and/or modified sequence
augcgccugucucccgcaccacucaaacugagccggacgccagcucucuuggcacuggcacugccucucgccgcugcacucgccuucucugacgagacucucgacaaggucccaaagucugaaggauauugcagccgcauccugcgcgcucaggggacucgacgagagggguauaccgaauucucccuccggguggaaggggaccccgacuuuuacaagccaggcacaagcuacagaguuacacugucugcagcaccaccgaguuauuuuagagguuucacccucaucgccuugcgcgaaaauagagaaggggauaaagaggaggaccacgcagguacguuccagauaauugaugaagaggagacucaguuuaugucuaacugucccguggcuguaaccgaguccaccccuagaaggagaacuagaauccaaguuuucuggauagcacccccugcugggaccgggugugugauucucaaggcaucuauuguucagaagagaaucaucuauuuccaggacgagggcucccucacuaagaagcucugcgagcaggacagcacauucgacggugugacugauaaaccuauuuuagacugcuguugcggcaccgcuaaauaccggcuaacauucuauggcaacuggucugaaaaaacacacccaaaagacuauccacgcagagcgaaccauugguccgccaucauugguggcagccauucaaaaaacuacguccugugggaguacggagguuacgcaucugaaggcgucaaacagguagccgaacugggcagcccggugaagauggaggaggagauacgccagcagagcgacgagguucugaccguaaucaaggcuaaggcccaauggcccgccuggcagccuuuaaauguccgcgccgcacccuccgcugaguuuaguguagacaggacucggcaucugaugucuuuucugaccaugaugggcccgucucccgacuggaacguaggacugucagccgaggauuuauguacuaaggaaugcgguuggguacagaagguagugcaggaucuaaucccuugggacgcuggaacagacucugggguuaccuacgaaucaccuaacaagccuacaaucccacaggagaaaauccgcccccugacuaguuuggaucauccacagagucccuuuuaugaucccgaggguggcucaaucacacagguggcacgcguggugaucgaaaggauugcaagaaagggugagcaguguaauaucguaccugauaacguggaugacaucguggcugaccuggccccugaagaaaaggacgaagacgacacacccgagaccuguauauauuccaauuggagcccuugguccgcuuguucuaguuccaccugugacaaaggaaagcggaugcggcagcguaugcucaaagcgcagcuggaccugucuguuccaugucccgacacacaggacuuccagccuuguauggggcccggaugcuccgacgaggacgguuccaccuguacuaugagugaauggauuaccuggaguccauguaguaucucauguggcaugggaaugcguagcagggagcgauacgugaagcaauuccccgaggacggauccgugugcacccugccuaccgaagagaccgagaagugcaccguaaacgaagaguguuccccuucuucaugccugaugaccgaguggggagagugggacgaauguucggcaacauguggaauggggaugaagaaaaggcacagaaugaucaagaugaaucccgcagauggaaguaugugcaaagccgaaacuagccaagcugaaaaaugcaugaugcccgagugucauaccauaccaugccugcuuagucccuggagugaauggagcgacugcagcguuaccugugguaagggaaugaggacacgacagcggaugcugaagagccucgccgagcucggcgacugcaaugaggaucuggagcaaguggagaaauguaugcugcccgaguguccaauagacugugaacuuacugaguggucucaguggagcgaguguaauaaaagcugcggaaaaggacacgugauaaggaccagaaugauucagauggagccacaguuugggggagcaccuugcccggaaaccguacagcggaagaaaugucgcauucgaaagugucuuagaaacccaaguauacagaagcuccgauggcgggaggcacgcgagucccggagguccgagcaacuaaaggaagagucagaaggggagcaauuucccgguugucggaugaggccuuggacugcguggagcgaaugcaccaagcuaugcggagggggaauccaggaaagauauaugaccgucaaaaagcgauuuaaaucaucccaauuuacuucuuguaaagauaagaaagagauacgagcguguaauguucacccuuguuag

SEQ ID NO: 161885 - RNA, 2421 nt, Artificial Sequence
  derived and/or modified sequence
augaggcuuagucccgcgccacucaaguuauccagaacucccgcacugcuggcacuggcccucccgcuagccgccgcgcucgccuuuucugacgaaacacuugauaaaguuccuaaauccgagggguacugcucgagaauccugcgagcccaggguacuagacgcgaaggauacacugaauucucguugcggguggaaggugauccagacuuuuacaagcccggcaccucauaucguguaacucuuucugccgcuccuccaucauauuuccgggguuuuacgcugauugcccucagagaaaacagagagggggauaaggaagaggaucaugcaggcacauuccagauaauugacgaagaagaaacucaauucaugagcaacugucccguugcgguuaccgagaguacccccaggcgucgaaccagaauucagguuuuuuggaucgcucccccagcagggacuggaugcguuauuuuaaaggcuagcauuguacagaaacggauuauuuauuuucaggacgagggguccuugacuaaaaaguugugugagcaagacaguacauuugauggcgugacagacaagccaauuuuggacugcuguugcggaacggccaaguaucgacuaacuuuuuaugggaacuggucugagaaaacccaccccaaagauuauccccgcagagccaaccauugguccgccaucauuggcgguucccacucuaagaacuaugugcucugggaguauggcggauaugcaagugaaggagugaaacaggucgccgaauuggggagcccaguuaaaauggaagaagaaauccggcaacaaagcgacgaaguucucaccgugaucaaggccaaggcucaguggccggcauggcaaccacuaaacguuagggcagcaccgagcgcugaguucuccguagacagaacuagacaccucaugagcuuccucacgaugaugggucccagcccagacuggaaugucggacucucugcagaagaccuaugcacgaaagagugcgguuggguccaaaaagugguacaagaccuuauacccugggaugcaggcacagacagcggcgugacuuacgaaagcccuaacaaaccaaccaucccacaggaaaaaaucagaccccugacuucuuuagaccauccgcaaagccccuucuaugacccggaggguggauccaucacacaaguggcccgcguggugauugaacggauugcucgaaagggcgaacaaugcaacauugugccugauaacguugaugauaucguagcagauuuagcaccugaggaaaaggaugaggaugacacacccgagacuuguaucuacuccaacuggagcccaugguccgcauguucaaguaguaccugugauaagggcaaaaggaugagacaaaggauguuaaaggcccagcuagaccucucagucccaugcccagacacacaagacuuccagccauguauggguccuggauguuccgaugaggauggcucuaccugcacaaugagugaguggaucaccuggucucccugcagcaucuccuguggcaugggaaugcgcucaagggaaagauaugugaaacaguuccccgaggauggauccgugugcacauuacccaccgaagagacugaaaagugcacuguuaacgaggagugcucgccaagcucuugcuuaaugacugaauggggagaaugggacgaauguagcgcaacuugcgguauggggaugaagaaaagacauagaaugauaaagaugaacccagcugaugguagcaugugcaaagcugaaacaagucaggcagagaaguguaugaugccagaaugccacacaauucccugccuccuaagcccuuggucagaauggucggauugcucagucaccuguggcaagggaaugcgcacacgccagagaauguugaaaucccuggcugaacugggggacuguaacgaggaucuggaacagguagaaaagugcaugcuacccgagugucccauugauugugaguuaaccgaguggucucaauggucugagugcaauaaaucaugcgggaaaggucacgugauuaggacuagaaugauucaaauggagccacaguucggaggagcaccuugcccagagacagugcagaggaaaaagugcaggauccgaaaauguuuaaggaacccaaguauccagaagcugcgauggcgcgaggcaagagagagccgcagauccgaacaacugaaagaggaaagugaaggggagcaauucccagggugcagaaugaggccuuggacggcauggucugaauguacuaagcuguguggaggaggaauccaggaacgguacaugacugugaagaagcgauuuaaauccagccaguucaccaguugcaaagacaaaaaagaaauucgugcauguaauguucacccgugcuag

SEQ ID NO: 161886 - protein, 637 aa, Artificial Sequence
  derived and/or modified sequence
MAAMAVGGAGGSRVSSGRDLNCVPEIADTLGAVAKQGFDFLCMPVFHPRFKREFIQEPAKNRPGPQTRSDLLLSGRDWNTLIVGKLSPWIRPDSKVEKIRRNSEAAMLQELNFGAYLGLPAFLLPLNQEDNTNLARVLTNHIHTGHHSSMFWMRVPLVAPEDLRDDIIENAPTTHTEEYSGEEKTWMWWHNFRTLCDYSKRIAVALEIGADLPSNHVIDRWLGEPIKAAILPTSIFLTNKKGFPVLSKMHQRLIFRLLKLEVQFIITGTNHHSEKEFCSYLQYLEYLSQNRPPPNAYELFAKGYEDYLQSPLQPLMDNLESQTYEVFEKDPIKYSQYQQAIYKCLLDRVPEEEKDTNVQVLMVLGAGRGPLVNASLRAAKQADRRIKLYAVEKNPNAVVTLENWQFEEWGSQVTVVSSDMREWVAPEKADIIVSELLGSFADNELSPECLDGAQHFLKDDGVSIPGEYTSFLAPISSSKLYNEVRACREKDRDPEAQFEMPYVVRLHNFHQLSAPQPCFTFSHPNRDPMIDNNRYCTLEFPVEVNTVLHGFAGYFETVLYQDITLSIRPETHSPGMFSWFPILFPIKQPITVREGQTICVRFWRCSNSKKVWYEWAVTAPVCSAIHNPTGRSYTIGL

SEQ ID NO: 161887 - protein, 531 aa, Artificial Sequence
  derived and/or modified sequence
MLQELNFGAYLGLPAFLLPLNQEDNTNLARVLTNHIHTGHHSSMFWMRVPLVAPEDLRDDIIENAPTTHTEEYSGEEKTWMWWHNFRTLCDYSKRIAVALEIGADLPSNHVIDRWLGEPIKAAILPTSIFLTNKKGFPVLSKMHQRLIFRLLKLEVQFIITGTNHHSEKEFCSYLQYLEYLSQNRPPPNAYELFAKGYEDYLQSPLQPLMDNLESQTYEVFEKDPIKYSQYQQAIYKCLLDRVPEEEKDTNVQVLMVLGAGRGPLVNASLRAAKQADRRIKLYAVEKNPNAVVTLENWQFEEWGSQVTVVSSDMREWVAPEKADIIVSELLGSFADNELSPECLDGAQHFLKDDGVSIPGEYTSFLAPISSSKLYNEVRACREKDRDPEAQFEMPYVVRLHNFHQLSAPQPCFTFSHPNRDPMIDNNRYCTLEFPVEVNTVLHGFAGYFETVLYQDITLSIRPETHSPGMFSWFPILFPIKQPITVREGQTICVRFWRCSNSKKVWYEWAVTAPVCSAIHNPTGRSYTIGL

SEQ ID NO: 161888 - DNA, 1914 bp, Artificial Sequence
  derived and/or modified sequence
atggctgcaatggctgttggcggcgctggtgggagcagagtttcatctggcagggatctgaactgcgttccggagattgctgacaccctgggagcagtggctaaacaagggtttgacttcctgtgcatgcctgtgtttcacccacgatttaagcgtgagttcattcaggagccagcaaagaaccgcccaggcccgcaaacccgatcagatctgctgctgtcaggccgggactggaacactcttattgtcgggaaactgtcaccatggatcaggcccgatagcaaagtcgaaaaaatacggcgcaatagcgaggcggccatgctgcaagagctgaattttggggcttacctcggtctcccagccttcctgctcccacttaaccaggaggacaacacaaacctcgctagagtactgaccaaccacatccacaccggccatcacagcagcatgttttggatgagagttccactcgtggccccagaagacctgcgggatgatattattgaaaatgctccaacgacacacaccgaagaatactctggagaggaaaagacctggatgtggtggcataatttcaggactctgtgcgattatagtaagcgcattgctgtggcgctagagattggggctgatcttcctagcaatcatgttatcgacagatggttaggcgagcccatcaaagcggctatcctgcccacctcaatcttcctaacaaacaaaaaagggttcccggtactgtccaaaatgcaccagaggttgatatttcgtttattgaagctcgaagtccagttcatcataaccggaaccaaccaccactctgaaaaagagttttgttcttatttgcaatacctcgagtacctgagtcaaaatagacccccccctaatgcctatgagctcttcgctaaaggttatgaggactatctgcagagccctctgcagccattgatggacaatctcgagtcacagacatatgaagtgttcgagaaagacccgataaagtatagccagtaccagcaagcaatttataagtgcctgctagatcgtgtgccagaggaggagaaggatactaatgtccaggtcctcatggtgttaggagcaggccggggtccgttggtgaatgcatctctgcgggcggccaagcaggccgacagaagaattaaattgtacgctgtggaaaagaaccccaatgcagttgtgacgctcgagaattggcaattcgaagaatggggttctcaggtaactgtagtctcttctgatatgcgagaatgggtggctcccgaaaaggcagacataatcgtcagtgagctgttgggcagttttgccgataacgagctgagtcctgaatgtctagatggggcacagcacttcctgaaggacgatggcgtgtctataccgggggaatatactagctttctggctcccatctcatcatccaagctttacaacgaggtgcgagcatgccgagaaaaggatcgggatcctgaggctcagtttgaaatgccgtacgtcgtgaggttgcacaattttcaccagctctcggccccacagccttgctttaccttcagccatcctaatcgtgatccaatgattgataacaaccgatactgcacactggagtttcctgtggaggtgaataccgtgctgcacggcttcgctggttatttcgagactgtgttataccaagatataaccctgagtatcaggcccgagacccacagtcctgggatgtttagctggtttccaatattgtttcccattaagcagcctattacagtgcgggaaggacaaaccatatgtgtccgcttttggcggtgcagcaactcaaaaaaagtttggtacgaatgggccgtaaccgccccagtttgctcagccattcacaaccctacgggccggagctatacgattggactatag

SEQ ID NO: 161889 - DNA, 1914 bp, Artificial Sequence
  derived and/or modified sequence
atggccgccatggctgtgggcggggccggcggcagccgggtgagcagcggccgggacctgaactgtgtgcctgagattgctgacaccctgggcgctgtggccaagcagggctttgacttcctgtgcatgcctgtgttccacccccgcttcaagcgggagttcatccaggagcccgccaagaacagacctggcccccagaccaggagtgacctgctgctgagcggccgggactggaacaccctcatcgtgggcaagctgagcccctggatccggccagacagcaaggtggagaagatcagaagaaattctgaggccgccatgctgcaggagctgaactttggagcctacctgggcctgcctgccttcctgctgcccctgaaccaggaggacaacaccaacctggcccgggtgctgaccaaccacatccacacaggccaccacagctccatgttctggatgagggtgcccctggtggcccctgaggacctgagagatgacatcattgaaaatgcccccaccacccacacagaggagtacagcggggaggagaagacctggatgtggtggcacaacttccgcaccctgtgtgactacagcaagagaattgctgtggccctggagatcggggctgacctgcccagcaaccacgtgattgaccgctggctgggggagcccatcaaggccgccatcctgcccaccagcatcttcctgaccaacaagaagggcttccctgtgctgagcaagatgcaccagaggctcatcttccggctgctgaagctggaggtgcagttcatcatcaccggcaccaaccaccacagcgagaaggagttctgcagctacctgcagtacctggagtacctgagccagaaccggcccccaccaaatgcctatgagctgtttgccaagggctatgaggactacctgcagagccccctgcagcccctgatggacaacctggagagccagacctatgaggtgtttgagaaggaccccatcaagtacagccagtaccagcaggccatctacaagtgcctgctggacagagtgcctgaggaggagaaggacaccaacgtgcaggtgctgatggtgctgggcgccggccggggccccctggtgaatgccagcctgcgggccgccaagcaggccgaccggcgcatcaagctgtatgctgtggagaagaaccccaatgctgtggtgaccctggagaactggcagtttgaggagtggggcagccaggtgacagtggtgtccagtgacatgagggagtgggtggcccctgagaaggctgacatcatcgtgtctgagctgctgggcagctttgctgacaatgagctgagccctgagtgcctggatggagcccagcacttcctgaaggatgatggagtgtccatccctggagagtacaccagcttcctggcccccatcagcagcagcaagctgtacaatgaggtgcgggcctgccgggagaaggaccgggaccctgaggcccagtttgagatgccctacgtggtgcggctgcacaacttccaccagctgagcgccccccagccctgcttcaccttcagccaccccaacagagaccccatgattgacaacaaccgctactgcaccctggagttccctgtggaggtgaacacagtgctgcacggctttgctggctactttgaaacagtgctgtaccaggacatcaccctgagcatccggcctgagacccacagccctggcatgttctcctggttccccatcctcttccccatcaagcagcccatcaccgtgcgggagggccagaccatctgtgtgcgcttctggcgctgcagcaacagcaagaaggtgtggtatgagtgggccgtgacagcccctgtgtgcagcgccatccacaaccccaccggccgcagctacaccatcggcctgtag

SEQ ID NO: 161890 - DNA, 1914 bp, Artificial Sequence
  derived and/or modified sequence
atggccgccatggccgtgggcggcgccggcggcagccgggtgagctctggacgcgatctgaactgcgttcccgaaatcgcggataccctgggtgccgtagcgaaacaaggcttcgatttcctatgcatgcccgtgtttcatccccgttttaaaagagaatttatccaagaacccgccaagaatagacctggcccccagactaggagcgatctgctgttgagtggtagagactggaacacactgatcgtcggtaagctcagtccttggattcggcctgactcaaaagtcgaaaagatccgacggaactcagaagctgctatgctacaggaactgaatttcggtgcctacctgggccttcctgcctttttgcttccactgaaccaagaggataacaccaacctcgctcgagtgctaacaaatcatattcacactggccatcactcctctatgttttggatgcgggttccattggtcgcccccgaggaccttcgagatgacattattgagaatgcccccaccacgcataccgaggagtactctggagaggagaaaacgtggatgtggtggcacaactttcggaccctgtgtgattactcaaaacgaattgccgtggcattagagattggtgccgatttgccaagcaatcacgtgatcgatagatggttgggcgagcctatcaaggcggccatactccccaccagtatatttctgaccaataaaaaagggtttcctgtccttagcaaaatgcaccagcggttgatttttcggctattgaagttagaagttcagtttattatcacaggcacaaatcatcactccgagaaagagttctgttcctatttgcaatatctggagtacctttctcagaataggccaccaccgaacgcgtatgaattgtttgccaagggctacgaagattatttgcagtcaccccttcagcctctgatggataatctggagtcacagacttacgaagttttcgagaaggacccaattaaatattcccagtaccagcaggccatctataagtgtctgctggacagagtccccgaggaagagaaagataccaacgtacaagtgctgatggtgctgggtgctggaagaggccctctggttaatgccagcctgagagcagccaagcaggcagatcgccgcatcaagctttatgctgtggagaagaacccaaacgctgttgtgactctcgaaaactggcagttcgaggaatgggggagccaggtgacggtggtgtcttctgacatgagggagtgggtcgcacccgagaaagcggatattatcgtgagtgagttacttgggagctttgcagacaacgaacttagtcccgaatgcttggacggggcgcagcactttctcaaagacgatggggtgtccattcccggggaatacacctcctttctggcacccatctcttcctccaaattgtacaatgaagtgcgtgcttgcagagaaaaagacagagatcctgaagcacagttcgaaatgccctatgtggtcaggttacacaacttccaccaactcagcgcccctcaaccttgctttactttctcccaccctaacagagacccgatgatcgataacaaccgctattgcacccttgagtttccggtggaggtgaacactgtgctccacggttttgctgggtatttcgaaacggttttgtaccaggatattaccttgagcatcaggccagagactcactcgccaggcatgttctcctggttccctatacttttcccaattaaacagccgattactgtgagggaaggacaaacaatctgcgtgcggttttggagatgctctaattctaagaaagtatggtatgaatgggctgttacggcacccgtgtgttccgccatccacaatccaacagggaggagctatacaataggcctgtag

SEQ ID NO: 161891 - DNA, 1914 bp, Artificial Sequence
  derived and/or modified sequence
atggctgcgatggcggttggtggggcagggggttcaagagtttcgtcgggccgagaccttaattgtgtgccggaaattgccgatacattgggtgccgtcgccaaacagggattcgattttctctgcatgccagtctttcatccacggttcaaaagggagttcatccaggaacccgctaagaatcgccctggcccacagacaagatccgacctgctgttatctggcagagactggaataccttgattgtgggcaagctaagcccttggatcaggcctgattcgaaagtcgagaagatccggaggaatagtgaggcagcgatgctgcaagagctcaacttcggggcttacttggggctgcccgcatttttgctccctctgaatcaggaggataacaccaacctcgccagggttctgaccaaccatatccatacaggccatcacagctctatgttttggatgagagtgccgttagttgcccctgaggatcttcgagacgacattatcgaaaacgcaccaactacccacacagaggagtacagtggagaagagaagacctggatgtggtggcataatttcagaacattgtgcgactacagtaaacgtatcgcagtggcactggaaattggagccgatcttcccagcaatcatgtgatagacaggtggttaggggaacccatcaaagcagccattctgccaacctcaatctttctgacgaataagaaggggttccctgtgctgtccaaaatgcaccagaggctgatattccgcctgctcaagctcgaagtgcagttcatcatcaccgggaccaaccaccattccgagaaggagttctgttcttacctccagtatctggaatacttgtctcagaaccgccctcctccaaatgcctatgagctcttcgccaaagggtacgaagactacttacagagtcccctgcaacccctcatggacaacctggagtcacagacttacgaagttttcgagaaagaccctataaagtacagtcagtaccaacaagccatctacaaatgcctcctggacagggtacccgaagaggagaaagatacaaatgtgcaggtcctgatggtccttggtgctgggaggggccctctggttaatgcaagtctccgcgctgccaaacaggcagataggcgtatcaaactgtacgccgtggagaaaaacccaaatgccgtggtcaccctagaaaactggcagttcgaggagtggggcagccaggtaaccgtggtgagctccgacatgcgagagtgggtggcccctgagaaggctgacattatcgtttccgagctgcttggcagttttgccgacaacgaactgagccccgaatgcttggacggcgctcagcattttctgaaagatgacggtgtctcaattcctggcgagtataccagctttctcgcccctatctcttcctcaaagctgtacaacgaggtaagagcgtgtcgggagaaagaccgcgacccagaggcccagttcgagatgccctacgtggtgagactccataatttccaccagctgtctgcaccccagccctgctttactttcagccaccctaatagggatcccatgattgacaataacagatactgtaccctggagttccctgtggaagtgaacactgtgctccacgggtttgccggttattttgagactgtactttatcaagatatcactctgtctatccgacccgaaacacattctcctgggatgtttagctggttccctattctcttccccatcaagcagcccataacagttcgcgaaggccagaccatctgcgtgcgattctggcgatgcagtaatagtaaaaaagtctggtatgagtgggcagtaacagcacccgtctgtagcgcaatccataacccaaccgggaggagctatacaattggtctctag

SEQ ID NO: 161892 - DNA, 2531 bp, Artificial Sequence
  derived and/or modified sequence
aagttcgtcaggaaccagaccctgagattggtggatccatgccgtacgccactgtgcagcccgcggattggcaggaaaagccactccccatccctcctgttcgggagctgtggcagacgctctggttgttaaggcgactcgtcccgccttctggggcactagtttgactttgtgattggctactagtatcaaggaatcccggcgtggacagcgcgaggagaaagatggcggcgatggcggtcgggggtgctggtgggagccgcgtgtccagcgggagggacctgaattgcgtccccgaaatagctgacacactaggggctgtggccaagcaggggtttgatttcctctgcatgcctgtcttccatccgcgtttcaagagggagttcattcaggaacctgctaagaatcggcccggtccccagacacgatcagacctactgctgtcaggaagggactggaatacgctaattgtgggaaagctttctccatggattcgtccagactcaaaagtggagaagattcgcaggaactccgaggcggccatgttacaggagctgaattttggtgcatatttgggtcttccagctttcctgctgccccttaatcaggaagataacaccaacctggccagagttttgaccaaccacatccacactggccatcactcttccatgttctggatgcgggtacccttggtggcaccagaggacctgagagatgatataattgagaatgcaccaactacacacacagaggagtacagtggggaggagaaaacgtggatgtggtggcacaacttccggactttgtgtgactatagtaagaggattgcagtggctcttgaaattggggctgacctcccatctaatcatgtcattgatcgctggcttggggagcccatcaaagcagccattctccccactagcattttcctgaccaataagaagggatttcctgttctttctaagatgcaccagaggctcatcttccggctcctcaagttggaggtgcagttcatcatcacaggcaccaaccaccactcagagaaggagttctgctcctacctccaatacctggaatacttaagccagaaccgtcctccacctaatgcctatgaactctttgccaagggctatgaagactatctgcagtccccgcttcagccactgatggacaatctggaatctcagacatatgaagtgtttgaaaaggaccccatcaaatactctcagtaccagcaggccatctataaatgtctgctagaccgagtaccagaagaggagaaggataccaatgtccaggtactgatggtgctgggagcaggacggggacccctggtgaacgcttccctgcgggcagccaagcaggccgaccggcggataaagctgtatgctgtggagaaaaacccaaatgccgtggtgacgctagagaactggcagtttgaagaatggggaagccaagtgaccgtagtctcatcagacatgagggaatgggtggctccagagaaagcagacatcattgtcagtgagcttctgggctcatttgctgacaatgaattgtcgcctgagtgcctggatggagcccagcacttcctaaaagatgatggtgtgagcatccccggggagtacacttcctttctggctcccatctcttcctccaagctgtacaatgaggtccgagcctgtagggagaaggaccgtgaccctgaggcccagtttgagatgccttatgtggtacggctgcacaacttccaccagctctctgcaccccagccctgtttcaccttcagccatcccaacagagatcctatgattgacaacaaccgctattgcaccttggaatttcctgtggaggtgaacacagtactacatggctttgccggctactttgagactgtgctttatcaggacatcactctgagtatccgtccagagactcactctcctgggatgttctcatggtttcccatcctcttccctattaagcagcccataacggtacgtgaaggccaaaccatctgtgtgcgtttctggcgatgcagcaattccaagaaggtgtggtatgagtgggctgtgacagcaccagtctgttctgctattcataaccccacaggccgctcatataccattggcctctagccctgcgtgccaagtgtccagagccttggaagcagcttcaggttctgctcctgtagtacagaaggtgcagtacatctatgggctgtgattccccttgcccatcagagaggagcatttcaatctgctttcctgccttacatcaaggtgggcaagggattataattaattgcagggctcaagccaccaatctatgaagacctcaggccagggggtgaggaattagtgctggatttgaagctacgcactcagcctcaagaactccctggaatatccctgagaacatggggtttgaacggattttcagcctttttctgttcttgttttgatggttttgtgtaagaggaaatacaaataaagttatagccctttactgcacgaccatgctgccccctg

SEQ ID NO: 161893 - DNA, 1914 bp, Artificial Sequence
  derived and/or modified sequence
atggccgccatggccgtgggcggcgccggcggcagcagagtgagcagcggcagagacctgaactgcgtgcccgagatcgccgacaccctgggcgccgtggccaagcagggcttcgacttcctgtgcatgcccgtgttccaccccagattcaagagagagttcatccaggagcccgccaagaacagacccggcccccagaccagaagcgacctgctgctgagcggcagagactggaacaccctgatcgtgggcaagctgagcccctggatcagacccgacagcaaggtggagaagatcagaagaaacagcgaggccgccatgctgcaggagctgaacttcggcgcctacctgggcctgcccgccttcctgctgcccctgaaccaggaggacaacaccaacctggccagagtgctgaccaaccacatccacaccggccaccacagcagcatgttctggatgagagtgcccctggtggcccccgaggacctgagagacgacatcatcgagaacgcccccaccacccacaccgaggagtacagcggcgaggagaagacctggatgtggtggcacaacttcagaaccctgtgcgactacagcaagagaatcgccgtggccctggagatcggcgccgacctgcccagcaaccacgtgatcgacagatggctgggcgagcccatcaaggccgccatcctgcccaccagcatcttcctgaccaacaagaagggcttccccgtgctgagcaagatgcaccagagactgatcttcagactgctgaagctggaggtgcagttcatcatcaccggcaccaaccaccacagcgagaaggagttctgcagctacctgcagtacctggagtacctgagccagaacagacccccccccaacgcctacgagctgttcgccaagggctacgaggactacctgcagagccccctgcagcccctgatggacaacctggagagccagacctacgaggtgttcgagaaggaccccatcaagtacagccagtaccagcaggccatctacaagtgcctgctggacagagtgcccgaggaggagaaggacaccaacgtgcaggtgctgatggtgctgggcgccggcagaggccccctggtgaacgccagcctgagagccgccaagcaggccgacagaagaatcaagctgtacgccgtggagaagaaccccaacgccgtggtgaccctggagaactggcagttcgaggagtggggcagccaggtgaccgtggtgagcagcgacatgagagagtgggtggcccccgagaaggccgacatcatcgtgagcgagctgctgggcagcttcgccgacaacgagctgagccccgagtgcctggacggcgcccagcacttcctgaaggacgacggcgtgagcatccccggcgagtacaccagcttcctggcccccatcagcagcagcaagctgtacaacgaggtgagagcctgcagagagaaggacagagaccccgaggcccagttcgagatgccctacgtggtgagactgcacaacttccaccagctgagcgccccccagccctgcttcaccttcagccaccccaacagagaccccatgatcgacaacaacagatactgcaccctggagttccccgtggaggtgaacaccgtgctgcacggcttcgccggctacttcgagaccgtgctgtaccaggacatcaccctgagcatcagacccgagacccacagccccggcatgttcagctggttccccatcctgttccccatcaagcagcccatcaccgtgagagagggccagaccatctgcgtgagattctggagatgcagcaacagcaagaaggtgtggtacgagtgggccgtgaccgcccccgtgtgcagcgccatccacaaccccaccggcagaagctacaccatcggcctgtag

SEQ ID NO: 161894 - protein, 397 aa, Artificial Sequence
  derived and/or modified sequence
MALLRGVFVVAAKRTPFGAYGGLLKDFTATDLSEFAAKAALSAGKVSPETVDSVIMGNVLQSSSDAIYLARHVGLRVGIPKETPALTINRLCGSGFQSIVNGCQEICVKEAEVVLCGGTESMSQAPYCVRNVRFGTKLGSDIKLEDSLWVSLTDQHVQLPMAMTAENLAVKHKISREECDKYALQSQQRWKAANDAGYFNDEMAPIEVKTKKGKQTMQVDEHARPQTTLEQLQKLPPVFKKDGTVTAGNASGVADGAGAVIIASEDAVKKHNFTPLARIVGYFVSGCDPSIMGIGPVPAISGALKKAGLSLKDMDLVEVNEAFAPQYLAVERSLDLDISKTNVNGGAIALGHPLGGSGSRITAHLVHELRRRGGKYAVGSACIGGGQGIAVIIQSTA

SEQ ID NO: 161895 - DNA, 1194 bp, Artificial Sequence
  derived and/or modified sequence
atggccctgctgagaggcgtgttcgtggtggccgccaagagaacccccttcggcgcctacggcggcctgctgaaggacttcaccgccaccgacctgagcgagttcgccgccaaggccgccctgagcgccggcaaggtgagccccgagaccgtggacagcgtgatcatgggcaacgtgctgcagagcagcagcgacgccatctacctggccagacacgtgggcctgagagtgggcatccccaaggagacccccgccctgaccatcaacagactgtgcggcagcggcttccagagcatcgtgaacggctgccaggagatctgcgtgaaggaggccgaggtggtgctgtgcggcggcaccgagagcatgagccaggccccctactgcgtgagaaacgtgagattcggcaccaagctgggcagcgacatcaagctggaggacagcctgtgggtgagcctgaccgaccagcacgtgcagctgcccatggccatgaccgccgagaacctggccgtgaagcacaagatcagcagagaggagtgcgacaagtacgccctgcagagccagcagagatggaaggccgccaacgacgccggctacttcaacgacgagatggcccccatcgaggtgaagaccaagaagggcaagcagaccatgcaggtggacgagcacgccagaccccagaccaccctggagcagctgcagaagctgccccccgtgttcaagaaggacggcaccgtgaccgccggcaacgccagcggcgtggccgacggcgccggcgccgtgatcatcgccagcgaggacgccgtgaagaagcacaacttcacccccctggccagaatcgtgggctacttcgtgagcggctgcgaccccagcatcatgggcatcggccccgtgcccgccatcagcggcgccctgaagaaggccggcctgagcctgaaggacatggacctggtggaggtgaacgaggccttcgccccccagtacctggccgtggagagaagcctggacctggacatcagcaagaccaacgtgaacggcggcgccatcgccctgggccaccccctgggcggcagcggcagcagaatcaccgcccacctggtgcacgagctgagaagaagaggcggcaagtacgccgtgggcagcgcctgcatcggcggcggccagggcatcgccgtgatcatccagagcaccgcctag

SEQ ID NO: 161896 - DNA, 1961 bp, Artificial Sequence
  derived and/or modified sequence
ctcagcccttggctcctgcccagtgtttagggtgttggcggagacaaaggggaagagtcatcgcctgtcggggctaggatatgatgggtgagaggtgtcaaaccaaattctctcggtttggaaacggagaaaatctaaaaatgaggatgtgaggaaagagtccgctctcaaggcgcgttgtggtctatccgagccccgtcccctgggctccctcgggctggggtgaggcgggcagcgctacgcgtggggtaggaccatcttacgctgggaccccgccaaggagccccaggaagtaggtgaaagggcaggggcgtggctctcggggcgccacccacgctcttgaaatctgggtgattgcgagcggccgctcagcgtcccccacaccacagacccgcgccgccgacgacccagcagccgccatggctctgctccgaggtgtgtttgtagttgctgctaagcgaacgccctttggagcttacggaggccttctgaaagacttcactgctactgacttgtctgaatttgctgccaaggctgccttgtctgctggcaaagtctcacctgaaacagttgacagtgtgattatgggcaatgtcctgcagagttcttcagatgctatatatttggcaaggcatgttggtttgcgtgtgggaatcccaaaggagaccccagctctcacgattaataggctctgtggttctggttttcagtccattgtgaatggatgtcaggaaatttgtgttaaagaagctgaagttgttttatgtggaggaaccgaaagcatgagccaagctccctactgtgtcagaaatgtgcgttttggaaccaagcttggatcagatatcaagctggaagattctttatgggtatcattaacagatcagcatgtccagctccccatggcaatgactgcagagaatcttgctgtaaaacacaaaataagcagagaagaatgtgacaaatatgccctgcagtcacagcagagatggaaagctgctaatgatgctggctactttaatgatgaaatggcaccaattgaagtgaagacaaagaaaggaaaacagacaatgcaggtagacgagcatgctcggccccaaaccaccctggaacagttacagaaacttcctccagtattcaagaaagatggaactgttactgcagggaatgcatcgggtgtagctgatggtgctggagctgttatcatagctagtgaagatgctgttaagaaacataacttcacaccactggcaagaattgtgggctactttgtatctggatgtgatccctctatcatgggtattggtcctgtccctgctatcagtggggcactgaagaaagcaggactgagtcttaaggacatggatttggtagaggtgaatgaagcttttgctccccagtacttggctgttgagaggagtttggatcttgacataagtaaaaccaatgtgaatggaggagccattgctttgggtcacccactgggaggatctggatcaagaattactgcacacctggttcacgaattaaggcgtcgaggtggaaaatatgccgttggatcagcttgcattggaggtggccaaggtattgctgtcatcattcagagcacagcctgaagagaccagtgagctcactgtgacccatccttactctacttggccaggccacagtaaaacaagtgaccttcagagcagctgccacaactggccatgccctgccattgaaacagtgattaagtttgatcaagccatggtgacacaaaaatgcattgatcatgaataggagcccatgctagaagtacattctctcagatttgaaccagtgaaatatgatgtatttctgagctaaaactcaactatagaagacattaaaagaaatcgtattcttgccaagtaaccaccacttctgccttagataatatgattataaggaaatcaaataaatgttgccttaacttcagttaa

SEQ ID NO: 161897 - DNA, 1194 bp, Artificial Sequence
  derived and/or modified sequence
atggctctacttagaggtgtattcgtggtcgccgccaaacgaacacccttcggggcatatggcggcttgctgaaagatttcacagctacagacctaagtgaatttgccgctaaggccgccctgtccgcaggcaaggtctcaccagagactgtggatagcgtgatcatgggaaacgtactacaatcttcctccgacgctatttatttagccagacacgttgggttgcgcgtgggtattcctaaagaaacacccgcattgaccataaacagactatgtggtagcggttttcaatcaattgtcaatggatgccaggagatttgcgtgaaggaggctgaagtcgtgttatgtggcggaacagagagcatgagtcaggcgccttactgtgtgaggaacgtgcgcttcgggacaaaattagggtcagatatcaagctcgaagacagtctctgggtgtctctgacagaccaacacgtacagctgccaatggcgatgacggccgaaaacttggcagtgaaacataagattagccgcgaggaatgtgacaagtatgccctgcagagccagcagaggtggaaggctgctaacgacgccggatactttaacgacgaaatggctccgatcgaggtgaaaactaaaaagggcaagcagacaatgcaggtcgatgaacatgccaggccgcagaccaccctggagcagctgcagaaactacccccggtgttcaagaaggatgggaccgttactgccggaaacgcgtcgggcgtggccgatggggccggggccgtgattatagcatccgaggacgctgtgaaaaaacacaatttcacacctctggctcgaatcgtaggctattttgtctctggatgcgatcctagcatcatgggaattgggccggtacccgctatcagtggtgcgttaaaaaaggctggactgtctctcaaggacatggacctggtggaggtaaacgaggcattcgctcctcaataccttgccgtcgaacgaagcttagacttggacatttcaaagaccaatgtgaatgggggcgcaattgcactgggacacccacttgggggctccggaagtcgcattacggctcatttggtgcatgaactgcggagacggggcggcaagtacgccgtcggttcggcgtgtatcggcgggggccagggcattgccgtcattatccaaagtaccgcctag

SEQ ID NO: 161898 - DNA, 1194 bp, Artificial Sequence
  derived and/or modified sequence
atggccctgctgcggggcgtgtttgtggtggccgccaagaggaccccatttggagcctacggcggcctgctgaaggacttcaccgccacagacctgtctgaatttgctgccaaggccgccctgtctgctgggaaggtgtccccagagaccgtggacagcgtcatcatgggaaatgtgctgcagagcagcagtgatgccatctacctggcccggcacgtgggcctgcgggtgggcatccccaaggagaccccagccctgaccatcaaccggctgtgtggcagcggcttccagagcatcgtgaatggctgccaggagatctgtgtgaaggaggccgaggtggtgctgtgtggcggcacagagagcatgagccaggccccctactgtgtgagaaatgtgcgcttcggcaccaagctgggcagtgacatcaagctggaggacagcctgtgggtgtccctgacagaccagcacgtgcagctgcccatggccatgacagctgagaacctggccgtgaagcacaagatcagccgggaggagtgtgacaagtatgccctgcagagccagcagcgctggaaggccgccaatgatgctggctacttcaatgatgagatggcccccatcgaggtgaagaccaagaagggcaagcagaccatgcaggtggatgagcacgcccggccccagaccaccctggagcagctgcagaagctgccccctgtgttcaagaaggatggcaccgtgacagctggaaatgccagcggcgtggctgatggagctggagctgtgatcatcgcctctgaagatgctgtgaagaagcacaacttcacccccctggccagaattgtgggctactttgtgtctggctgtgaccccagcatcatgggcatcggccctgtgcctgccatcagcggggccctgaagaaggccggcctgagcctgaaggacatggacctggtggaggtgaatgaggcctttgccccccagtacctggccgtggagaggagcctggacctggacatcagcaagaccaacgtgaatggaggagccatcgccctgggccaccccctgggcggcagcggcagccgcatcacagcccacctggtgcatgagctgcggaggagaggaggcaagtatgctgtgggcagcgcctgcattggaggcggccagggcattgctgtgatcatccagagcacagcctag

SEQ ID NO: 161899 - DNA, 1194 bp, Artificial Sequence
  derived and/or modified sequence
atggccctgctgcggggcgtgttcgtggtggccgccaagcggacccctttcggggcctacggagggttactcaaggacttcaccgccaccgacctaagcgagttcgccgcaaaggcagcactgtctgctgggaaagtgtccccggaaaccgttgacagcgtcatcatgggaaatgtgttacagagttcttccgatgctatttacctcgcacggcacgttggactgcgtgtcggtatccccaaagagactcctgccctgacaatcaaccgcctctgtgggtctggcttccagtcaattgtcaacggatgtcaggaaatttgcgtgaaggaggctgaggttgtcctatgtgggggcaccgagtccatgtcgcaggctccatactgcgtgcggaatgtgaggttcggcacgaaactcggcagcgatatcaaacttgaggattcactttgggtgagtctgaccgaccagcatgtgcagcttccaatggcgatgactgccgaaaacctggccgtcaagcataagatctccagagaagagtgcgacaagtatgccctgcagagtcagcagaggtggaaggcagcaaatgacgccgggtatttcaatgacgaaatggcgcctatcgaggtgaagactaaaaagggcaagcagactatgcaggtggatgaacacgccagaccccaaacgaccctggaacaattgcaaaagctccctcccgtgtttaagaaggacggaacagtcaccgctggcaatgcatcaggcgtagccgacggggctggagccgtgattatcgcctctgaggatgctgtcaagaaacataactttacgcctctggcacgtattgtcggctactttgtttcggggtgtgacccttctatcatgggcataggcccggttcctgccatttccggcgctctaaaaaaggccgggctgtctctaaaagatatggacctggtagaagtaaacgaggcgttcgccccacagtatctggctgtagaacggtccttggatttggacatatccaagaccaacgtgaacggaggtgccatcgcgctgggacatcctctgggcgggagcggctccagaataaccgcccatctagtgcacgagctcaggcgccgcggcggcaagtacgcggttggtagcgcctgtattggcggggggcagggaattgccgtgataatccaatctactgcctag

SEQ ID NO: 161900 - DNA, 1194 bp, Artificial Sequence
  derived and/or modified sequence
atggcactgctgaggggtgtctttgtggtggccgcaaagcgaacccccttcggagcatacggaggcctgttaaaagattttactgcaaccgatttaagtgagttcgcagcaaaagcagcactcagcgcgggaaaagtctcaccagagaccgtggacagcgtcatcatgggcaatgtactgcagtcctccagtgacgcgatctatttggctagacacgtgggattgagagtgggcattcccaaggaaaccccagctctgacaatcaacaggttatgtggatctggcttccaatcgatcgtgaacggttgtcaggaaatctgcgtaaaagaggcagaagttgtcctctgtggcggaacggaatctatgtcgcaggctccctattgcgttaggaatgtacggttcgggacgaagctggggtccgacattaagctcgaagatagcctctgggttagcttgacggaccagcacgtgcagcttcctatggctatgacagccgagaatttggccgttaagcacaagatctctcgggaagagtgcgacaagtatgcattacagtcacagcagcgttggaaagccgcaaatgatgcaggctattttaacgatgagatggcccctattgaagtaaaaaccaagaagggaaagcagacgatgcaggtggatgaacacgccagaccacagaccacactggagcaactgcagaaactgcctcccgtgttcaagaaggatgggaccgtgacggcgggaaatgcctctggcgttgctgacggggctggggcagtgatcatcgcctctgaggacgcggtgaaaaaacataacttcacacctttggcccgtatcgtgggctacttcgtgtccggctgtgatccaagcattatggggattgggccagtgccagcgattagtggggctctgaagaaggccggactgagcctcaaagacatggatttggttgaagtgaatgaagccttcgccccacagtacttggccgtagaaagatcactcgatctggacatcagcaagacgaatgtaaacggaggcgcaatagcactggggcatcctctcggcggatcaggttctcggatcaccgcgcacctggtccacgagctgcggagaagaggcggaaaatacgcggtcggttccgcatgtatcggcggtggccagggaatcgcagtgataatccagagtaccgcttag

SEQ ID NO: 161901 - protein, 504 aa, Artificial Sequence
  derived and/or modified sequence
MAAQRRSLLQSEQQPSWTDDLPLCHLSGVGSASNRSYSADGKGTESHPPEDSWLKFRSENNCFLYGVFNGYDGNRVTNFVAQRLSAELLLGQLNAEHAEADVRRVLLQAFDVVERSFLESIDDALAEKASLQSQLPEGVPQHQLPPQYQKILERLKTLEREISGGAMAVVAVLLNNKLYVANVGTNRALLCKSTVDGLQVTQLNVDHTTENEDELFRLSQLGLDAGKIKQVGIICGQESTRRIGDYKVKYGYTDIDLLSAAKSKPIIAEPEIHGAQPLDGVTGFLVLMSEGLYKALEAAHGPGQANQEIAAMIDTEFAKQTSLDAVAQAVVDRVKRIHSDTFASGGERARFCPRHEDMTLLVRNFGYPLGEMSQPTPSPAPAAGGRVYPVSVPYSSAQSTSKTSVTLSLVMPSQGQMVNGAHSASTLDEATPTLTNQSPTLTLQSTNTHTQSSSSSSDGGLFRSRPAHSLPPGEDGRVEPYVDFAEFYRLWSVDHGEQSVVTAP

SEQ ID NO: 161902 - DNA, 1515 bp, Artificial Sequence
  derived and/or modified sequence
atggcagcccagagacgatctctcttacagtctgagcaacagccgtcatggaccgacgacctgcccctctgccacttgagcggagtgggttctgcatccaacagatcgtacagtgctgatggtaaggggaccgaaagccaccctcccgaagattcatggctgaaattccggtcagaaaacaattgcttcctctacggcgtatttaacggatatgacggtaacagggtcacgaatttcgtggcccagcggctctctgcagagttgttgcttgggcagttaaatgcggaacatgcggaagccgatgttcgaagggtactgcttcaagcattcgatgtcgttgaacgctccttcctggagagtattgacgacgccctcgcagagaaagccagcttgcagtcccagctgccggagggcgtcccccagcatcagctgccaccacaatatcaaaagatcttagagcggctgaagacacttgagcgggaaatctcaggcggagcaatggccgttgtagccgtcctgctaaataacaagctgtatgtcgctaatgtaggcacgaatcgcgctctgttgtgcaagagcacagtggacggattgcaggtgactcagttgaatgttgatcacaccaccgaaaacgaggacgaactgttcaggctatcgcaactcggccttgacgcaggaaagatcaagcaagttggaataatctgcggccaggagtcgacacgtcgcatcggagattacaaggtgaagtacggctatactgacattgacctgttgagcgcagcaaaatctaagcctatcatagccgaacctgaaattcatggcgctcaacccttagacggcgtgaccggattcctggtcctaatgtccgaaggcctctacaaagccttggaggccgcccacggacccggccaagctaatcaggagatagccgctatgattgacacggagtttgccaaacagacctcattggacgccgtcgctcaggccgttgttgacagagttaagagaatccattctgatacctttgcctcgggcggcgaacgggcacgcttctgtcccagacacgaagacatgaccctgctcgttcgcaactttggatacccgctaggggagatgtctcaacccactcctagcccagcgcccgcagcggggggacgcgtttacccagtaagcgtgccctacagctctgctcagagcacctctaaaacaagcgtaacgctttccctcgtcatgccatcacagggacagatggtcaatggagcccactccgccagcaccttggatgaggctaccccgacattgacaaatcagtcacccactctaaccttgcagtcaacaaacacacatactcagtcctcctcatcctcctctgatggcggactgttccgttccaggcctgcccactccctgccccccggcgaagacggacgtgtggagccctacgtcgattttgcggagttttaccggctctggtccgtggaccacggagagcagagtgtcgttactgcgccctag

SEQ ID NO: 161903 - DNA, 1515 bp, Artificial Sequence
  derived and/or modified sequence
atggccgcccagaggaggagcctgctgcagagcgagcagcagcccagctggacagatgacctgcccctgtgccacctgtctggagtgggcagcgccagcaacagaagctacagcgcagatggcaagggcacagagagccaccccccagaggacagctggctgaagttccgctctgagaacaactgcttcctgtatggagtcttcaacggctatgatggcaacagagtgaccaactttgtggcccagaggctgtctgctgagctgctgctgggccagctgaatgctgagcacgccgaggctgatgtgagaagagtgctgctgcaggcctttgatgtggtggagaggagcttcctggagagcattgatgatgccctggccgagaaggccagcctgcagagccagctgcctgagggcgtgccccagcaccagctgcccccccagtaccagaagatcctggagcggctgaagaccctggagcgggagatctctggaggagccatggctgtggtggccgtgctgctgaacaacaagctgtatgtggccaacgtgggcaccaacagagccctgctgtgcaagagcacagtggatggcctgcaggtgacccagctgaatgtggaccacaccacagaaaatgaagatgagctgttccggctgagccagctgggcctggatgctgggaagatcaagcaggtgggcatcatctgtggccaggagagcaccaggagaattggagactacaaggtgaagtatggctacacagacatcgacctgctgtctgctgccaagagcaagcccatcatcgccgagcctgagatccatggagcccagcccctggatggagtgacaggcttcctggtgctgatgtctgagggcctgtacaaggccctggaggccgcccacggccctggccaggccaaccaggagattgctgccatgattgacacagaatttgccaagcagaccagcctggatgctgtggcccaggccgtggtggacagagtgaagaggatccacagcgacacctttgccagcggcggggagcgggcccgcttctgccccaggcatgaggacatgaccctgctggtgaggaactttggctaccccctgggggagatgagccagcccacccccagccctgccccagctgctgggggccgggtgtaccctgtgtctgtgccctacagcagcgcccagagcaccagcaagacctctgtgaccctgagcctggtgatgcccagccagggccagatggtgaatggagcccacagcgccagcaccctggatgaggccacccccaccctgaccaaccagagccccaccctgaccctgcagagcaccaacacccacacccagagcagcagcagcagcagtgatggcggcctcttccgcagcaggcctgcccacagcctgcccccaggagaagatggccgggtggagccctacgtggactttgctgagttctaccgcctgtggagcgtggaccatggagagcagagcgtggtgacagccccctag

SEQ ID NO: 161904 - DNA, 1515 bp, Artificial Sequence
  derived and/or modified sequence
atggccgcccagcggcggagcctgctgcagagcgagcagcagccctcctggactgacgatctgcccctctgccatttgtccggcgttgggtcagccagcaacagatcctatagcgcagacggaaaaggtaccgagtcgcatccacccgaagatagttggctgaagtttcgcagcgagaataattgtttcctgtacggcgtcttcaacggttacgatgggaacagggttacgaacttcgtcgcacagaggttgagcgccgagctgctgctaggacagcttaacgcagaacacgctgaggccgacgtgagacgtgttctcctccaggcattcgacgtcgtggaaagaagttttctcgagtctatcgatgacgctctggcggagaaggcatccctccagtctcagctcccggagggcgtgccccagcaccagctgccaccccagtaccagaagatacttgagcgcctgaaaacccttgagcgagaaatctcaggaggcgccatggctgtcgttgccgtactactgaataacaagttgtacgtggctaacgtcggtacgaacagagccctgctctgcaagagtacagtcgatggccttcaggtaactcagctgaacgtggatcacaccaccgagaatgaagacgaactatttcgtctgtcacaacttggcttggacgctggtaagattaaacaggttggtataatttgcgggcaagagtccacaagacggatcggtgattataaggtgaagtacggctataccgatattgatttattatctgcagccaagtccaaacccataattgctgagccagagatccatggcgcccagcccttggacggagtcaccgggttcctggtgctgatgtcggagggcctttacaaggcgctggaagctgcccatggccccggccaggctaaccaggagatagctgcaatgattgacaccgagttcgccaaacaaactagcttggacgcagttgctcaggcagtggtagacagagtcaagagaatacactctgacacattcgcaagcggtggcgagagagcacgcttctgtccaaggcatgaggacatgaccctgctcgtgaggaactttggatacccactgggggagatgtctcagccaactccctccccagctcccgctgccggaggacgggtgtatcccgtcagcgttccttattcctccgcgcaatcaaccagtaagactagcgtcaccctgagcctcgtaatgccaagccagggacagatggtgaatggggctcactcagcctctaccctggatgaagcaacacctactctcacaaaccaaagccccacactgaccctccagagcacaaacacccatacccagtcatcttcctccagcagtgatggaggacttttcagaagtcgacccgcccatagtttaccccctggggaggacggtagggtcgagccatacgttgactttgcagagttttatagactgtggagcgtggatcacggcgaacagtccgttgtcacagccccctag

SEQ ID NO: 161905 - DNA, 1515 bp, Artificial Sequence
  derived and/or modified sequence
atggctgcccaacgcagaagtctcctgcagagcgagcaacaaccttcttggacagacgacctccctctctgccacctgtctggggttgggtcggccagcaatcgtagctactcagcagatgggaagggaaccgaatctcatcctcccgaggactcatggttaaaatttcggtcagagaacaactgcttcttgtatggagttttcaatggatatgacggtaaccgggtgactaacttcgtcgcacagaggctctctgctgaattgctgctaggccaactcaatgccgagcacgccgaagctgacgttaggagagttctcctgcaagcgttcgacgtggtggagaggagctttttagagtctatcgacgacgctttggccgagaaggccagtctgcaaagtcagctccccgagggagtgccacagcatcagctaccacctcaatatcaaaagattctggagcgattgaaaactcttgagcgggaaatttccggcggtgctatggccgtggtcgccgtgctgctcaataataagctgtatgtggctaacgtcggaacaaacagggccctactgtgcaagagtaccgtggatgggcttcaggttacccagctgaatgtggaccacacaactgagaacgaggacgaactgtttcgcctgtcacagctgggattggatgcgggtaaaataaagcaagtgggaataatttgcggacaggagagcacaaggcggatcggtgattacaaagtgaaatacgggtacactgacattgatctgttgagtgcagccaaaagtaaaccaatcattgccgagccggagatacacggggctcaacccctagatggcgtaacaggctttttagtgttaatgagtgaggggttgtacaaagctctggaagcggctcatggccctggtcaagcaaaccaggaaatcgcagccatgatagatacagagtttgcaaagcagacctcgctggatgccgttgcccaggccgtagtcgaccgagtcaagcgcattcacagtgacacatttgccagcggcggtgagcgcgcaaggttttgcccaaggcacgaagatatgaccctgttggtgaggaatttcgggtatcccctcggcgaaatgtcccagccgacaccttctccagcccctgcggctggagggagagtctatcccgtttctgtgccctactcaagtgcccagtctacatccaagacctctgttactctgtcactggttatgccaagtcagggccagatggttaatggagctcatagcgcctcaactctggatgaggccacccccaccctgaccaatcagtctcccacactgaccctgcagtccacaaatactcatacccaaagctcttctagtagctccgatggtggactgttcaggagtaggcctgcgcattctctgcctcctggtgaagacgggcgtgttgagccttatgtggatttcgcagaattttacaggctgtggtctgtggatcacggcgaacagagtgtggtgaccgccccttag

SEQ ID NO: 161906 - DNA, 3237 bp, Artificial Sequence
  derived and/or modified sequence
ctctagccgccccactcgctgctctgcggggaggcgggcgctcccgcaggggttcctccaagatggcggcgcagaggaggagcttgctgcagagtgagcagcagccaagctggacagatgacctgcctctctgccacctctctggggttggctcagcctccaaccgcagctactctgctgatggcaagggcactgagagccacccgccagaggacagctggctcaagttcaggagtgagaacaactgcttcctgtatggggtcttcaacggctatgatggcaaccgagtgaccaacttcgtggcccagcggctgtccgcagagctcctgctgggccagctgaatgccgagcacgccgaggccgatgtgcggcgtgtgctgctgcaggccttcgatgtggtggagaggagcttcctggagtccattgacgacgccttggctgagaaggcaagcctccagtcgcaattgccagagggagtccctcagcaccagctgcctcctcagtatcagaagatccttgagagactcaagacgttagagagggaaatttcgggaggggccatggccgttgtggcggtccttctcaacaacaagctctacgtcgccaatgtcggtacaaaccgtgcacttttatgcaaatcgacagtggatgggttgcaggtgacacagctgaacgtggaccacaccacagagaacgaggatgagctcttccgtctttcgcagctgggcttggatgctggaaagatcaagcaggtggggatcatctgtgggcaggagagcacccggcggatcggggattacaaggttaaatatggctacacggacattgaccttctcagcgctgccaagtccaaaccaatcatcgcagagccagaaatccatggggcacagccgctggatggggtgacgggcttcttggtgctgatgtcggaggggttgtacaaggccctagaggcagcccatgggcctgggcaggccaaccaggagattgctgcgatgattgacactgagtttgccaagcagacctccctggacgcagtggcccaggccgtcgtggaccgggtgaagcgcatccacagcgacaccttcgccagtggtggggagcgtgccaggttctgcccccggcacgaggacatgaccctgctagtgaggaactttggctacccgctgggcgaaatgagccagcccacaccgagcccagccccagctgcaggaggacgagtgtaccctgtgtctgtgccatactccagcgcccagagcaccagcaagaccagcgtgaccctctcccttgtcatgccctcccagggccagatggtcaacggggctcacagtgcttccaccctggacgaagccacccccaccctcaccaaccaaagcccgaccttaaccctgcagtccaccaacacgcacacgcagagcagcagctccagctctgacggaggcctcttccgctcccggcccgcccactcgctcccgcctggcgaggacggtcgtgttgagccctatgtggactttgctgagttttaccgcctctggagcgtggaccatggcgagcagagcgtggtgacagcaccgtagggcagccggagaatgcagcccaagcagggcctggcatggggcaggacagggtccagccttttcctaacatctgcctgtgccacaacggccagcaggtgccccatcctctgcccacagcagactctgtcccatggctctccgggcagtagagtgtgtgagtgcagactggacctgtggttcataccttgtcaccacccgggaagctgaaggccacttcctcccagatggcctcagccaggaccatcgccctttctcagagcagagggccaggtatagaaaccgcagtgggcctgcaagccgcccgagcctccccagcagcctcctacagagcaggaagaggcgccctgtgaaccctgagtgttgcaggcccagcagaccctgctgtcccaagcccacccctcctcccaccatcacctccctcacctcgggacagtagccctccacttctccagcctctcagccctgtgctcctgcatccagagtggaacccaggctggtgtccgcatctgtccctgggccccacccctggacctgccttggttgtgtcatctgttgtaaacgttcaggaggaccagggcagcatctggggcctgggatggccacagaaggggcaggccaggtggaaaggagccagggggaagtggtctaagagacctggaactgccagaggatggcggcctgggcttccccagagccaggcgtgcgggagaggtgaggactggccccggtgggctgaggcaggggccgctgtcgtcaggcctgagccagggtgagctggtgcctgccttgcattttccttctggtgctgtgaagaccataggctggcaggcagctgagatgaactgtctttaccactgatgaggggcctctgccggctgagggtagcaagcaggggttgtgagtcaggctgggggacttgtttgaaagaaagaggagtggaaaatggttccaggagggaagaggttctttgagacacagtaccctgggaggcataggagaagggtcgggccagcccagcccagggcctgagttagactatttcccacatgttctctgccttcagtggggagggggtgccaccagggctgtcggccaggattgccactcctgtttcagaggaagcaggccgagagacttgcaccttggccaagccacacaatcagtggggcagccagagctcagacctgagccattttgtcagtatccaggaccccccggattctccacgccctccccatctcccagtctccctgccccccatgccccagaccggcccaccagggactagccgctgtcgcacagcctctggggtgcttggtctctgcgaagtcaaaggcctgacagctctgtggcctgggaatccattttcctgcggcagagcagggcctggtgtggaaccagggagctgtgggaagccacagcagaaatggaagaaaaacaggtctcagcccagggtcctcgctcactccctcactccccactttgaagccatctctgttctgcaggtgagaggatttaaagtcagtcacaaaggcttgggaacaaaaggaattctcttccaagaatgcctctgtggtgctgtttggtctctagaaacagggtcacttttttaatgtagtaaagaagtaataaatggtggcattacacattgtgatattaa

SEQ ID NO: 161907 - DNA, 1515 bp, Artificial Sequence
  derived and/or modified sequence
atggccgcccagagaagaagcctgctgcagagcgagcagcagcccagctggaccgacgacctgcccctgtgccacctgagcggcgtgggcagcgccagcaacagaagctacagcgccgacggcaagggcaccgagagccacccccccgaggacagctggctgaagttcagaagcgagaacaactgcttcctgtacggcgtgttcaacggctacgacggcaacagagtgaccaacttcgtggcccagagactgagcgccgagctgctgctgggccagctgaacgccgagcacgccgaggccgacgtgagaagagtgctgctgcaggccttcgacgtggtggagagaagcttcctggagagcatcgacgacgccctggccgagaaggccagcctgcagagccagctgcccgagggcgtgccccagcaccagctgcccccccagtaccagaagatcctggagagactgaagaccctggagagagagatcagcggcggcgccatggccgtggtggccgtgctgctgaacaacaagctgtacgtggccaacgtgggcaccaacagagccctgctgtgcaagagcaccgtggacggcctgcaggtgacccagctgaacgtggaccacaccaccgagaacgaggacgagctgttcagactgagccagctgggcctggacgccggcaagatcaagcaggtgggcatcatctgcggccaggagagcaccagaagaatcggcgactacaaggtgaagtacggctacaccgacatcgacctgctgagcgccgccaagagcaagcccatcatcgccgagcccgagatccacggcgcccagcccctggacggcgtgaccggcttcctggtgctgatgagcgagggcctgtacaaggccctggaggccgcccacggccccggccaggccaaccaggagatcgccgccatgatcgacaccgagttcgccaagcagaccagcctggacgccgtggcccaggccgtggtggacagagtgaagagaatccacagcgacaccttcgccagcggcggcgagagagccagattctgccccagacacgaggacatgaccctgctggtgagaaacttcggctaccccctgggcgagatgagccagcccacccccagccccgcccccgccgccggcggcagagtgtaccccgtgagcgtgccctacagcagcgcccagagcaccagcaagaccagcgtgaccctgagcctggtgatgcccagccagggccagatggtgaacggcgcccacagcgccagcaccctggacgaggccacccccaccctgaccaaccagagccccaccctgaccctgcagagcaccaacacccacacccagagcagcagcagcagcagcgacggcggcctgttcagaagcagacccgcccacagcctgccccccggcgaggacggcagagtggagccctacgtggacttcgccgagttctacagactgtggagcgtggaccacggcgagcagagcgtggtgaccgccccctag

SEQ ID NO: 161908 - protein, 364 aa, Artificial Sequence
  derived and/or modified sequence
MNRTAMRASQKDFENSMNQVKLLKKDPGNEVKLKLYALYKQATEGPCNMPKPGVFDLINKAKWDAWNALGSLPKEAARQNYVDLVSSLSPSLESSSQVEPGTDRKSTGFETLVVTSEDGITKIMFNRPKKKNAINTEMYHEIMRALKAASKDDSIITVLTGNGDYYSSGNDLTNFTDIPPGGVEEKAKNNAVLLREFVGCFIDFPKPLIAVVNGPAVGISVTLLGLFDAVYASDRATFHTPFSHLGQSPEGCSSYTFPKIMSPAKATEMLIFGKKLTAGEACAQGLVTEVFPDSTFQKEVWTRLKAFAKLPPNALRISKEVIRKREREKLHAVNAEECNVLQGRWLSDECTNAVVNFLSRKSKL

SEQ ID NO: 161909 - DNA, 1095 bp, Artificial Sequence
  derived and/or modified sequence
atgaacagaaccgccatgagagccagccagaaggacttcgagaacagcatgaaccaggtgaagctgctgaagaaggaccccggcaacgaggtgaagctgaagctgtacgccctgtacaagcaggccaccgagggcccctgcaacatgcccaagcccggcgtgttcgacctgatcaacaaggccaagtgggacgcctggaacgccctgggcagcctgcccaaggaggccgccagacagaactacgtggacctggtgagcagcctgagccccagcctggagagcagcagccaggtggagcccggcaccgacagaaagagcaccggcttcgagaccctggtggtgaccagcgaggacggcatcaccaagatcatgttcaacagacccaagaagaagaacgccatcaacaccgagatgtaccacgagatcatgagagccctgaaggccgccagcaaggacgacagcatcatcaccgtgctgaccggcaacggcgactactacagcagcggcaacgacctgaccaacttcaccgacatcccccccggcggcgtggaggagaaggccaagaacaacgccgtgctgctgagagagttcgtgggctgcttcatcgacttccccaagcccctgatcgccgtggtgaacggccccgccgtgggcatcagcgtgaccctgctgggcctgttcgacgccgtgtacgccagcgacagagccaccttccacacccccttcagccacctgggccagagccccgagggctgcagcagctacaccttccccaagatcatgagccccgccaaggccaccgagatgctgatcttcggcaagaagctgaccgccggcgaggcctgcgcccagggcctggtgaccgaggtgttccccgacagcaccttccagaaggaggtgtggaccagactgaaggccttcgccaagctgccccccaacgccctgagaatcagcaaggaggtgatcagaaagagagagagagagaagctgcacgccgtgaacgccgaggagtgcaacgtgctgcagggcagatggctgagcgacgagtgcaccaacgccgtggtgaacttcctgagcagaaagagcaagctgtag

SEQ ID NO: 161910 - DNA, 684 bp, Artificial Sequence
  derived and/or modified sequence
atgtaccacgagatcatgagagccctgaaggccgccagcaaggacgacagcatcatcaccgtgctgaccggcaacggcgactactacagcagcggcaacgacctgaccaacttcaccgacatcccccccggcggcgtggaggagaaggccaagaacaacgccgtgctgctgagagagttcgtgggctgcttcatcgacttccccaagcccctgatcgccgtggtgaacggccccgccgtgggcatcagcgtgaccctgctgggcctgttcgacgccgtgtacgccagcgacagagccaccttccacacccccttcagccacctgggccagagccccgagggctgcagcagctacaccttccccaagatcatgagccccgccaaggccaccgagatgctgatcttcggcaagaagctgaccgccggcgaggcctgcgcccagggcctggtgaccgaggtgttccccgacagcaccttccagaaggaggtgtggaccagactgaaggccttcgccaagctgccccccaacgccctgagaatcagcaaggaggtgatcagaaagagagagagagagaagctgcacgccgtgaacgccgaggagtgcaacgtgctgcagggcagatggctgagcgacgagtgcaccaacgccgtggtgaacttcctgagcagaaagagcaagctgtag

SEQ ID NO: 161911 - DNA, 1095 bp, Artificial Sequence
  derived and/or modified sequence
atgaacagaaccgccatgcgtgccagccaaaaagatttcgagaacagcatgaaccaagttaagctgctcaagaaggaccccggtaacgaggttaagctgaaactttatgctctgtataagcaggcaacagagggtccatgcaacatgcctaaaccaggggtatttgacttaatcaacaaggcaaaatgggacgcatggaacgctctgggttcactccccaaggaggctgcacggcagaactatgtcgatctggtgagctccctgagcccctccttagaaagttcctcacaagttgaaccgggcactgatagaaagtcaacgggattcgagacactggtggtcacgtccgaagatgggattactaagattatgttcaaccgcccaaaaaagaagaacgccatcaacactgagatgtaccacgaaatcatgcgggcactgaaagcagcttccaaagacgattccatcatcacggtgctgactgggaacggtgattactatagtagcggcaatgacttgacaaatttcacagacatcccacccggcggggtggaagagaaagctaagaataacgctgtgcttctccgcgagtttgtgggctgttttatcgatttccctaagccactgatcgccgtggtaaatggaccagccgtgggaatttcagttacgctgttgggcctgtttgatgctgtctacgccagtgatcgcgcaacgttccatacacccttttcccatttaggacagtcaccagagggctgcagtagttataccttcccaaagatcatgagtcctgcaaaagcaactgaaatgctgatctttgggaagaaattgacagctggagaggcatgtgcacagggcctggtaacagaagttttcccggattcaacttttcagaaggaagtgtggactagactcaaagcattcgccaagctgccaccgaacgccctcaggatctcaaaggaagtcattaggaaaagggagcgggagaaattgcacgccgtaaacgctgaggagtgcaatgttctacaggggcggtggctcagcgatgagtgcaccaatgctgtggttaacttcctttccaggaagtcaaaactgtag

SEQ ID NO: 161912 - DNA, 1095 bp, Artificial Sequence
  derived and/or modified sequence
atgaatcgcaccgctatgcgggcttcccagaaagacttcgagaattctatgaatcaggtgaagctgttgaagaaggaccctggaaacgaggttaagctcaagctgtacgctctgtacaagcaggctaccgaaggtccctgtaacatgcccaaacctggggtgttcgatctaatcaataaagccaagtgggacgcttggaatgccctgggatcactccccaaggaggccgcccgacaaaattacgtggatcttgtgagcagcctaagcccaagcctcgaatcctcaagtcaggtagagccaggaacggaccggaagtccacgggattcgagaccctcgtagtcacatccgaagacggtatcacaaagatcatgttcaatcgccctaaaaaaaaaaatgccatcaacaccgaaatgtatcatgagatcatgcgggccctgaaggccgcctccaaagatgattcaatcatcactgttctgacagggaatggagactattattcatctggcaacgatttaacaaatttcactgatattcctcccggcggtgtggaggagaaggcaaagaacaatgccgtactgttgcgcgagtttgtgggctgtttcatagatttcccgaaacctctgattgcggtggtcaatggacccgcggtggggatcagtgtgactctcctggggctctttgacgccgtgtatgctagcgaccgagccactttccacacccctttctctcatctcggtcagtccccagaaggctgctcaagttacactttccccaagatcatgtctccagccaaggccactgagatgctcatctttggcaaaaaactgaccgcaggcgaggcctgcgctcagggactggtgacagaggtgttccccgatagtacttttcaaaaggaggtttggaccagacttaaagcgtttgccaagctccctcccaatgccttgcgtatctcaaaggaggttataagaaagcgcgagcgggagaagctgcacgcggtgaatgcagaggaatgtaacgtccttcagggtcggtggctctctgatgagtgtaccaatgccgtcgtgaatttcctttcccgcaagagcaaactctag

SEQ ID NO: 161913 - DNA, 684 bp, Artificial Sequence
  derived and/or modified sequence
atgtatcatgaaattatgcgagcactgaaggccgcttcaaaggatgactccatcattaccgttctgactggaaacggtgactattatagcagtgggaatgatttgaccaactttactgacattcctcccggtggcgtggaagaaaaagctaagaacaatgctgtgttactgcgggagttcgtgggttgcttcatcgacttcccgaagccactgattgccgtggtaaatggtcccgccgttgggatttcagtgactctcctgggtttgtttgatgccgtgtacgcatccgaccgggcaactttccacacaccattctcccacctcggtcagtcccctgagggctgcagcagttatactttcccaaaaattatgtctcctgccaaggccaccgaaatgctgattttcggaaaaaagctgactgccggggaagcctgcgcgcaggggttggtcaccgaagtattccccgattccaccttccagaaagaagtgtggacacggctgaaggcattcgcgaagctcccccccaacgccctccgcattagtaaagaggtgattagaaaaagggaacgagaaaagctccacgccgttaatgcagaggaatgcaacgtgctccagggaaggtggctatccgacgagtgcacaaacgcggttgtgaattttctctccagaaaatctaaactctag

SEQ ID NO: 161914 - DNA, 1095 bp, Artificial Sequence
  derived and/or modified sequence
atgaatagaacagccatgcgtgcttctcaaaaggattttgagaactctatgaatcaggtcaagctgcttaagaaggaccccggaaatgaggtcaagcttaaactatatgcgctctacaagcaggctaccgaaggtccgtgcaatatgccaaagccgggagtcttcgacctgataaataaagcaaaatgggacgcctggaatgcactaggatccctcccaaaagaagcggcccgccaaaattacgtagatttggtgtcgtctctctccccgagtttagagtcatccagccaggtggaaccaggtaccgatcgaaagtctaccggattcgagacacttgtcgtcacctctgaggatgggatcacaaagatcatgtttaataggcccaaaaaaaaaaatgcaatcaatacggagatgtaccacgagatcatgagagcgcttaaggcagcgtctaaggatgatagcattatcacggtcctgacgggaaacggcgactactattcgagtggaaatgacctcactaattttaccgatattccccccggcggggttgaggagaaggcaaaaaacaacgcagtgctactgcgcgagttcgttggctgttttatcgattttccaaagcccctgattgccgtggtgaatgggcctgccgtgggcatatcagttaccctgcttggactctttgacgccgtgtatgcgtccgatcgggccaccttccatactccgttttctcatctggggcagagccccgaggggtgttcttcctatactttcccaaaaataatgtcaccggcaaaagctacagagatgctcatctttggaaagaagctgactgccggcgaggcgtgcgctcagggcttagtcaccgaggtgttccctgactctacctttcaaaaggaggtgtggaccagactaaaggcatttgcgaaactgcctcctaacgcccttcgcatttccaaggaggtgatcaggaaacgcgagcgggaaaaacttcacgctgttaacgccgaggaatgtaacgtcctgcaggggcgctggcttagcgatgagtgcacaaacgccgtcgtcaacttcctgagccggaagagtaagctctag

SEQ ID NO: 161915 - DNA, 1095 bp, Artificial Sequence
  derived and/or modified sequence
atgaacagaacagccatgagggccagccagaaggactttgagaacagcatgaaccaggtgaagctgctgaagaaggaccctggaaatgaggtgaagctgaagctgtatgccctgtacaagcaggccacagagggcccctgcaacatgcccaagccaggagtgtttgacctgatcaacaaggccaagtgggatgcctggaatgccctgggcagcctgcccaaggaggccgcccggcagaactacgtggacctggtgagcagcctgagccccagcctggagagcagcagccaggtggagcccggcacagacaggaagagcactggatttgagaccctggtggtgaccagtgaagatggcatcaccaagatcatgttcaaccggcccaagaagaagaatgccatcaacacagagatgtaccacgagatcatgagggccctgaaggccgccagcaaggatgacagcatcatcaccgtgctgactggaaatggagactactacagcagtggaaatgacctgaccaacttcacagacatccccccaggcggcgtggaggagaaggccaagaacaatgctgtgctgctgcgggagtttgtgggctgcttcatcgacttccccaagcccctgattgctgtggtgaatggacctgctgtgggcatctctgtgaccctgctgggcctgtttgatgctgtgtatgccagtgaccgggccaccttccacacccccttcagccacctgggccagagccctgagggctgcagcagctacaccttccccaagatcatgagccctgccaaggccacagagatgctgatctttgggaagaagctgacagctggggaggcctgtgcccagggcctggtgacagaggtgtttcctgacagcaccttccagaaggaggtgtggacccggctgaaggcctttgccaagctgcccccaaatgccctgcgcatcagcaaggaggtgatcaggaagcgggagcgggagaagctgcatgctgtgaatgcagaagaatgtaatgtgctgcagggccgctggctgagtgatgaatgtaccaatgctgtggtgaacttcctgagcaggaagagcaagctgtag

SEQ ID NO: 161916 - DNA, 684 bp, Artificial Sequence
  derived and/or modified sequence
atgtaccacgagatcatgagggccctgaaggccgccagcaaggatgacagcatcatcaccgtgctgactggaaatggagactactacagcagtggaaatgacctgaccaacttcacagacatccccccaggaggagtggaggagaaggccaagaacaatgctgtgctgctgcgggagtttgtgggctgcttcatcgacttccccaagcccctgattgctgtggtgaatggacctgctgtgggcatctctgtgaccctgctgggcctgtttgatgctgtgtatgccagtgaccgggccaccttccacacccccttcagccacctgggccagagccctgagggctgcagcagctacaccttccccaagatcatgagccctgccaaggccacagagatgctgatctttgggaagaagctgacagctggggaggcctgtgcccagggcctggtgacagaggtgtttcctgacagcaccttccagaaggaggtgtggacccggctgaaggcctttgccaagctgcccccaaatgccctgcgcatcagcaaggaggtgatcaggaagcgggagcgggagaagctgcatgctgtgaatgctgaggagtgcaatgtgctgcagggccgctggctgagtgatgagtgcaccaatgctgtggtgaacttcctgagcaggaagagcaagctgtag

SEQ ID NO: 161917 - DNA, 1095 bp, Artificial Sequence
  derived and/or modified sequence
atgaaccggaccgccatgcgggccagccagaaggacttcgagaacagtatgaatcaagttaagcttcttaagaaggatccgggcaatgaagtgaagcttaagttgtatgctctatacaagcaggctaccgagggtccctgcaacatgcccaaacctggagtgttcgacctaatcaacaaagccaaatgggacgcatggaacgccctgggctctctgccaaaggaagccgccagacagaactacgttgatttggtctctagtctgtccccctcactcgaaagcagttcccaagtagagccgggtaccgaccgaaagagcaccggcttcgaaactttagtggtcactagcgaagacggtatcactaagatcatgttcaaccgccccaagaaaaaaaatgcaatcaacacagagatgtatcacgaaatcatgcgggctctgaaagctgccagcaaggatgacagcattatcacggtgttgacagggaacggcgactactacagttccggtaatgatctgactaattttacggatatccccccagggggggtcgaagagaaggccaagaacaacgcggtactgctccgagagtttgttggctgcttcattgacttccccaagcccctgatcgctgtggttaacggccccgcggtaggcatatcagtgacactcctgggattgtttgacgccgtatacgcctcggaccgggccacatttcatacacccttctcacatttaggacaatcccccgagggatgcagttcatatacattccctaagatcatgagtccagctaaggctacagaaatgctgatcttcggcaaaaagctcacagccggggaggcctgtgcccaaggactcgtgaccgaagtctttcccgactccacattccagaaggaggtttggactcggctaaaggcttttgctaagctcccaccaaacgcgttgagaatctctaaagaggtcattcggaagcgggaaagggagaaactccacgccgtgaatgcagaggagtgcaacgtattgcagggaaggtggctgtccgatgagtgtaccaacgccgttgtcaatttcctctcgcgaaagtctaagctgtag

SEQ ID NO: 161918 - DNA, 1095 bp, Artificial Sequence
  derived and/or modified sequence
atgaaccggaccgccatgcgggccagccagaaggacttcgagaactcaatgaaccaggtcaagctcctgaagaaggatcccggcaatgaggtgaaattgaagctttacgcgctgtataaacaggctacagaagggccttgtaacatgcccaaacccggtgtgtttgatctcattaacaaggccaagtgggatgcctggaacgcactggggtctttgcccaaagaagcagcgagacagaactacgtcgacttggtctcttcgttaagcccatcattggagtcttcatctcaggttgaacctgggactgataggaagtccaccgggttcgaaacacttgtggtgacttcggaggacggtatcacgaaaatcatgttcaatcggccaaagaaaaaaaatgccatcaacactgaaatgtaccacgaaatcatgcgggccctcaaagccgcttctaaagacgattccattataacggtgctgaccgggaacggggactactactcgagcggaaatgacctcaccaattttacagatatcccgcccggcggggtggaagagaaggctaagaacaacgcggtgctcctgagagaatttgtaggatgttttattgattttcccaagcctttgatcgctgtggtgaatggccctgctgtgggcatctcagtgaccctgctgggtctattcgatgctgtgtacgcatccgaccgcgccacatttcacacacccttttcccatctgggccagtcccccgagggatgtagctcctacacgttccccaaaatcatgagccccgccaaggctaccgagatgctgatttttggaaaaaagctgactgcgggtgaggcctgcgctcaaggcctggtgaccgaagtgtttcccgacagcacttttcagaaagaggtttggacacggctgaaggcctttgccaagctgcctcccaacgcactacgtatttctaaggaagtgatccggaagagggagagagagaaactgcacgcagtgaatgctgaagagtgtaatgtgttgcaaggtagatggctgagcgacgagtgtactaatgctgtggtcaattttctttctcgtaaatccaaactgtag

SEQ ID NO: 161919 - DNA, 684 bp, Artificial Sequence
  derived and/or modified sequence
atgtaccacgagatcatgcgggccctgaaggccgccagcaaggacgatagtatcattactgtacttacgggcaatggcgactactattctagcggtaacgatctcactaattttactgacatcccgcccgggggggtagaggaaaaagccaagaataatgcagtactgctccgcgaatttgttggttgtttcatagacttcccaaagcctctgattgctgttgtaaacgggcccgcagtgggcatcagtgtcactctgttggggctttttgacgcggtttacgcatccgatcgggcaacctttcacactccattcagtcatctggggcagtctcctgaaggctgttccagctatacgtttccaaagataatgtcaccagcgaaagcaaccgagatgctcatcttcggcaagaaactgaccgccggagaagcatgtgcgcagggactggtcaccgaggtgttccccgatagcacgtttcagaaggaggtgtggactaggctcaaagcctttgctaagctgccacctaatgctctgcggatatcaaaggaggtgatccgcaagagggagcgggaaaagctccatgcagtcaacgccgaggagtgtaacgtactccaagggcggtggctttccgatgaatgcactaacgcagtcgtgaatttcttgtcgcggaagtctaaactctag

SEQ ID NO: 161920 - DNA, 1095 bp, Artificial Sequence
  derived and/or modified sequence
atgaaccggaccgccatgcgggccagccagaaggacttcgagaactcaatgaaccaagttaaactcctgaagaaggacccagggaacgaggtcaagctgaagttgtacgcgctgtacaaacaggctactgaaggaccttgtaatatgcctaagccgggagttttcgaccttattaataaagccaagtgggacgcctggaacgccctgggttctctcccaaaggaggctgccagacagaattacgttgatctggtcagtagtttgagcccaagtctggagagcagtagtcaggttgaaccaggcaccgaccgcaaaagcactggcttcgaaacccttgtcgtaacctctgaagacggcataaccaaaatcatgttcaataggccgaaaaaaaagaacgcgattaacacagagatgtatcatgagatcatgagagcactgaaagctgcatcaaaagatgactcaataatcacagtgttgaccggaaacggggactactacagttcaggtaatgacctaactaacttcacagacattcctcctggtggggtggaggaaaaggccaaaaacaatgccgtgctgctgcgagagtttgtcggatgtttcattgactttcctaaaccattaatcgcagtagtgaacggtcctgccgtgggcattagtgtgaccctgctcggactctttgacgcagtatacgcatctgaccgggccacctttcatacgccgttctctcacttaggacagagccctgaaggttgtagctcttataccttccccaagattatgtcccccgcaaaggctacagaaatgcttattttcggcaagaaactcacggctggggaagcctgcgcacaggggcttgttaccgaagtgtttccagacagcacgttccaaaaggaggtttggacacggctgaaagccttcgcaaaacttccccccaatgcgctccgtatttccaaggaagtaattcgcaaacgcgaaagggaaaaactccacgctgtcaacgccgaggaatgcaatgttctgcagggacgttggttaagcgatgagtgcacgaacgccgttgtgaacttcctgtcgcgaaagagcaagctgtag

SEQ ID NO: 161921 - DNA, 1095 bp, Artificial Sequence
  derived and/or modified sequence
atgaacaggacagctatgagagcgtcgcagaaggactttgaaaactctatgaaccaggttaaactgttaaagaaagatcctggaaatgaagtgaaactgaagctatacgccctgtacaagcaggccacagagggcccttgtaatatgcccaagcccggagtgttcgatctgataaacaaggcaaagtgggacgcttggaatgctcttggctccctgcccaaggaagccgctagacagaattacgtggatctcgtttcctcactgtcgccatccctagagtcctcttcccaggtggagcctggaaccgataggaagtccacgggcttcgagacacttgtcgttacctcagaggacggaatcacaaaaatcatgtttaatcgtccaaagaaaaagaatgctattaacacggaaatgtatcatgagataatgcgggctctgaaggctgcctcaaaggatgatagtatcatcactgtgctcaccggcaatggagattactatagctctggaaatgatctgacaaacttcacggatattccccctggaggagtggaggaaaaagcaaaaaataatgccgtattgttacgcgaatttgtcggctgttttatcgacttccccaaaccgcttattgctgttgtaaacggtccagctgtcgggatatctgtgacattactaggcctgttcgacgcagtctacgcctcggatcgggctacatttcatactccatttagtcatctaggacaaagccctgagggttgctcttcttatacatttcccaagattatgtcccctgccaaggccacagagatgcttatattcggcaagaagctgacagcaggcgaggcttgcgcacagggcttggttaccgaggtgttcccagattctactttccagaaggaagtgtggacaagactgaaagcatttgctaaactgccaccaaacgccctgaggatctccaaggaggtcattcggaagcgcgagagggaaaaattgcacgccgtaaacgccgaagaatgtaacgtgcttcaaggcaggtggctatcggatgaatgtacgaacgcagtggtgaatttccttagccgaaaaagtaaactgtag

SEQ ID NO: 161922 - DNA, 1095 bp, Artificial Sequence
  derived and/or modified sequence
atgaacaggacggccatgagggcctcccagaaagatttcgaaaacagtatgaatcaggtgaagctcctcaagaaggaccccggaaatgaagtcaagctgaagctctacgccctgtacaagcaagcaaccgagggcccttgcaatatgcctaagcccggagtattcgatttgattaacaaagcaaagtgggacgcctggaatgccctcggcagcctgcccaaagaggcagccaggcagaactacgtggacctcgtgtccagcctgagcccctccctggaatcctcatcccaggtggaacctggcacagatcgaaagtccacaggctttgagactctggtcgtcacttcagaagacgggatcaccaaaattatgtttaatagaccaaaaaagaagaacgccattaatacagaaatgtatcacgagataatgcgcgctctcaaggctgccagcaaagatgatagcatcatcaccgtgcttacaggaaacggagactactactctagcggcaatgatctcacaaacttcacagacatccctccaggaggtgtggaagagaaggccaagaataacgccgtgctgctcagggaattcgttggctgcttcatagactttcccaaaccactcattgctgtcgtgaacggtcctgctgtaggaatctctgtgacactgctgggcctctttgatgccgtctacgcttctgacagagcaacattccacacacctttttcccacttgggccagtctccagaggggtgttcctcctacacattccctaaaatcatgagtcctgctaaggccacagaaatgctgatattcggtaagaagctcacagcgggtgaggcctgtgcacaggggctggtgactgaggtgttccctgactcgaccttccagaaagaggtatggacccgcctgaaggccttcgcaaaactcccacccaatgcactgagaatatccaaggaagtgataagaaaacgcgagcgggaaaaactgcatgccgtcaacgccgaagagtgcaatgtgctccaggggaggtggctttctgatgagtgcaccaatgctgttgttaactttctctcccgcaaatctaaattatag

SEQ ID NO: 161923 - DNA, 684 bp, Artificial Sequence
  derived and/or modified sequence
atgtaccacgaaatcatgcgggctttgaaggctgcctccaaagacgatagcatcataaccgtgctcacgggaaatggtgactattatagcagcggaaacgatctgaccaactttacagatatacctcccggaggcgtggaggagaaggcgaagaacaacgctgtactgttgcgggagtttgttggctgttttatagacttcccaaaacctctcatcgccgtggttaacggccctgcagttgggatcagcgtgacattgttaggactcttcgatgcggtatatgcaagcgatagggcaacatttcacactcccttctcccatctgggccagtctccagaaggatgttcgtcgtacacatttcctaagatcatgagccctgctaaggccaccgagatgctgatctttggaaagaagctgacagctggtgaggcctgcgcccaagggctggtcactgaggtcttcccagactcaacctttcagaaggaagtctggacccgattgaaagccttcgctaaactccctcccaacgccctcaggatctcaaaagaggtaattaggaagcgggagagagaaaaactccatgctgtgaacgcagaggaatgtaatgtgctccaaggtcgctggctcagtgacgaatgcaccaacgccgtcgtcaacttcctgtcaagaaagtctaagctgtag

SEQ ID NO: 161924 - DNA, 1095 bp, Artificial Sequence
  derived and/or modified sequence
atgaatcggacagcgatgcgagcaagtcagaaagactttgaaaattctatgaatcaagtgaagctccttaagaaggaccctggcaatgaagttaagctgaagctctacgctctgtataaacaggcgacagaagggccatgcaacatgcccaagccaggcgtgttcgatctaattaacaaggccaagtgggacgcctggaatgcattgggaagccttcccaaagaggccgctcgccagaactatgtcgatctcgtgtctagtctgagcccatcgttggaatctagttctcaggttgagcccggaaccgacagaaagtccactggcttcgagaccctcgtggtaacgtctgaggatgggatcacaaaaataatgttcaacagacccaagaaaaaaaacgccattaacaccgaaatgtaccacgagatcatgagggctctgaaggcagcaagtaaggatgactcaattattactgtcttaactggtaacggagattactacagctctggcaacgatctcacaaacttcaccgatataccccctgggggagttgaggagaaggccaagaataatgccgtcctactgcgcgaatttgtgggctgtttcatcgacttccctaaacccctgattgccgtagtcaacgggccagcagtgggcatttctgtcacattactgggcctgttcgacgcggtgtacgcctccgatcgcgcaacattccacacacccttttcacacctcggacaatcccccgagggatgtagctcctacacctttcccaaaatcatgagtccagcaaaagctacagaaatgctgatcttcggaaaaaagctgacagccggagaggcttgcgctcagggcttagttacagaagtgttcccagattcgacatttcagaaggaggtgtggacaaggctgaaggctttcgctaagcttccccctaacgccctacgcatctccaaggaagtgattagaaagagagagagagagaaactgcacgcagtcaatgctgaagagtgtaatgtgctgcaaggtagatggctgtctgacgaatgtactaatgccgtcgtgaactttctgtctcgcaagagcaaactctag

SEQ ID NO: 161925 - protein, 279 aa, Artificial Sequence
  derived and/or modified sequence
MSLFDLFRGFFGFPGPRSHRDPFFGGMTRDEDDDEEEEEEGGSWGRGNPRFHSPQHPPEEFGFGFSFSPGGGIRFHDNFGFDDLVRDFNSIFSDMGAWTLPSHPPELPGPESETPGERLREGQTLRDSMLKYPDSHQPRIFGGVLESDARSESPQPAPDWGSQRPFHRFDDVWPMDPHPRTREDNDLDSQVSQEGLGPVLQPQPKSYFKSISVTKITKPDGIVEERRTVVDSEGRTETTVTRHEADSSPRGDPESPRPPALDDAFSILDLFLGRWFRSR

SEQ ID NO: 161926 - protein, 287 aa, Artificial Sequence
  derived and/or modified sequence
MSLFDLFRGFFGFPGPRSHRDPFFGGMTRDEDDDEEEEEEGGSWGRGNPRFHSPQHPPEEFGFGFSFSPGGGIRFHDNFGFDDLVRDFNSIFSDMGAWTLPSHPPANTCHLSAELPGPESETPGERLREGQTLRDSMLKYPDSHQPRIFGGVLESDARSESPQPAPDWGSQRPFHRFDDVWPMDPHPRTREDNDLDSQVSQEGLGPVLQPQPKSYFKSISVTKITKPDGIVEERRTVVDSEGRTETTVTRHEADSSPRGDPESPRPPALDDAFSILDLFLGRWFRSR

SEQ ID NO: 161927 - DNA, 840 bp, Artificial Sequence
  derived and/or modified sequence
atgtccctgttcgacctgtttcggggattttttggtttccccggacccagatcccaccgagacccatttttcggggggatgacccgggatgaagatgacgatgaagaggaggaggaggaaggtggctcatgggggaggggcaatccaaggtttcactctccgcagcatcctcccgaagagttcggctttgggttttctttctctcctggcgggggaatcagatttcatgataattttggtttcgatgacctcgttcgggattttaacagcattttctccgacatgggagcatggacgctgccttcgcatcctccagagcttccaggacccgagtcagagacgcccggggaacggctcagagagggacagaccttaagagactcaatgcttaagtatcccgactcacaccagccaaggatatttgggggagtgttagaatcagatgcccggtcagagtctccacagccagcgccagactggggaagccagcggccgttccacagatttgacgacgtgtggccaatggacccacacccccggacacgagaggataatgacctggattcgcaagtgtcccaagagggtttgggccccgtcctgcagccgcagccaaaaagctactttaagtccatcagtgtcaccaagattaccaaaccagatggcattgtggaggagaggcgaactgttgtcgactcggaggggagaaccgaaacaacagtcacacgccacgaggcagactcatcccccagaggagatcctgagtcccctcggccccccgccctcgatgacgccttttccatcttggacctgttcctgggccggtggttccgaagccggtag

SEQ ID NO: 161928 - DNA, 864 bp, Artificial Sequence
  derived and/or modified sequence
atgagtctatttgatttgtttcgggggttttttggtttccctggtcctagaagccatagggatccctttttcggcggcatgaccagagatgaggacgacgacgaggaggaggaggaagagggcggctcttgggggagaggtaacccacgctttcactcacctcagcatccccccgaagagtttgggttcggcttttccttttccccaggtggtgggattcgctttcatgacaattttggattcgatgacctagtgcgggatttcaactccattttttcagacatgggagcatggaccttgccttcacatccgcccgccaatacatgccacctatccgctgagcttccgggccccgagtctgaaacacctggggagcgcttaagagaaggtcagacactgcgcgatagtatgctgaaataccccgacagccaccaacctcgaatcttcggaggtgtcttagaatcggatgcgcgtagtgagagcccccaaccagccccagactggggaagccagaggccattccacaggttcgatgatgtgtggcccatggaccctcatccacggacacgtgaagataatgatttggactcccaggtttcccaggagggactgggccccgtactgcagccacagcctaaatcttatttcaagtcaatctctgtcactaaaatcactaaacccgacggtatcgtcgaggagagacgaacggtggttgattccgaggggcgaactgagactactgttactcgccacgaagccgactcatctcctcgcggggaccccgaatcccctcgcccccccgctctggatgacgccttttcaattttggatctattcctgggcaggtggtttaggagccggtag

SEQ ID NO: 161929 - DNA, 1227 bp, Artificial Sequence
  derived and/or modified sequence
aaagataaagcctttcaaatttgaggaagaccttcggtcccgcctccatttcacgtccggcttaccgtcgtttacgacagtgtcaggatcgcgggcttgctttccggtagcgtgggctgacgcctcgctcaatttctcacagggctgcgcaggtttcccccgtctgcgaatggaccactggaggggttcaaaggttcgcgtcccagtacgggaatgagcctctttgatctcttccggggctttttcggctttcctggacctcggagccacagagatcccttttttggagggatgactcgagatgaagatgatgatgaggaagaagaagaagaagggggctcatggggccgtgggaacccaaggttccatagtcctcagcacccccctgaggaatttggcttcggcttcagcttcagcccaggaggagggatacgtttccacgataacttcggctttgatgacctagtacgagatttcaatagcatcttcagcgatatgggggcctggaccttgccttcccatcctcctgaacttccaggtcctgagtcagagacacctggtgagagactacgggagggacagacacttcgggactcaatgcttaagtatccagatagtcaccagcccaggatctttgggggggtcttggagagtgatgcaagaagtgaatccccccaaccagcaccagactggggctcccagaggccatttcataggtttgatgatgtatggcctatggacccccatcctagaaccagagaggacaatgatcttgattcccaggtttcccaggagggtcttggcccggttctacagccccagcccaaatcctatttcaagagcatctctgtgaccaagatcactaaaccagatgggatagtggaggagcgccggactgtggtggacagtgagggccggacagagactacagtaacccgacacgaagcagatagcagtcctaggggtgatccagaatcaccaagacctccagccctggatgatgccttttccatcctggacttattcctgggacgttggttccggtcccggtagccttgttaaccctcagaggccttcaagtcctttccacctctcacccattgcccaccattaataagcttagcttctcttgccacctcaggggcttggatatgtggaatagtgaactggggccatgtcagtttgtcactcacccaaactgaccaataaaacctttatttatgctaa

SEQ ID NO: 161930 - DNA, 1151 bp, Artificial Sequence
  derived and/or modified sequence
gctttccggtagcgtgggctgacgcctcgctcaatttctcacagggctgcgcaggtttcccccgtctgcgaatggaccactggaggggttcaaaggttcgcgtcccagtacgggaatgagcctctttgatctcttccggggctttttcggctttcctggacctcggagccacagagatcccttttttggagggatgactcgagatgaagatgatgatgaggaagaagaagaagaagggggctcatggggccgtgggaacccaaggttccatagtcctcagcacccccctgaggaatttggcttcggcttcagcttcagcccaggaggagggatacgtttccacgataacttcggctttgatgacctagtacgagatttcaatagcatcttcagcgatatgggggcctggaccttgccttcccatcctcctgcaaacacctgccacctttctgcagaacttccaggtcctgagtcagagacacctggtgagagactacgggagggacagacacttcgggactcaatgcttaagtatccagatagtcaccagcccaggatctttgggggggtcttggagagtgatgcaagaagtgaatccccccaaccagcaccagactggggctcccagaggccatttcataggtttgatgatgtatggcctatggacccccatcctagaaccagagaggacaatgatcttgattcccaggtttcccaggagggtcttggcccggttctacagccccagcccaaatcctatttcaagagcatctctgtgaccaagatcactaaaccagatgggatagtggaggagcgccggactgtggtggacagtgagggccggacagagactacagtaacccgacacgaagcagatagcagtcctaggggtgatccagaatcaccaagacctccagccctggatgatgccttttccatcctggacttattcctgggacgttggttccggtcccggtagccttgttaaccctcagaggccttcaagtcctttccacctctcacccattgcccaccattaataagcttagcttctcttgccacctcaggggcttggatatgtggaatagtgaactggggccatgtcagtttgtcactcacccaaactgaccaataaaacctttatttatgct

SEQ ID NO: 161931 - DNA, 840 bp, Artificial Sequence
  derived and/or modified sequence
atgagcctgtttgacctcttccggggcttcttcggcttccctggccccaggagccaccgggaccccttcttcggcggcatgaccagagatgaagatgatgatgaggaggaggaggaggagggcggctcctggggccggggcaacccccgcttccacagcccccagcaccccccagaggagtttggatttggcttctccttcagccctgggggcggcatccgcttccatgacaactttggatttgatgacctggtgcgggacttcaacagcatcttcagtgacatgggcgcctggaccctgcccagccaccccccagagctgcccggccctgagagcgagaccccaggagagcggctgcgggagggccagaccctgcgggacagcatgctgaagtacccagacagccaccagccccgcatctttggaggagtgctggagagtgatgcccggtctgagagcccccagcctgccccagactggggcagccagaggcccttccacagatttgatgatgtgtggcccatggacccccaccccaggaccagagaagataatgacctggacagccaggtgtcccaggagggcctgggccctgtgctgcagccccagcccaagagctacttcaagagcatctctgtgaccaagatcaccaagccagatggcatcgtggaggagaggagaacagtggtggacagcgagggccgcacagagaccaccgtgaccaggcatgaagctgacagcagccccaggggggaccctgagagcccccggcccccagccctggatgatgccttcagcatcctggacctcttcctgggccgctggttccgcagcaggtag

SEQ ID NO: 161932 - DNA, 864 bp, Artificial Sequence
  derived and/or modified sequence
atgagcctgtttgacctcttccggggcttcttcggcttccctggccccaggagccaccgggaccccttcttcggcggcatgaccagagatgaagatgatgatgaggaggaggaggaggagggcggctcctggggccggggcaacccccgcttccacagcccccagcaccccccagaggagtttggatttggcttctccttcagccctgggggcggcatccgcttccatgacaactttggatttgatgacctggtgcgggacttcaacagcatcttcagtgacatgggcgcctggaccctgcccagccaccccccagccaacacctgccacctgtctgctgagctgcccggccctgagagcgagaccccaggagagcggctgcgggagggccagaccctgcgggacagcatgctgaagtacccagacagccaccagccccgcatctttggaggagtgctggagagtgatgcccggtctgagagcccccagcctgccccagactggggcagccagaggcccttccacagatttgatgatgtgtggcccatggacccccaccccaggaccagagaagataatgacctggacagccaggtgtcccaggagggcctgggccctgtgctgcagccccagcccaagagctacttcaagagcatctctgtgaccaagatcaccaagccagatggcatcgtggaggagaggagaacagtggtggacagcgagggccgcacagagaccaccgtgaccaggcatgaagctgacagcagccccaggggggaccctgagagcccccggcccccagccctggatgatgccttcagcatcctggacctcttcctgggccgctggttccgcagcaggtag

SEQ ID NO: 161933 - DNA, 840 bp, Artificial Sequence
  derived and/or modified sequence
atgagcctgttcgacctgttccggggcttcttcggcttccccggccctcggagtcaccgggatcccttctttggagggatgacccgcgatgaggatgacgacgaagaggaggaggaggagggcgggagctggggaaggggcaacccgaggttccactcgccacagcatccccctgaggagtttggcttcggattctcattctccccggggggtgggataagatttcatgacaattttggatttgacgacctggtccgtgattttaatagtatcttcagcgacatgggcgcttggacattgccatcacatccaccggagctacctggaccagagtccgagacacccggcgaacgcctgagggaaggtcagacgttaagggactctatgctgaagtatccagattctcaccagccaagaatctttggtggtgtgcttgagtccgatgcaaggtctgagtcgccgcagcctgctccagattggggcagccagaggcccttccaccgcttcgacgatgtgtggcccatggacccccacccccgcaccagggaggacaacgacctggactctcaggtttcccaagagggcctgggacctgtgctccaacctcagccaaaatcctatttcaagtctatatcggtcacaaagatcacaaagcccgacggcattgtagaggagcggaggactgtagtggactccgagggccggactgaaactactgtgactagacacgaggctgatagcagtcccagaggtgacccagagagtcctcggccccccgcactcgatgatgcgttcagtatactggatctcttcctgggccgctggtttagatcccgatag

SEQ ID NO: 161934 - DNA, 864 bp, Artificial Sequence
  derived and/or modified sequence
atgagcctgttcgacctgttccggggcttcttcggcttccccggcccccgctcacaccgggaccccttctttggcggcatgacaagggacgaggatgacgacgaagaagaggaggaggaaggcgggagctggggacgcggtaatccaaggttccacagcccccaacaccctccagaggaattcgggttcggattttctttttctccaggtggcggcattaggttccatgataacttcgggtttgatgatctggtaagggattttaactctatcttctctgatatgggggcctggacactccccagccatcctcccgccaatacttgtcatctgtccgcggaactgcctggccccgaatctgaaacccccggggagagacttcgggaaggccagacattgagagatagtatgcttaaataccctgattcccatcagccaagaattttcgggggtgtgcttgaatccgatgcgcgatccgagagtccccagccggctccagattggggctcccagcgccccttccacaggtttgatgatgtgtggccaatggatccacacccaagaacccgggaagacaacgacttggatagccaggtgtcgcaagagggcctgggcccagtccttcagccccagcctaaatcatactttaaaagcatcagtgtgacaaagatcacaaaaccagacgggatagttgaagagcgcaggactgtagttgactccgaagggcgtaccgagaccactgtgacccgccacgaggccgactcttctcccaggggggatcccgagagtcccaggcctccggcactggatgacgctttctcaattcttgatctcttccttggccgctggttcaggagccgctag

SEQ ID NO: 161935 - DNA, 840 bp, Artificial Sequence
  derived and/or modified sequence
atgtcactatttgacctgtttcgcggattcttcggcttcccgggtccaaggtcacaccgcgacccattctttgggggaatgactagagacgaggatgatgacgaagaagaggaagaggaggggggtagttggggacggggaaacccaaggtttcacagccctcaacacccacccgaggagtttgggtttggcttcagtttttcccctggtggcggaattaggttccacgataattttggcttcgacgatctggtgcgcgattttaactcaattttcagcgacatgggtgcctggactctcccttcccaccctccggagctccccggacctgagtcagaaacaccaggcgaacgcttgagggagggacaaacccttcgggattccatgcttaaatacccagattctcaccaacccagaatctttggaggtgttttagagtccgatgcgagatcagaatccccacagccggctcctgactggggttcccagagaccttttcaccggtttgatgacgtttggccaatggatcctcatcctcgaactcgggaggacaacgatctggacagccaagtatctcaggagggcctgggccctgtgctgcaaccccagcccaagtcgtattttaaaagtatctcagtcaccaaaattaccaagccagatggcatagtggaagagagacggacagtagtcgatagcgagggcagaacggagactactgtaactaggcacgaagccgacagttcccctaggggcgaccctgaatcgcctaggcccccagcccttgacgatgcattttccatactggatctgttcctgggacgatggttccgtagccgctag

SEQ ID NO: 161936 - DNA, 864 bp, Artificial Sequence
  derived and/or modified sequence
atgagtctgttcgacctctttcggggattctttgggttcccgggacctaggtctcatcgcgacccctttttcggcggaatgacaagagatgaggacgacgatgaggaagaagaggaggaagggggatcctggggcaggggaaacccacgctttcattctcctcagcacccaccagaggagtttggattcggattttcctttagccccggtgggggtattcggttccatgataactttgggtttgatgatctagtcagggacttcaattcaattttcagcgacatgggggcatggacgctgccatcccatcctccagctaatacctgtcacctctcggcggagctgcctgggccagaatcagagacccccggagaacggctccgggagggtcagacgctccgggactccatgcttaagtaccccgacagccaccagccgagaatatttgggggtgtcctggagagcgacgcacgctccgagtccccacaacctgcacctgattggggcagtcagagaccctttcatcgattcgatgacgtttggccaatggaccctcatccgagaactcgggaggacaatgatctcgacagtcaggtctctcaagaaggtttagggcctgtcctccagccacaacccaaaagttactttaagtccatttccgtcaccaagatcactaagcccgacgggatcgttgaggagcgaagaacagtggttgattcggaaggacgcacggagacaacagtgacacgccacgaagccgatagctcacctaggggtgaccctgagagtcctcgcccaccagctctcgatgatgcctttagtatcctggatttatttctgggccgatggttccggagtcgttag

SEQ ID NO: 161937 - DNA, 840 bp, Artificial Sequence
  derived and/or modified sequence
atgagcctgttcgacctgttcagaggcttcttcggcttccccggccccagaagccacagagaccccttcttcggcggcatgaccagagacgaggacgacgacgaggaggaggaggaggagggcggcagctggggcagaggcaaccccagattccacagcccccagcacccccccgaggagttcggcttcggcttcagcttcagccccggcggcggcatcagattccacgacaacttcggcttcgacgacctggtgagagacttcaacagcatcttcagcgacatgggcgcctggaccctgcccagccacccccccgagctgcccggccccgagagcgagacccccggcgagagactgagagagggccagaccctgagagacagcatgctgaagtaccccgacagccaccagcccagaatcttcggcggcgtgctggagagcgacgccagaagcgagagcccccagcccgcccccgactggggcagccagagacccttccacagattcgacgacgtgtggcccatggacccccaccccagaaccagagaggacaacgacctggacagccaggtgagccaggagggcctgggccccgtgctgcagccccagcccaagagctacttcaagagcatcagcgtgaccaagatcaccaagcccgacggcatcgtggaggagagaagaaccgtggtggacagcgagggcagaaccgagaccaccgtgaccagacacgaggccgacagcagccccagaggcgaccccgagagccccagaccccccgccctggacgacgccttcagcatcctggacctgttcctgggcagatggttcagaagcagatag

SEQ ID NO: 161938 - DNA, 864 bp, Artificial Sequence
  derived and/or modified sequence
atgagcctgttcgacctgttcagaggcttcttcggcttccccggccccagaagccacagagaccccttcttcggcggcatgaccagagacgaggacgacgacgaggaggaggaggaggagggcggcagctggggcagaggcaaccccagattccacagcccccagcacccccccgaggagttcggcttcggcttcagcttcagccccggcggcggcatcagattccacgacaacttcggcttcgacgacctggtgagagacttcaacagcatcttcagcgacatgggcgcctggaccctgcccagccacccccccgccaacacctgccacctgagcgccgagctgcccggccccgagagcgagacccccggcgagagactgagagagggccagaccctgagagacagcatgctgaagtaccccgacagccaccagcccagaatcttcggcggcgtgctggagagcgacgccagaagcgagagcccccagcccgcccccgactggggcagccagagacccttccacagattcgacgacgtgtggcccatggacccccaccccagaaccagagaggacaacgacctggacagccaggtgagccaggagggcctgggccccgtgctgcagccccagcccaagagctacttcaagagcatcagcgtgaccaagatcaccaagcccgacggcatcgtggaggagagaagaaccgtggtggacagcgagggcagaaccgagaccaccgtgaccagacacgaggccgacagcagccccagaggcgaccccgagagccccagaccccccgccctggacgacgccttcagcatcctggacctgttcctgggcagatggttcagaagcagatag

SEQ ID NO: 161939 - protein, 215 aa, Artificial Sequence
  derived and/or modified sequence
MGSPRSALSCLLLHLLVLCLQAQVTVQSSPNFTQHVREQSLVTDQLSRRLIRTYQLYSRTSGKHVQVLANKRINAMAEDGDPFAKLIVETDTFGSRVRVRGAETGLYICMNKKGKLIAKSNGKGKDCVFTEIVLENNYTALQNAKYEGWYMAFTRKGRPRKGSKTRQHQREVHFMKRLPRGHHTTEQSLRFEFLNYPPFTRSLRGSQRTWAPEPR

SEQ ID NO: 161940 - protein, 140 aa, Artificial Sequence
  derived and/or modified sequence
MAEDGDPFAKLIVETDTFGSRVRVRGAETGLYICMNKKGKLIAKSNGKGKDCVFTEIVLENNYTALQNAKYEGWYMAFTRKGRPRKGSKTRQHQREVHFMKRLPRGHHTTEQSLRFEFLNYPPFTRSLRGSQRTWAPEPR

SEQ ID NO: 161941 - DNA, 648 bp, Artificial Sequence
  derived and/or modified sequence
atgggcagccccagaagcgccctgagctgcctgctgctgcacctgctggtgctgtgcctgcaggcccaggtgaccgtgcagagcagccccaacttcacccagcacgtgagagagcagagcctggtgaccgaccagctgagcagaagactgatcagaacctaccagctgtacagcagaaccagcggcaagcacgtgcaggtgctggccaacaagagaatcaacgccatggccgaggacggcgaccccttcgccaagctgatcgtggagaccgacaccttcggcagcagagtgagagtgagaggcgccgagaccggcctgtacatctgcatgaacaagaagggcaagctgatcgccaagagcaacggcaagggcaaggactgcgtgttcaccgagatcgtgctggagaacaactacaccgccctgcagaacgccaagtacgagggctggtacatggccttcaccagaaagggcagacccagaaagggcagcaagaccagacagcaccagagagaggtgcacttcatgaagagactgcccagaggccaccacaccaccgagcagagcctgagattcgagttcctgaactacccccccttcaccagaagcctgagaggcagccagagaacctgggcccccgagcccagatag

SEQ ID NO: 161942 - DNA, 648 bp, Artificial Sequence
  derived and/or modified sequence
atggggtccccccggtccgctttgagctgtctgttgttacatctcctggtcctctgcctgcaagcacaggtgactgtacagtcctccccgaactttacgcagcacgtgcgggagcagtccctcgtgacggatcagctgtcaagacggctcataaggacctaccagttgtattcacgaacctcaggcaagcatgtgcaagtcctggccaataagcgaataaatgcaatggccgaagatggagacccttttgccaaacttatcgtggagacagatacttttggatctcgggtaagggtgagaggagctgagaccggcttgtatatctgcatgaataagaagggcaagctcatcgcaaagtcaaatggcaagggaaaggactgtgtcttcaccgaaatcgtactggaaaataactataccgcgttgcagaatgccaagtatgaggggtggtacatggcgttcacacgcaagggacgacctcggaaaggcagcaaaacacgccaacaccaacgagaggtccactttatgaagaggcttccaagaggccaccatactactgaacaaagcctacgctttgaatttcttaactacccgccattcacccgatctctccggggttcccagcggacttgggcacctgagcctagatag

SEQ ID NO: 161943 - DNA, 648 bp, Artificial Sequence
  derived and/or modified sequence
atgggcagccccaggtctgccctgagctgcctgctgctgcacctgctggtgctgtgcctgcaggcccaggtgacagtgcagagcagccccaacttcacccagcacgtgcgggagcagagcctggtgacagaccagctgagccggcggctcatccgcacctaccagctgtacagcaggaccagcggcaagcacgtgcaggtgctggccaacaagaggatcaatgccatggccgaggatggagacccctttgccaagctgattgtggagacagacaccttcggcagccgggtgcgggtgagaggagctgagaccggcctgtacatctgcatgaacaagaagggcaagctgattgccaagagcaatggcaagggcaaggactgtgtgttcacagagatcgtgctggagaacaactacacagccctgcagaatgccaagtatgagggctggtacatggccttcaccaggaagggccggcccaggaagggcagcaagacccggcagcaccagcgggaggtgcacttcatgaagaggctgccccggggccaccacaccacagagcagagcctgcgctttgagttcctgaactacccacccttcaccaggagcctgcggggcagccagaggacctgggcccctgagcccaggtag

SEQ ID NO: 161944 - DNA, 648 bp, Artificial Sequence
  derived and/or modified sequence
atgggcagcccccggagcgccctgagctgcctgctgctgcacctgctcgtgctgtgcctccaggcgcaggtcacagtgcagagcagtccaaatttcacccagcacgtgagggagcagtctttagtcactgaccagttaagccgacggctcataaggacttatcaactgtacagccgaacgagcgggaagcacgtgcaagtgctagctaataaaagaataaatgccatggcagaggacggagatcccttcgcgaaattgatcgttgagactgacacttttggaagtcgcgtgcgagtgcggggagcagagaccggactctacatttgcatgaacaagaaggggaagctcattgccaagtccaacggcaaaggtaaggattgtgtctttactgagatagtgctggaaaataattatacagcccttcaaaacgccaagtacgaaggctggtatatggctttcacgcgaaaaggccgcccacggaaggggagtaagaccaggcaacaccagcgggaggtacattttatgaagaggctgccgagaggccaccacaccacggaacagagtcttcggttcgaatttcttaattatccaccctttacgcgctcacttcgcggttcccaaaggacgtgggctcctgagccccggtag

SEQ ID NO: 161945 - DNA, 648 bp, Artificial Sequence
  derived and/or modified sequence
atggggtcacccaggagtgccttaagctgcctgctcttgcacctactggttctttgcctccaggcccaggttacagtacagtcttcccccaattttactcagcacgtacgcgaacagtctctcgtgactgatcaactgtcgcgccgtctgattcgcacctaccaactttatagccggacaagcggaaaacatgtgcaggtcttggccaacaagagaatcaatgcaatggctgaggacggcgatccattcgcgaaactcatcgtggaaactgataccttcggatccagagtgcgagtgcgcggtgccgaaacaggattatatatctgcatgaacaaaaagggaaagttgattgccaagagcaatgggaagggaaaggattgtgtctttaccgagatcgtgctggagaacaactatactgctcttcaaaatgctaaatacgagggctggtacatggcattcactagaaaaggaagaccgcgaaagggctccaaaacccgacagcaccagcgagaggtacacttcatgaagagattgcccagagggcaccatacaacagagcaaagtttacggtttgagttcctgaattacccacctttcactcggagcttgcggggtagccagcgtacctgggcgccagagccaagatag

SEQ ID NO: 161946 - DNA, 823 bp, Artificial Sequence
  derived and/or modified sequence
gcggcgcggcgagcacgacgttccacgggacccgcggagccgcgtcgtgatcgccgccggcctcccgcacccgcaccctctccgctcgcgccctgctcagcgcgtcctcccgcggcggcccgcgggacggcgtgacccgccgggctctcggtgccccggggccgcgcgccatgggcagcccccgctccgcgctgagctgcctgctgttgcacttgctggtcctctgcctccaagcccaggtaactgttcagtcctcacctaattttacacagcatgtgagggagcagagcctggtgacggatcagctcagccgccgcctcatccggacctaccaactctacagccgcaccagcgggaagcacgtgcaggtcctggccaacaagcgcatcaacgccatggcagaggacggcgaccccttcgcaaagctcatcgtggagacggacacctttggaagcagagttcgagtccgaggagccgagacgggcctctacatctgcatgaacaagaaggggaagctgatcgccaagagcaacggcaaaggcaaggactgcgtcttcacggagattgtgctggagaacaactacacagcgctgcagaatgccaagtacgagggctggtacatggccttcacccgcaagggccggccccgcaagggctccaagacgcggcagcaccagcgtgaggtccacttcatgaagcggctgccccggggccaccacaccaccgagcagagcctgcgcttcgagttcctcaactacccgcccttcacgcgcagcctgcgcggcagccagaggacttgggcccccgagccccgataggtgct

SEQ ID NO: 161947 - DNA, 949 bp, Artificial Sequence
  derived and/or modified sequence
acccgcaccctctccgctcgcgccctgctcagcgcgtcctcccgcggcggcccgcgggacggcgtgacccgccgggctctcggtgccccggggccgcgcgccatgggcagcccccgctccgcgctgagctgcctgctgttgcacttgctggtcctctgcctccaagcccaggtaactgttcagtcctcacctaattttacacagcatgtgagggagcagagcctggtgacggatcagctcagccgccgcctcatccggacctaccaactctacagccgcaccagcgggaagcacgtgcaggtcctggccaacaagcgcatcaacgccatggcagaggacggcgaccccttcgcaaagctcatcgtggagacggacacctttggaagcagagttcgagtccgaggagccgagacgggcctctacatctgcatgaacaagaaggggaagctgatcgccaagagcaacggcaaaggcaaggactgcgtcttcacggagattgtgctggagaacaactacacagcgctgcagaatgccaagtacgagggctggtacatggccttcacccgcaagggccggccccgcaagggctccaagacgcggcagcaccagcgtgaggtccacttcatgaagcggctgccccggggccaccacaccaccgagcagagcctgcgcttcgagttcctcaactacccgcccttcacgcgcagcctgcgcggcagccagaggacttgggcccccgagccccgataggtgctgcctggccctccccacaatgccagaccgcagagaggctcatcctgtagggcacccaaaactcaagcaagatgagctgtgcgctgctctgcaggctggggaggtgctgggggagccctgggttccggttgttgatattgtttgctgttgggtttttgctgtttttttttttttttttttttttaaaacaaaagag

SEQ ID NO: 161948 - protein, 123 aa, Artificial Sequence [sequence omitted]

SEQ ID NO: 161949 - protein, 261 aa, Artificial Sequence
  derived and/or modified sequence
MGHEQNQGAALLQMLPLLWLLPHSWAVPEAPTPMWPDDLQNHTFLHTVYCQDGSPSVGLSEAYDEDQLFFFDFSQNTRVPRLPEFADWAQEQGDAPAILFDKEFCEWMIQQIGPKLDGKIPVSRGFPIAEVFTLKPLEFGKPNTLVCFVSNLFPPMLTVNWQHHSVPVEGFGPTFVSAVDGLSFQAFSYLNFTPEPSDIFSCIVTHEIDRYTAIAYWVPRNALPSDLLENVLCGVAFGLGVLGIIVGIVLIIYFRKPCSGD

SEQ ID NO: 161950 - protein, 227 aa, Artificial Sequence
  derived and/or modified sequence
MGHEQNQGAALLQMLPLLWLLPHSWAVPEAPTPMWPDDLQNHTFLHTVYCQDGSPSVGLSEAYDEDQLFFFDFSQNTRVPRLPEFADWAQEQGDAPAILFDKEFCEWMIQQIGPKLDGKIPVSRVNWQHHSVPVEGFGPTFVSAVDGLSFQAFSYLNFTPEPSDIFSCIVTHEIDRYTAIAYWVPRNALPSDLLENVLCGVAFGLGVLGIIVGIVLIIYFRKPCSGD

SEQ ID NO: 161951 - protein, 166 aa, Artificial Sequence
  derived and/or modified sequence
MGHEQNQGAALLQMLPLLWLLPHSWAVPEGFPIAEVFTLKPLEFGKPNTLVCFVSNLFPPMLTVNWQHHSVPVEGFGPTFVSAVDGLSFQAFSYLNFTPEPSDIFSCIVTHEIDRYTAIAYWVPRNALPSDLLENVLCGVAFGLGVLGIIVGIVLIIYFRKPCSGD

SEQ ID NO: 161952 - protein, 241 aa, Artificial Sequence
  derived and/or modified sequence
MKWLKKCLDTAPTPMWPDDLQNHTFLHTVYCQDGSPSVGLSEAYDEDQLFFFDFSQNTRVPRLPEFADWAQEQGDAPAILFDKEFCEWMIQQIGPKLDGKIPVSRGFPIAEVFTLKPLEFGKPNTLVCFVSNLFPPMLTVNWQHHSVPVEGFGPTFVSAVDGLSFQAFSYLNFTPEPSDIFSCIVTHEIDRYTAIAYWVPRNALPSDLLENVLCGVAFGLGVLGIIVGIVLIIYFRKPCSG

SEQ ID NO: 161953 - protein, 169 aa, Artificial Sequence
  derived and/or modified sequence
MWPDDLQNHTFLHTVYCQDGSPSVGLSEAYDEDQLFFFDFSQNTRVPRLPEFADWAQEQGDAPAILFDKEFCEWMIQQIGPKLDGKIPVSRGFPIAEVFTLKPLEFGKPNTLVCFVSNLFPPMLTVNWQHHSVPVEGFGPTFVSAVDGLSFQAFSYLNFTPEPSDIFSC

SEQ ID NO: 161954 - protein, 290 aa, Artificial Sequence
  derived and/or modified sequence
VSCWLSDSCQELQRRGIILCSYGVTSPIAVFGRPGRLRNRRHFERRLVPMKWLKKCLDTAPTPMWPDDLQNHTFLHTVYCQDGSPSVGLSEAYDEDQLFFFDFSQNTRVPRLPEFADWAQEQGDAPAILFDKEFCEWMIQQIGPKLDGKIPVSRGFPIAEVFTLKPLEFGKPNTLVCFVSNLFPPMLTVNWQHHSVPVEGFGPTFVSAVDGLSFQAFSYLNFTPEPSDIFSCIVTHEIDRYTAIAYWVPRNALPSDLLENVLCGVAFGLGVLGIIVGIVLIIYFRKPCSG

SEQ ID NO: 161955 - protein, 227 aa, Artificial Sequence
  derived and/or modified sequence
MGHEQNQGAALLQMLPLLWLLPHSWAVPEAPTPMWPDDLQNHTFLHTVYCQDGSPSVGLSEAYDEDQLFFFDFSQNTRVPRLPEFADWAQEQGDAPAILFDKEFCEWMIQQIGPKLDGKIPVSRVNWQHHSIPVEGFGPTFVSAVDGLSFQAFSYLNFTPEPSDIFSCIVTHEIDRYTAIAYWVPRNALPSDLLENVLCGVAFGLGVLGIIVGIVLIIYFRKPCSGD

SEQ ID NO: 161956 - protein, 261 aa, Artificial Sequence
  derived and/or modified sequence
MGHEQNQGAALLQMLPLLWLLPHSWAVPEAPTPMWPDDLQNHTFLHTVYCQDGSPSVGLSEAYDEDQLFFFDFSQNTRVPRLPEFADWAQEQGDAPAILFDKEFCEWMIQQIGPKLDGKIPVSRGFPIAEVFTLKPLEFGKPNTLVCFVSNLFPPMLTVNWQHHSIPVEGFGPTFVSAVDGLSFQAFSYLNFTPEPSDIFSCIVTHEIDRYTAIAYWVPRNALPSDLLENVLCGVAFGLGVLGIIVGIVLIIYFRKPCSGD

SEQ ID NO: 161957 - protein, 169 aa, Artificial Sequence
  derived and/or modified sequence
MWPDDLQNHTFLHTVYCQDGSPSVGLSEAYDEDQLFFFDFSQNTRVPRLPEFADWAQEQGDAPAILFDKEFCEWMIQQIGPKLDGKIPVSRGFPIAEVFTLKPLEFGKPNTLVCFVSNLFPPMLTVNWQHHSIPVEGFGPTFVSAVDGLSFQAFSYLNFTPEPSDIFSC

SEQ ID NO: 161958 - protein, 166 aa, Artificial Sequence
  derived and/or modified sequence
MGHEQNQGAALLQMLPLLWLLPHSWAVPEGFPIAEVFTLKPLEFGKPNTLVCFVSNLFPPMLTVNWQHHSIPVEGFGPTFVSAVDGLSFQAFSYLNFTPEPSDIFSCIVTHEIDRYTAIAYWVPRNALPSDLLENVLCGVAFGLGVLGIIVGIVLIIYFRKPCSGD

SEQ ID NO: 161959 - protein, 290 aa, Artificial Sequence
  derived and/or modified sequence
VSCWLSDSCQELQRRGIILCSYGVTSPIAVFGRPGRLRNRRHFERRLVPMKWLKKCLDTAPTPMWPDDLQNHTFLHTVYCQDGSPSVGLSEAYDEDQLFFFDFSQNTRVPRLPEFADWAQEQGDAPAILFDKEFCEWMIQQIGPKLDGKIPVSRGFPIAEVFTLKPLEFGKPNTLVCFVSNLFPPMLTVNWQHHSIPVEGFGPTFVSAVDGLSFQAFSYLNFTPEPSDIFSCIVTHEIDRYTAIAYWVPRNALPSDLLENVLCGVAFGLGVLGIIVGIVLIIYFRKPCSG

SEQ ID NO: 161960 - DNA, 372 bp, Artificial Sequence
  derived and/or modified sequence
atgggccacgagcagatgctgcccctgctgtggctgctgccccacagctgggccgtgcccgaggcccccacccccatgtggcccgacgacctgcagaaccacaccttcctgcacaccgtgtactgccaggacggcagccccagcgtgggcctgagcgaggcctacgacgaggaccagctgttcttcttcgacttcagccagaacaccagagtgcccagactgcccgagttcgccgactgggcccaggagcagggcgacgcccccgccatcctgttcgacaaggagttctgcgagtggatgatccagcagatcggccccaagctggacggcaagatccccgtgagcagaggccaggagttcagcggcgagtag

SEQ ID NO: 161961 - DNA, 786 bp, Artificial Sequence
  derived and/or modified sequence
atgggccacgagcagaaccagggcgccgccctgctgcagatgctgcccctgctgtggctgctgccccacagctgggccgtgcccgaggcccccacccccatgtggcccgacgacctgcagaaccacaccttcctgcacaccgtgtactgccaggacggcagccccagcgtgggcctgagcgaggcctacgacgaggaccagctgttcttcttcgacttcagccagaacaccagagtgcccagactgcccgagttcgccgactgggcccaggagcagggcgacgcccccgccatcctgttcgacaaggagttctgcgagtggatgatccagcagatcggccccaagctggacggcaagatccccgtgagcagaggcttccccatcgccgaggtgttcaccctgaagcccctggagttcggcaagcccaacaccctggtgtgcttcgtgagcaacctgttcccccccatgctgaccgtgaactggcagcaccacagcgtgcccgtggagggcttcggccccaccttcgtgagcgccgtggacggcctgagcttccaggccttcagctacctgaacttcacccccgagcccagcgacatcttcagctgcatcgtgacccacgagatcgacagatacaccgccatcgcctactgggtgcccagaaacgccctgcccagcgacctgctggagaacgtgctgtgcggcgtggccttcggcctgggcgtgctgggcatcatcgtgggcatcgtgctgatcatctacttcagaaagccctgcagcggcgactag

SEQ ID NO: 161962 - DNA, 684 bp, Artificial Sequence
  derived and/or modified sequence
atgggccacgagcagaaccagggcgccgccctgctgcagatgctgcccctgctgtggctgctgccccacagctgggccgtgcccgaggcccccacccccatgtggcccgacgacctgcagaaccacaccttcctgcacaccgtgtactgccaggacggcagccccagcgtgggcctgagcgaggcctacgacgaggaccagctgttcttcttcgacttcagccagaacaccagagtgcccagactgcccgagttcgccgactgggcccaggagcagggcgacgcccccgccatcctgttcgacaaggagttctgcgagtggatgatccagcagatcggccccaagctggacggcaagatccccgtgagcagagtgaactggcagcaccacagcgtgcccgtggagggcttcggccccaccttcgtgagcgccgtggacggcctgagcttccaggccttcagctacctgaacttcacccccgagcccagcgacatcttcagctgcatcgtgacccacgagatcgacagatacaccgccatcgcctactgggtgcccagaaacgccctgcccagcgacctgctggagaacgtgctgtgcggcgtggccttcggcctgggcgtgctgggcatcatcgtgggcatcgtgctgatcatctacttcagaaagccctgcagcggcgactag

SEQ ID NO: 161963 - DNA, 501 bp, Artificial Sequence
  derived and/or modified sequence
atgggccacgagcagaaccagggcgccgccctgctgcagatgctgcccctgctgtggctgctgccccacagctgggccgtgcccgagggcttccccatcgccgaggtgttcaccctgaagcccctggagttcggcaagcccaacaccctggtgtgcttcgtgagcaacctgttcccccccatgctgaccgtgaactggcagcaccacagcgtgcccgtggagggcttcggccccaccttcgtgagcgccgtggacggcctgagcttccaggccttcagctacctgaacttcacccccgagcccagcgacatcttcagctgcatcgtgacccacgagatcgacagatacaccgccatcgcctactgggtgcccagaaacgccctgcccagcgacctgctggagaacgtgctgtgcggcgtggccttcggcctgggcgtgctgggcatcatcgtgggcatcgtgctgatcatctacttcagaaagccctgcagcggcgactag

SEQ ID NO: 161964 - DNA, 726 bp, Artificial Sequence
  derived and/or modified sequence
atgaagtggctgaagaagtgcctggacaccgcccccacccccatgtggcccgacgacctgcagaaccacaccttcctgcacaccgtgtactgccaggacggcagccccagcgtgggcctgagcgaggcctacgacgaggaccagctgttcttcttcgacttcagccagaacaccagagtgcccagactgcccgagttcgccgactgggcccaggagcagggcgacgcccccgccatcctgttcgacaaggagttctgcgagtggatgatccagcagatcggccccaagctggacggcaagatccccgtgagcagaggcttccccatcgccgaggtgttcaccctgaagcccctggagttcggcaagcccaacaccctggtgtgcttcgtgagcaacctgttcccccccatgctgaccgtgaactggcagcaccacagcgtgcccgtggagggcttcggccccaccttcgtgagcgccgtggacggcctgagcttccaggccttcagctacctgaacttcacccccgagcccagcgacatcttcagctgcatcgtgacccacgagatcgacagatacaccgccatcgcctactgggtgcccagaaacgccctgcccagcgacctgctggagaacgtgctgtgcggcgtggccttcggcctgggcgtgctgggcatcatcgtgggcatcgtgctgatcatctacttcagaaagccctgcagcggctag

SEQ ID NO: 161965 - DNA, 510 bp, Artificial Sequence
  derived and/or modified sequence
atgtggcccgacgacctgcagaaccacaccttcctgcacaccgtgtactgccaggacggcagccccagcgtgggcctgagcgaggcctacgacgaggaccagctgttcttcttcgacttcagccagaacaccagagtgcccagactgcccgagttcgccgactgggcccaggagcagggcgacgcccccgccatcctgttcgacaaggagttctgcgagtggatgatccagcagatcggccccaagctggacggcaagatccccgtgagcagaggcttccccatcgccgaggtgttcaccctgaagcccctggagttcggcaagcccaacaccctggtgtgcttcgtgagcaacctgttcccccccatgctgaccgtgaactggcagcaccacagcgtgcccgtggagggcttcggccccaccttcgtgagcgccgtggacggcctgagcttccaggccttcagctacctgaacttcacccccgagcccagcgacatcttcagctgctag

SEQ ID NO: 161966 - DNA, 873 bp, Artificial Sequence
  derived and/or modified sequence
gtgagctgctggctgagcgacagctgccaggagctgcagagaagaggcatcatcctgtgcagctacggcgtgaccagccccatcgccgtgttcggcagacccggcagactgagaaacagaagacacttcgagagaagactggtgcccatgaagtggctgaagaagtgcctggacaccgcccccacccccatgtggcccgacgacctgcagaaccacaccttcctgcacaccgtgtactgccaggacggcagccccagcgtgggcctgagcgaggcctacgacgaggaccagctgttcttcttcgacttcagccagaacaccagagtgcccagactgcccgagttcgccgactgggcccaggagcagggcgacgcccccgccatcctgttcgacaaggagttctgcgagtggatgatccagcagatcggccccaagctggacggcaagatccccgtgagcagaggcttccccatcgccgaggtgttcaccctgaagcccctggagttcggcaagcccaacaccctggtgtgcttcgtgagcaacctgttcccccccatgctgaccgtgaactggcagcaccacagcgtgcccgtggagggcttcggccccaccttcgtgagcgccgtggacggcctgagcttccaggccttcagctacctgaacttcacccccgagcccagcgacatcttcagctgcatcgtgacccacgagatcgacagatacaccgccatcgcctactgggtgcccagaaacgccctgcccagcgacctgctggagaacgtgctgtgcggcgtggccttcggcctgggcgtgctgggcatcatcgtgggcatcgtgctgatcatctacttcagaaagccctgcagcggctag

SEQ ID NO: 161967 - DNA, 684 bp, Artificial Sequence
  derived and/or modified sequence
atgggccacgagcagaaccagggcgccgccctgctgcagatgctgcccctgctgtggctgctgccccacagctgggccgtgcccgaggcccccacccccatgtggcccgacgacctgcagaaccacaccttcctgcacaccgtgtactgccaggacggcagccccagcgtgggcctgagcgaggcctacgacgaggaccagctgttcttcttcgacttcagccagaacaccagagtgcccagactgcccgagttcgccgactgggcccaggagcagggcgacgcccccgccatcctgttcgacaaggagttctgcgagtggatgatccagcagatcggccccaagctggacggcaagatccccgtgagcagagtgaactggcagcaccacagcatccccgtggagggcttcggccccaccttcgtgagcgccgtggacggcctgagcttccaggccttcagctacctgaacttcacccccgagcccagcgacatcttcagctgcatcgtgacccacgagatcgacagatacaccgccatcgcctactgggtgcccagaaacgccctgcccagcgacctgctggagaacgtgctgtgcggcgtggccttcggcctgggcgtgctgggcatcatcgtgggcatcgtgctgatcatctacttcagaaagccctgcagcggcgactag

SEQ ID NO: 161968 - DNA, 786 bp, Artificial Sequence
  derived and/or modified sequence
atgggccacgagcagaaccagggcgccgccctgctgcagatgctgcccctgctgtggctgctgccccacagctgggccgtgcccgaggcccccacccccatgtggcccgacgacctgcagaaccacaccttcctgcacaccgtgtactgccaggacggcagccccagcgtgggcctgagcgaggcctacgacgaggaccagctgttcttcttcgacttcagccagaacaccagagtgcccagactgcccgagttcgccgactgggcccaggagcagggcgacgcccccgccatcctgttcgacaaggagttctgcgagtggatgatccagcagatcggccccaagctggacggcaagatccccgtgagcagaggcttccccatcgccgaggtgttcaccctgaagcccctggagttcggcaagcccaacaccctggtgtgcttcgtgagcaacctgttcccccccatgctgaccgtgaactggcagcaccacagcatccccgtggagggcttcggccccaccttcgtgagcgccgtggacggcctgagcttccaggccttcagctacctgaacttcacccccgagcccagcgacatcttcagctgcatcgtgacccacgagatcgacagatacaccgccatcgcctactgggtgcccagaaacgccctgcccagcgacctgctggagaacgtgctgtgcggcgtggccttcggcctgggcgtgctgggcatcatcgtgggcatcgtgctgatcatctacttcagaaagccctgcagcggcgactag

SEQ ID NO: 161969 - DNA, 510 bp, Artificial Sequence
  derived and/or modified sequence
atgtggcccgacgacctgcagaaccacaccttcctgcacaccgtgtactgccaggacggcagccccagcgtgggcctgagcgaggcctacgacgaggaccagctgttcttcttcgacttcagccagaacaccagagtgcccagactgcccgagttcgccgactgggcccaggagcagggcgacgcccccgccatcctgttcgacaaggagttctgcgagtggatgatccagcagatcggccccaagctggacggcaagatccccgtgagcagaggcttccccatcgccgaggtgttcaccctgaagcccctggagttcggcaagcccaacaccctggtgtgcttcgtgagcaacctgttcccccccatgctgaccgtgaactggcagcaccacagcatccccgtggagggcttcggccccaccttcgtgagcgccgtggacggcctgagcttccaggccttcagctacctgaacttcacccccgagcccagcgacatcttcagctgctag

SEQ ID NO: 161970 - DNA, 501 bp, Artificial Sequence
  derived and/or modified sequence
atgggccacgagcagaaccagggcgccgccctgctgcagatgctgcccctgctgtggctgctgccccacagctgggccgtgcccgagggcttccccatcgccgaggtgttcaccctgaagcccctggagttcggcaagcccaacaccctggtgtgcttcgtgagcaacctgttcccccccatgctgaccgtgaactggcagcaccacagcatccccgtggagggcttcggccccaccttcgtgagcgccgtggacggcctgagcttccaggccttcagctacctgaacttcacccccgagcccagcgacatcttcagctgcatcgtgacccacgagatcgacagatacaccgccatcgcctactgggtgcccagaaacgccctgcccagcgacctgctggagaacgtgctgtgcggcgtggccttcggcctgggcgtgctgggcatcatcgtgggcatcgtgctgatcatctacttcagaaagccctgcagcggcgactag

SEQ ID NO: 161971 - DNA, 873 bp, Artificial Sequence
  derived and/or modified sequence
gtgagctgctggctgagcgacagctgccaggagctgcagagaagaggcatcatcctgtgcagctacggcgtgaccagccccatcgccgtgttcggcagacccggcagactgagaaacagaagacacttcgagagaagactggtgcccatgaagtggctgaagaagtgcctggacaccgcccccacccccatgtggcccgacgacctgcagaaccacaccttcctgcacaccgtgtactgccaggacggcagccccagcgtgggcctgagcgaggcctacgacgaggaccagctgttcttcttcgacttcagccagaacaccagagtgcccagactgcccgagttcgccgactgggcccaggagcagggcgacgcccccgccatcctgttcgacaaggagttctgcgagtggatgatccagcagatcggccccaagctggacggcaagatccccgtgagcagaggcttccccatcgccgaggtgttcaccctgaagcccctggagttcggcaagcccaacaccctggtgtgcttcgtgagcaacctgttcccccccatgctgaccgtgaactggcagcaccacagcatccccgtggagggcttcggccccaccttcgtgagcgccgtggacggcctgagcttccaggccttcagctacctgaacttcacccccgagcccagcgacatcttcagctgcatcgtgacccacgagatcgacagatacaccgccatcgcctactgggtgcccagaaacgccctgcccagcgacctgctggagaacgtgctgtgcggcgtggccttcggcctgggcgtgctgggcatcatcgtgggcatcgtgctgatcatctacttcagaaagccctgcagcggctag

SEQ ID NO: 161972 - DNA, 372 bp, Artificial Sequence
  derived and/or modified sequence
atgggccatgaacaaatgctgccattgctgtggctgttacctcacagctgggctgtcccggaggcacctacgcctatgtggcccgacgatttgcagaaccataccttccttcataccgtgtactgtcaggatgggtcccctagcgtggggctatccgaagcgtatgatgaagatcagctgttttttttcgatttctcccagaacacaagagtccctcgtctaccagaatttgctgattgggcacaggagcagggcgatgctcccgcgatactctttgataaggagttctgcgagtggatgatccagcagattggtccgaagctggacggaaagatccccgtctcacggggacaagagttctctggcgaatag

SEQ ID NO: 161973 - DNA, 786 bp, Artificial Sequence
  derived and/or modified sequence
atgggtcacgaacaaaatcaaggagcggccctgttacaaatgctccccctcctgtggctgcttcctcactcctgggcggtccctgaggctcccacgcccatgtggcccgatgatctacaaaatcatacctttttgcataccgtgtactgtcaagacggtagccccagcgtcgggctgagtgaagcctatgatgaggaccaactgttctttttcgattttagccagaataccagagtgccacggctccccgagttcgcagattgggcccaggaacagggggatgccccagccatcctcttcgacaaggaattctgcgagtggatgattcagcaaatagggcccaaactcgacgggaagatccctgtgtctcggggattcccgatagcagaggtgtttactttgaaacccctcgagttcggcaagccaaacacgctggtctgctttgtctcaaacctgttcccacctatgctaactgtcaactggcaacaccactctgtgcctgtcgaaggtttcggtcccacattcgtgtcagccgtagatggcctctcattccaggccttcagctacctaaacttcacaccggagccctctgacattttttcatgcattgtcacacatgagatcgatagatacaccgccatagcgtactgggtgccacgcaatgcactgccttcagatctgctcgaaaacgtcctgtgtggtgtcgctttcgggttaggcgtgctgggcattattgtgggcattgttcttatcatttattttcgaaagccctgctctggggactag

SEQ ID NO: 161974 - DNA, 684 bp, Artificial Sequence
  derived and/or modified sequence
atgggtcatgagcagaatcaaggagctgctttactgcaaatgctgccactgctctggctactgcctcatagctgggccgtaccagaggcccctacacctatgtggccggacgacctccagaaccataccttcttacacacagtgtactgtcaagacggtagcccaagcgttggacttagcgaggcgtacgacgaggaccagctcttcttctttgactttagtcagaatacacgcgtgccccggctgccggaattcgcggattgggctcaggagcagggcgacgccccggcaatcctcttcgataaagaattctgcgagtggatgatacaacaaataggaccgaagctcgatggcaagatccctgtctcccgggtgaattggcagcatcacagtgtcccagtggagggatttgggccaacttttgtgtcagccgttgacggactgtcattccaggctttttcttatctcaatttcacacctgagccatcagacatcttttcttgtattgtgactcatgaaattgaccgctatactgcgatagcctactgggtgcctagaaatgctcttcctagtgatcttcttgaaaatgtgctgtgcggtgttgccttcggcctgggagtcctgggaattattgttggaatcgtgctaatcatttatttccgcaaaccgtgcagcggtgactag

SEQ ID NO: 161975 - DNA, 501 bp, Artificial Sequence
  derived and/or modified sequence
atggggcacgagcaaaaccagggcgctgctttactgcagatgcttccattactgtggctcctgccccactcgtgggcagttccagagggatttccaattgcggaggtcttcacactgaagcccctagagttcgggaagcccaacactctggtgtgttttgtgtcaaacctgtttcctccaatgctgacggtgaattggcagcaccatagcgtgcctgttgaaggtttcggcccgacgttcgttagcgccgtggacggcttgtccttccaggccttttcctatctaaactttacgcccgaaccgtccgatatatttagctgtatagtgacccatgagattgaccgctataccgcaatcgcttattgggttcctcgcaatgccttaccctcagatttgttggaaaatgtgctgtgtggagttgcttttggccttggcgtcttgggcattatagtgggaatcgtgctgattatctacttccggaaaccatgtagcggtgactag

SEQ ID NO: 161976 - DNA, 786 bp, Artificial Sequence
  derived and/or modified sequence
atggggcatgagcaaaaccagggggccgctctgctccaaatgctaccgttgttatggctgctgccccacagctgggcagtgccagaggctccaacccctatgtggccagacgacctccagaatcacacctttcttcacaccgtgtattgccaagatggctccccatctgtaggactgtctgaggcctacgacgaggaccaactcttttttttcgacttcagccagaacacacgcgttccgcgtctgcctgaatttgccgactgggctcaagagcagggggacgctcccgccatcttattcgataaggaattctgcgagtggatgatccaacaaataggccctaaattagacggcaagatccctgtgagtcgcgggtttccaatcgccgaagtatttaccctcaagccactggaattcggtaagccaaacactctagtttgcttcgtgagcaatctgttcccccctatgctaactgtgaattggcaacaccattcggtgcctgtggagggatttggtccgaccttcgtatccgcagttgatggtctgagcttccaggccttttcttatctcaacttcactccagaacctagcgatattttcagctgtatcgtgacacacgaaattgatcgctataccgccattgcgtactgggtccccagaaatgctttacccagtgacctgctggagaacgttctgtgcggcgtcgccttcgggctcggcgtgctgggtatcattgtgggcatcgttttgattatctacttcagaaaaccttgctccggtgactag

SEQ ID NO: 161977 - DNA, 684 bp, Artificial Sequence
  derived and/or modified sequence
atggggcacgaacagaaccagggagcggcgctgctccagatgctgcctctcctctggctgttacctcactcatgggccgtgcccgaggctcccactcccatgtggcctgatgatctgcaaaatcacacgttccttcacacagtctactgccaggacgggagcccgagtgtaggcctgtctgaagcctatgacgaagatcagctgtttttcttcgacttctcccagaatactagagtcccacggctccccgaatttgccgactgggcccaagagcagggcgacgcccccgccatcctctttgacaaggaattttgtgaatggatgatccagcagatcggtcccaagctggacggaaaaattccagttagccgcgtcaattggcagcatcacagcgtcccggtggaagggtttggcccgacattcgtctcagcagttgatggtctgtctttccaggccttttcttatctcaactttactcccgagccaagcgatatcttttcctgcatcgtcacccacgaaattgatagatacaccgctatagcctattgggtgccaagaaatgctctgccctccgatctcctagagaacgtactgtgtggcgtggcctttggccttggcgtcctcggaattattgtcggaattgtgctcattatctatttccgcaaaccttgctccggggactag

SEQ ID NO: 161978 - DNA, 501 bp, Artificial Sequence
  derived and/or modified sequence
atggggcacgagcagaaccagggagcggcccttcttcagatgcttccccttctgtggctcctgccgcactcatgggcagtgcctgaagggttccccatcgcggaggttttcacattgaaacctctggaatttgggaaacctaacaccttagtctgctttgtttcgaatctgtttcctcccatgctgaccgtcaattggcagcaccactctgtaccggtggaaggattcgggccaacctttgtctccgcagtggacggactttcttttcaggcgttcagctacttgaacttcacaccagaaccctctgatatcttcagctgtattgtcacacacgaaatcgaccggtacactgcaatcgcctattgggttccacggaatgcactccctagcgacctgcttgaaaatgtcctgtgcggggtggctttcggcttgggagtgttagggataattgtaggcatcgtactgattatttatttcagaaaaccttgttccggagactag

SEQ ID NO: 161979 - DNA, 726 bp, Artificial Sequence
  derived and/or modified sequence
atgaagtggctgaagaaatgcctggacacagctcctactcctatgtggccggatgatctgcagaaccatacatttttgcataccgtgtattgtcaggacggctctccatcggtcggcctgtccgaggcctacgatgaagatcaattattctttttcgacttttcccagaacacaagagtacctaggctgccggaattcgccgattgggcccaggagcaaggcgacgctcctgccatcctgtttgacaaggagttctgtgaatggatgatccagcagatcggacctaaattggacgggaaaattccggtctcacgtgggttcccgattgcagaagtgttcactctaaagcctcttgaatttggcaaacctaatacccttgtctgttttgtatcaaacctgttcccccctatgttgaccgtaaattggcagcatcactctgtgcccgtggagggctttggtccaacgtttgtatcagcagttgacggcctttccttccaggcatttagctatttgaatttcacccctgaaccctcagatatcttctcatgcattgtgacccacgagattgatcgttataccgccatcgcttattgggttccccggaatgctctcccgtcagatttacttgaaaacgttctgtgtggcgtggcctttggtctcggcgtccttgggattattgtcggcatcgtcctaatcatctactttcgcaagccatgttctggatag

SEQ ID NO: 161980 - DNA, 510 bp, Artificial Sequence
  derived and/or modified sequence
atgtggccggatgatttacagaatcatacttttctgcatacagtctattgccaagatggctctccctcagtcggcctctctgaggcatatgacgaggatcagcttttctttttcgatttcagtcagaatacacgtgtgcccaggctcccagagttcgctgattgggctcaggagcagggggacgcaccagccatactgttcgataaagaattctgtgagtggatgattcaacagatcggcccaaagctcgacggcaaaataccagtgagtaggggtttcccaattgccgaggttttcactcttaagccactggagtttggaaaacccaacaccctggtctgttttgtgtcaaatctgttcccccccatgttaacggtgaactggcaacaccactcggtccctgtcgagggatttgggcccacctttgtctctgcggtcgatggcctctccttccaggcattctcttatctgaattttactcccgaacctagtgacatattttcttgttag

SEQ ID NO: 161981 - DNA, 873 bp, Artificial Sequence
  derived and/or modified sequence
gtctcatgctggttgtccgatagctgccaggagctccagcgaaggggaattatactgtgcagctatggcgttaccagcccaatcgctgtgtttggtcgacctggaaggctgagaaataggcggcatttcgaaaggagattggtgccaatgaagtggttgaagaagtgtctggatacagcccccacccccatgtggcccgacgatttgcagaaccacacgtttctgcacactgtttactgccaggacggcagcccatctgtgggcctctcggaagcctatgacgaagatcagctttttttttttgatttttctcaaaataccagagtcccgcggctgccagagtttgccgattgggcccaagagcagggtgacgcacctgccatcctatttgacaaggagttttgcgaatggatgattcagcagattggccccaagcttgatggcaagattcctgtgtccaggggctttcccattgcagaagtatttaccttgaagcctctcgagtttggaaagcctaacacactggtgtgctttgtctcaaacctgtttcctccaatgctgaccgtgaactggcagcaccactcagtgccagtcgaaggctttgggcccactttcgtgagtgcggtcgacggattgagctttcaggctttcagctatcttaatttcacaccagagccatctgatatattctcctgtatagtcacccacgagattgatcggtacactgctatcgcctattgggttcctagaaacgctctgcctagcgatcttctggagaacgtgctatgtggcgtcgcattcggtctgggagtgctagggatcattgtaggcattgtgctcattatctattttcggaagccatgctccggctag

SEQ ID NO: 161982 - DNA, 510 bp, Artificial Sequence
  derived and/or modified sequence
atgtggccggatgacctccagaatcacacattcctgcacacagtttattgccaggatggctctccaagtgttgggctgtcagaagcctacgatgaagaccagttatttttctttgattttagccagaatactcgggtgcccaggctgccggagttcgccgactgggctcaagaacagggggatgcacccgcaatcctgtttgacaaagaattctgcgaatggatgatccagcaaataggcccgaagctggacggcaagatacccgtgtctcgaggctttccaatcgctgaggtatttacactgaagcccctcgaattcggcaagcccaacacactggtgtgtttcgtgtccaacctctttccccccatgctgacagtcaactggcagcaccattctgttcctgtcgagggcttcggtcctacgtttgttagtgccgtggacggacttagcttccaggcattttcctatctgaatttcacccccgaaccctctgatatcttcagttgctag

SEQ ID NO: 161983 - DNA, 684 bp, Artificial Sequence
  derived and/or modified sequence
atggggcacgaacagaaccagggtgctgccctgctgcagatgctgcccctcctgtggttgctaccacacagctgggccgtccctgaagcacctacaccaatgtggcctgacgacctgcaaaaccacacttttctacacacagtgtactgccaggacggttccccttccgttggcctgagcgaagcctatgacgaggaccagctctttttctttgatttctctcaaaacacgcgtgtcccccgacttccagaattcgccgattgggcccaggaacaaggggacgctcctgccattctgttcgacaaagagttttgtgagtggatgatccagcaaattgggccaaagctcgacggcaagatcccagtctctagagtcaactggcagcaccactccgtcccagtcgaaggttttggccccacctttgtctccgccgttgatggcctgtcgtttcaggcattctcctatcttaatttcactcctgaaccatcagacatattttcatgcattgtgacccatgagatagaccggtacacagccatcgcttactgggtgccacgcaacgcgctgccttcagacctgctggaaaacgtgctgtgtggcgtggcttttggcctaggcgtgctaggaattatcgtggggattgtgctgattatatacttccggaagccatgttcaggtgattag

SEQ ID NO: 161984 - DNA, 510 bp, Artificial Sequence
  derived and/or modified sequence
atgtggccagatgacctgcagaaccacacttttctccacacagtctactgccaagacggaagtccttccgtggggctcagtgaggcttatgatgaggatcagctattcttttttgacttcagccagaatacacgagtgccgagattgcccgaattcgccgactgggcccaagagcagggggacgctcccgcaattctcttcgacaaggaattttgcgagtggatgattcagcagatcggacccaaattggatggaaagatcccggtaagtcggggatttcctatcgccgaggtgttcaccctcaagccactcgaatttgggaaacctaataccctggtgtgtttcgtctctaatctgttcccgcctatgttgaccgtgaattggcagcaccactctgtccctgtggagggattcggacccactttcgtttctgctgtcgatggtctctcattccaggccttctcatacctgaatttcacacctgaaccttccgatattttctcctgttag

SEQ ID NO: 161985 - DNA, 501 bp, Artificial Sequence
  derived and/or modified sequence
atgggacacgagcaaaaccagggagccgcccttttgcagatgctgccactcctctggctactgcctcacagttgggccgtcccagagggttttcctatcgctgaagtattcactttgaagccactggagtttggtaagcccaacacgctggtatgtttcgtgtccaacctgttccctccgatgctaaccgtcaattggcagcatcactcagttccggtggagggttttgggccaaccttcgtgtccgccgtagacggactgtccttccaggcgttttcctacctaaactttacacctgagcctagcgatatcttctcatgtattgtcactcacgagattgaccggtacacggcaattgcctattgggtgcctcgcaacgcgctaccctcagacctgctggagaacgttctctgtggagtggccttcgggctgggtgtgcttggtatcatagtcggcatcgtgctcatcatctacttccgaaagccatgcagcggcgactag

SEQ ID NO: 161986 - DNA, 684 bp, Artificial Sequence
  derived and/or modified sequence
atgggtcacgagcagaaccagggtgccgctctgctgcagatgctccccctactgtggttattgcctcactcatgggctgtgcccgaagcccctactcctatgtggcccgacgacctgcaaaatcacaccttccttcacacggtctattgccaggacggctctccttccgtcggcctttcagaagcttatgatgaggaccaactttttttttttgatttctcccaaaacacgcgtgtgcctagactcccagaattcgccgactgggcacaggagcagggggatgctcctgccatactgtttgataaagagttttgcgaatggatgatccagcaaatcggacccaaactggacgggaagatccccgtgtcacgagttaactggcaacaccactccatcccagttgagggattcggtccaacgtttgtgtctgctgttgatggactctcctttcaggccttctcttacctgaactttacccctgagccaagcgacattttctcttgcatcgtcacgcacgaaattgatcggtatactgcaatcgcctactgggtgccccggaatgccctgcctagcgacctgctcgagaacgtactgtgtggcgtggcttttggcctgggcgtcctgggaattatcgtgggtatcgtgctgatcatttactttcgtaagccttgcagcggcgattag

SEQ ID NO: 161987 - DNA, 873 bp, Artificial Sequence
  derived and/or modified sequence
gtcagctgctggctgagcgacagctgtcaagagctgcaaagaagaggaatcatcctgtgtagctatggagtgacctcaccgatcgctgttttcggccgccctggccggctgcgtaacaggagacattttgagagacgtctcgttccaatgaagtggctcaagaagtgtctcgatactgcccctaccccaatgtggccagatgacctccaaaaccatactttcttgcacaccgtatactgccaggatggctctccttccgtgggtctcagcgaggcttatgacgaggaccagctgttcttttttgacttctcccagaacacaagggttcctagacttccagaatttgccgactgggcacaagaacagggagatgcaccagccatcctgttcgacaaggagttctgtgagtggatgattcaacagatcgggcccaaactggatggtaaaattccagtctctcgaggctttccaatcgcagaagtgtttactctcaaaccacttgagtttggcaagcctaacacactggtgtgttttgtgtccaacttattcccacccatgctcaccgtgaactggcaacaccatagcgtacctgtcgagggatttggcccaacctttgtgagtgctgtcgatggactctcctttcaggccttcagttatctgaacttcaccccagagccaagcgatatctttagctgtatcgtgacccacgagatcgatcgttataccgccattgcttattgggtgccccgcaatgccttgcccagcgatctgctggagaacgttctttgtggtgttgctttcggcctgggtgtgctcggcattatcgtcgggatagtcctgattatatacttccgcaaaccttgctcaggatag

SEQ ID NO: 161988 - DNA, 510 bp, Artificial Sequence
  derived and/or modified sequence
atgtggccagatgacttacagaaccataccttcttacataccgtgtactgccaggatggttccccaagcgtgggtctctccgaggcgtacgatgaagaccagctgtttttctttgatttttcacagaacacacgcgtacctagactccccgagtttgcggactgggctcaggagcagggcgacgcacccgctatcctgttcgacaaagaattttgcgaatggatgatccagcagattggtcccaaactagacggaaagattccggtcagcagaggcttcccaattgccgaggtcttcacgttgaagcctctggaatttggtaaacccaacacgttggtgtgtttcgtttccaacctcttccctccaatgctcaccgttaattggcagcatcatagtgtccctgtggagggtttcggaccaactttcgtgtcagcagtggatggccttagttttcaggctttctcatatcttaatttcacgcctgaaccctctgacatctttagttgttag

SEQ ID NO: 161989 - DNA, 510 bp, Artificial Sequence
  derived and/or modified sequence
atgtggcctgatgatctccaaaaccacacgttccttcacaccgtgtactgtcaggacggaagcccctcagtcggactgagtgaggcttacgatgaggaccagctctttttttttgacttctcccaaaacactcgagttccccgcctccccgagtttgccgattgggcccaggaacagggagacgctcccgccatactgtttgacaaggagttttgcgaatggatgatacaacagattgggcccaaactggatgggaagattcccgtatctaggggattccccatcgccgaggtgtttactctgaaaccgctggagtttggcaagcctaacacactcgtgtgtttcgttagcaaccttttcccacctatgcttacagttaactggcaacaccacagcgtgccagtggaaggatttgggccgacgttcgtgagcgcggtcgatggactgtccttccaggccttctcctacttgaattttactccggaacccagcgatatcttttcttgctag

SEQ ID NO: 161990 - DNA, 684 bp, Artificial Sequence
  derived and/or modified sequence
atgggccacgaacagaaccagggggcagcactgctccagatgttgcctcttctctggctcctgccgcactcgtgggctgttcctgaggctccaactcctatgtggcccgacgacctgcagaaccatacctttcttcacaccgtttattgtcaggatgggagccccagcgtcgggctgtccgaggcgtacgatgaggatcagctttttttttttgacttcagtcagaatacacgtgtgccacgattgcctgagttcgctgattgggcccaggagcagggtgatgctccagcaatcctgtttgataaagaattctgtgaatggatgatccagcagatcggcccgaaactggatggaaagataccagtatcacgcgtaaactggcagcatcatagtgtccccgtcgagggctttggaccgacattcgtgtcagccgtggacgggcttagctttcaggcctttagttacttgaactttactccagagcctagtgatattttcagttgcatcgtgacccatgaaattgataggtataccgcaatagcatactgggttcctcggaatgccctaccttcagatctgctggagaacgtgctttgcggggttgccttcggactgggtgtgctgggcattattgtgggcattgtgctcattatttatttccgaaagccctgttcgggtgattag

SEQ ID NO: 161991 - DNA, 873 bp, Artificial Sequence
  derived and/or modified sequence
gtgagttgctggctatccgacagctgtcaggagcttcaaagaaggggaataatactgtgcagctacggcgttacctcccccattgctgtattcgggaggccagggagactgcgcaaccggcgtcacttcgagcggcggctcgttcccatgaaatggctgaagaaatgtctcgacaccgccccaacacccatgtggcctgacgatctccagaaccatacatttctacacactgtgtactgccaggatggttcaccgtctgtcgggctctccgaggcatatgatgaggatcagctgtttttctttgacttctctcagaacactagagtcccccgactgccagaatttgctgattgggctcaagagcaaggcgatgcccctgccattttgtttgacaaggagttctgtgagtggatgatccagcagatcggtcccaagctggacggtaagataccagtatcccgcgggttcccgattgcagaagtgttcacgctcaagcctcttgagtttggtaagcccaacactctggtctgctttgtctccaatctcttcccacccatgctgacagtgaactggcagcaccattctgtccctgtggagggctttggccctacctttgtgagcgctgtagatgggttgagctttcaggcttttagttaccttaactttacacctgagcctagcgacattttcagttgtatcgtgacacacgaaatcgaccgctacacagctatcgcatattgggtacctaggaacgccctgccttctgacctacttgagaacgtactttgcggtgtcgccttcggcctcggggtactgggaattattgtggggatcgtcctgatcatttattttcgtaagccttgttcgggttag

SEQ ID NO: 161992 - DNA, 786 bp, Artificial Sequence
  derived and/or modified sequence
atgggacacgaacagaatcagggagcagcactcttgcagatgctcccccttctgtggttgctgcctcattcttgggctgtgcctgaggctcctactcctatgtggcctgacgacttacaaaaccacacctttctacacacggtttactgtcaagacggaagtccatccgtgggcctatccgaagcatatgacgaagatcagctgttcttctttgattttagccagaatactagagtgcctcgtttgcccgaattcgcagattgggcacaagaacagggggacgcacctgcgatcctcttcgacaaagagttctgtgagtggatgattcagcagataggccccaaactggacggaaagatcccagtgagccggggctttcccattgcagaagtgttcaccctgaagcccttagagtttggtaagcccaatacccttgtctgctttgtgtctaacctctttccccctatgctgacggttaattggcagcaccactcggtgccagtcgaaggtttcggacccacctttgtatctgccgtcgatggcctcagctttcaggcttttagttaccttaacttcacaccagaaccttccgatatttttagctgtattgtcacccacgagatcgatcggtatacagcaattgcttactgggtgcctagaaacgccctcccctcagacctgctggagaatgtcttgtgcggagttgcatttggtctcggcgtcttgggaattattgtggggattgttctaattatctacttccgaaagccatgcagcggcgattag

SEQ ID NO: 161993 - DNA, 501 bp, Artificial Sequence
  derived and/or modified sequence
atgggccatgaacagaaccagggcgcggcgctgctgcagatgcttccgctgctgtggttgctgccgcacagctgggctgtgccggaggggtttcccatcgcggaagtcttcacactgaaaccactcgagtttggaaagccgaacacccttgtctgttttgtctccaatttgtttcctcccatgctgacagtcaattggcagcatcatagcgtaccagtggaaggttttggaccaacatttgtcagcgcagtcgatggcctgtcatttcaagcttttagctacctgaacttcacccccgagccatcagacattttctcctgtattgttacccatgaaattgaccgttacactgccatagcatattgggtccctcgcaacgccttgccatccgacctcttagagaacgtcttgtgcggggtggctttcggattaggtgttctaggtatcatcgttgggattgtcttgatcatatacttccggaaaccttgctccggcgactag

SEQ ID NO: 161994 - DNA, 510 bp, Artificial Sequence
  derived and/or modified sequence
atgtggcccgacgacctgcagaatcatacatttctgcacaccgtttactgccaggacggatccccatcagtgggtctctccgaggcttatgacgaagaccaactcttcttctttgactttagccagaatactcgagttccacgtctccctgagtttgccgactgggcccaagagcagggagacgcgccggccatcctcttcgataaggaattttgcgagtggatgatacagcagattggaccaaagctcgacggcaagatcccagtgtctagaggctttccaatcgctgaagtatttactctcaagccccttgaatttggaaagccaaacacgctagtgtgctttgtttcgaacttgttcccaccaatgctgaccgtgaactggcaacatcactctgtgcccgtggagggatttggaccaacattcgtgagcgcagtggacggtctgtcatttcaggctttctcttatctaaacttcacccccgaaccttctgatatattcagttgctag

SEQ ID NO: 161995 - DNA, 786 bp, Artificial Sequence
  derived and/or modified sequence
atggggcatgaacagaatcagggtgcagcactgctgcagatgttgcctttgctttggctgctaccacactcctgggcagtgccagaggctccaactcccatgtggcccgacgatctccaaaaccatacattcctccacacagtttactgccaggacgggtcccccagcgtcgggctctccgaggcttacgacgaggatcagctgttttttttcgattttagtcagaacactcgggtcccaaggctacctgagtttgcggattgggcacaggaacagggggacgcgcctgctatcctttttgataaggagttctgtgagtggatgatccagcagatcggacccaagctcgacggcaagataccggtctctaggggtttccccattgccgaggtgttcaccctcaaacctctcgagtttggcaagccgaatacgctcgtctgcttcgtaagcaacctgtttccgcccatgcttaccgtcaattggcaacaccactctataccagttgaggggttcggtcccacatttgtttccgccgtggacggactaagctttcaggccttttcatacttgaacttcactccagagcccagcgatatctttagctgcatcgttacccatgagattgatagatatacagcgatcgcgtattgggttccccgcaatgctcttcctagcgatttactggaaaacgtgctgtgcggagtggcatttgggttgggagttcttggcattatagtgggcatcgtgctgattatctatttcagaaaaccctgcagtggagactag

SEQ ID NO: 161996 - DNA, 873 bp, Artificial Sequence
  derived and/or modified sequence
gtatcctgttggctttccgatagttgtcaggagttacagcgaagggggatcatcctatgcagctatggtgtcacttctccgattgcagtctttgggcgtcccggaaggctcaggaataggagacatttcgaacgaagattggttccaatgaaatggctaaaaaagtgcctcgataccgcaccaactcccatgtggcctgacgacttacagaatcacacctttctccacaccgtctactgccaggacggatctccatcggtggggctgtcagaggcctacgacgaagaccaactattcttctttgacttctcccagaacaccagagtgcctaggttgcctgagtttgctgactgggcgcaggagcagggagatgctcctgccatcctatttgacaaggagttctgtgaatggatgatccagcaaattggacctaaattggatgggaagattcccgtgagtagaggatttccaattgctgaagtgtttacactgaaaccactggaattcggtaaaccaaacacacttgtctgctttgtatcaaacctctttcccccaatgttgaccgtgaactggcagcaccactccgtgcccgtcgaaggtttcggccctacattcgtctcagctgtggatgggctcagctttcaggctttcagctatctgaatttcacacccgagccatcagatatattttcatgcattgtgacgcatgagatcgataggtacacagctattgcctactgggtaccgcgtaatgccctaccctcagacctcctcgaaaacgtcctttgcggagtggctttcggcctgggagttttgggaattattgtagggatcgtcttgattatatattttcgaaagccatgctcaggctag

SEQ ID NO: 161997 - DNA, 510 bp, Artificial Sequence
  derived and/or modified sequence
atgtggcctgacgacctgcagaaccacactttcttacacaccgtgtactgccaggatgggagcccttccgtcgggttgtctgaagcctacgacgaggaccagttgtttttcttcgatttttcccaaaatacccgcgtcccccggttgccagagtttgccgactgggcccaggagcaaggcgacgccccagctattttgtttgataaagagttttgcgaatggatgatccaacagattggccccaaactcgacggtaagatcccggtgagccgagggttcccgattgccgaagtgttcaccttgaaacctttagaatttgggaagcccaacactcttgtgtgctttgtgagtaacttgttccctcccatgctcactgtgaactggcagcatcatagtatcccggttgaaggctttggaccgacctttgtaagcgctgtcgatggactgtctttccaggccttcagttacctgaacttcaccccggagccatcagatatcttttcctgctag

SEQ ID NO: 161998 - DNA, 786 bp, Artificial Sequence
  derived and/or modified sequence
atggggcacgaacagaaccagggagcagcactcctgcagatgctccctctcctgtggctactgccccactcctgggcagtgcctgaagctcccacgcccatgtggccggacgacctacaaaaccataccttcctacataccgtctactgccaggatggttccccttctgtgggcctcagcgaggcgtacgatgaggatcaattattcttcttcgatttctcccagaatacacgtgtgccacgattaccagaatttgctgactgggcccaagagcagggggacgctcccgccatactctttgataaggagttttgcgagtggatgatccagcagatcggcccaaaactcgacggcaaaatccccgtgtctcgcggcttcccgatcgctgaggtgtttaccctgaaacccctagagtttgggaaacccaacacattggtgtgctttgtgagcaacctgttcccaccaatgctcactgtgaattggcagcatcactccgtacccgtagagggatttggtcccactttcgtttcggccgttgacggtttgagctttcaggcattttcttatcttaacttcacgcctgagccatctgatattttttcgtgcatcgtcacccacgagatcgatcggtacaccgcaatagcttactgggtgccacggaatgccctcccaagcgacttgctggaaaacgtcttatgcggtgtcgccttcggtctcggggtgctagggatcattgtgggtattgtactcatcatctacttccgaaagccatgctccggggattag

SEQ ID NO: 161999 - DNA, 501 bp, Artificial Sequence
  derived and/or modified sequence
atgggacatgaacagaaccaaggcgccgccctgctgcagatgctaccactgctttggctgttgcctcactcttgggccgtccctgagggctttcccatcgcagaagtgtttacactgaaacccttagaatttggtaaaccgaacacgttggtgtgctttgtgagtaacctctttccgcctatgctaaccgtgaactggcagcaccacagcatcccagtggagggcttcggacccacatttgtatccgcggtggatggtctgagctttcaggccttcagttacctcaatttcacccctgagccaagcgacattttttcatgtattgtgactcatgagattgatcgatacaccgctattgcgtactgggtaccacgaaatgccttaccctccgatctgctcgaaaatgttctgtgcggcgttgctttcggccttggcgtgctgggtattattgtgggcatcgtgctcatcatctacttcaggaaaccctgtagcggggactag

SEQ ID NO: 162000 - DNA, 786 bp, Artificial Sequence
  derived and/or modified sequence
atggggcacgagcagaaccagggtgccgcactcttacagatgctccctttgctgtggctgttgccacactcgtgggccgtaccagaggcgcccactccaatgtggccagacgacctacagaaccacacatttttgcacacagtgtattgccaggacggctctcccagtgtgggactgtccgaagcctatgacgaagaccagcttttcttcttcgacttctcccagaacacaagagtgcctaggctgcccgaatttgctgactgggcgcaggagcagggcgatgcacctgcgatcctgtttgataaggaattttgcgagtggatgattcagcagattggccctaagttggatggaaagatacctgtatcacgggggttccccattgccgaggtctttacactgaaaccgttggagttcggcaagcccaacacactggtctgtttcgtatcgaacctgtttcctcccatgcttacagtcaactggcagcaccacagcgtacccgtcgagggctttggacccacattcgtcagtgccgtggacggactctcttttcaagccttctcttatctaaacttcaccccagagccctcggatatctttagctgtattgtgacgcatgagatcgatcgctacaccgctatcgcctattgggttccccgcaatgccctccctagcgatctgctagagaatgtgctctgcggcgtggcctttggtctcggagtcctgggtattatcgtgggtatcgtactgatcatctacttcagaaagccatgctcgggggactag

SEQ ID NO: 162001 - DNA, 684 bp, Artificial Sequence
  derived and/or modified sequence
atggggcatgagcaaaaccagggggccgctctccttcagatgctccccttactgtggcttcttccccacagttgggccgtgcccgaagccccaactcccatgtggccggatgaccttcaaaatcacacattccttcataccgtgtattgtcaggatggcagtccatcagtgggcctttcagaggcatacgatgaggatcagctgtttttcttcgattttagccagaacacaagagttccacggctgcccgagttcgctgattgggcccaggaacagggagacgctcccgcaatcctcttcgacaaggaattttgtgagtggatgatacagcaaatagggcccaaactagacgggaagattccagtgtctcgcgtcaactggcagcatcactctgtcccagttgagggtttcgggcccacattcgtgtcagctgtggacggattatcttttcaggctttttcatatcttaattttacaccagagccgtcagatattttctcctgcattgtaacacatgagatcgataggtataccgccatagcatactgggtcccacggaacgctctgccaagcgatctgttagagaacgtcctttgtggcgtggccttcggattgggtgttcttggaattatcgtgggcatcgtcttaattatatatttcaggaaaccttgctctggagactag

SEQ ID NO: 162002 - DNA, 501 bp, Artificial Sequence
  derived and/or modified sequence
atgggtcacgaacagaatcagggggctgcccttctccagatgttgcccctgctctggctacttccgcacagttgggccgtccccgagggtttccctattgccgaggtgtttacactcaaacccctggaattcggcaagcctaacaccctggtgtgttttgtatctaatttgttcccgccaatgctcacagtcaattggcagcaccatagtgtccccgttgaaggctttggtccaaccttcgtctccgcggtcgacggcttgagtttccaggctttttcctacctgaacttcacacccgagcccagcgacatcttctcctgtatcgtgacacatgagattgataggtacactgcaatcgcctattgggtccccaggaacgcgctgccctccgaccttttagaaaacgtgctttgcggcgtggctttcggcttgggtgttctggggataatcgtgggcatcgtgctgatcatttactttcgtaagccgtgctcaggagattag

SEQ ID NO: 162003 - DNA, 684 bp, Artificial Sequence
  derived and/or modified sequence
atggggcatgaacaaaatcagggggctgcactgttacaaatgctcccattgctctggctcctcccacactcttgggctgtgccagaagcccccactccaatgtggcccgatgaccttcagaaccatactttcctgcatacagtttactgccaagatggtagcccttccgtgggtctgtcagaggcttacgatgaggaccagctgtttttcttcgatttttctcagaatactcgggtgcccaggctcccggagttcgctgactgggcccaggagcagggagatgcgcccgctatcctgttcgataaagagttctgcgagtggatgattcagcagataggccccaagctagacggtaaaatccccgttagccgcgtgaactggcagcaccacagtgtcccagtggaggggtttggaccaacattcgtgtccgctgtggacggcctcagttttcaggccttttcctaccttaactttacgccggagccttccgacatattcagttgcatagtcactcatgagattgatcgttatacagccattgcatactgggttccacgcaacgcgctcccgagtgatctacttgaaaacgttctttgcggcgtggcgtttgggctgggggtcctgggtatcatagttggcatcgtgctaatcatttacttccgcaagccctgttcaggagactag

SEQ ID NO: 162004 - DNA, 684 bp, Artificial Sequence
  derived and/or modified sequence
atgggccacgagcagaaccagggggcagcactgcttcagatgcttcctctgctgtggctgctgcctcattcatgggcagttcccgaagctccaacgccgatgtggcctgatgatctacagaaccacacctttctacacaccgtctattgccaggacggcagtccaagcgttggactctcagaagcgtacgacgaggatcagctcttcttcttcgatttctcacagaatacccgcgtcccgagacttcccgagtttgcggactgggcccaggaacagggggacgcccctgctattctctttgacaaggagttctgtgagtggatgattcagcagatcgggcctaagctcgatggaaagattccggtctctcgggtgaactggcagcaccatagcgtccctgtagagggattcggccctactttcgtgtccgccgtcgatggcctgagcttccaagctttttcatatttgaatttcactcctgaacccagcgatatcttttcctgtatagtcacacatgagattgatcgttacaccgcgattgcgtactgggttcccaggaatgctctgccatccgatctcctcgaaaatgtgctttgcggggttgcttttgggctgggggtgctgggcattattgtggggattgtgctcataatctattttcgcaagccatgttccggcgactag

SEQ ID NO: 162005 - DNA, 786 bp, Artificial Sequence
  derived and/or modified sequence
atgggccacgagcagaaccagggcgctgcgctcctgcaaatgctacccctcctttggctcctgccccattcatgggctgtgcctgaggcacccacaccgatgtggccagacgatctccagaatcacaccttcctgcacacagtttactgccaggatggctccccatcagtcggtctctcagaagcctacgatgaggaccagctgtttttcttcgatttctcgcagaacactcgggtgcccagactcccagagttcgccgactgggcccaggagcagggggatgccccagctatactgtttgacaaggaattttgcgagtggatgatccagcagattggccctaagctggacggtaagatacccgtgtcacgcggattccctatcgccgaggtatttactctgaaaccgctggaatttggcaaacccaacacactagtgtgtttcgtgagcaatctctttccccccatgttgaccgttaactggcagcaccactctgtgcccgtggagggctttgggcctacctttgtatctgctgtcgatgggctaagcttccaggctttcagctaccttaacttcacacctgagccgtcagatatattctcctgcatcgtgacacatgagatcgaccgctacaccgcaatcgcatattgggtcccccgcaacgctctcccaagcgacctgctggaaaacgtgttatgtggagtggccttcggtctgggggttcttggaatcatcgtaggaatcgttctaattatctactttcggaaaccttgttctggggactag

SEQ ID NO: 162006 - DNA, 501 bp, Artificial Sequence
  derived and/or modified sequence
atgggacatgagcaaaatcaaggggccgccctcctgcaaatgcttcccctgctgtggctactcccccatagctgggcagtccccgaaggtttccccatcgcagaggtttttacattaaaaccgttggaatttggcaagccaaatacactggtatgtttcgtctccaatctgttccctccgatgttaaccgttaactggcagcatcactctgtgcccgtggaggggttcggtccaacattcgtcagtgcagttgacgggctatctttccaagccttctcatatctgaacttcacccccgagccttctgatatcttctcatgtattgtgacacatgaaatcgatcggtacacagctatcgcatactgggtgccacgcaacgccctgccaagtgatttattagagaatgtcttgtgcggagtggcattcgggctgggggtgcttggcatcatcgttgggattgtcctcatcatatacttcaggaaaccctgctcaggagattag

SEQ ID NO: 162007 - DNA, 786 bp, Artificial Sequence
  derived and/or modified sequence
atgggacacgaacagaatcagggtgccgccctgctacagatgctcccactgttgtggctgctcccccattcctgggccgtccccgaggcgcctacccccatgtggcctgatgatctgcaaaatcacactttcctccataccgtatactgccaggatggaagtccgagcgtcgggcttagtgaggcctacgacgaggatcagttattcttctttgacttcagccaaaacacccgcgtcccaaggctgccagaatttgccgattgggcacaggaacagggagatgcccccgccatactgtttgacaaggaattctgtgagtggatgattcagcagatcgggcccaaactagatggcaaaatacccgtttcccgggggtttccaatcgccgaggtgtttacattgaaacccctcgagttcggcaagcctaatacactggtgtgcttcgttagcaatttgtttccccccatgctgacggtgaactggcagcatcactcggtccctgtcgagggattcggtcctacctttgtgtcagccgtcgacggcttaagctttcaggcattttcatacctcaattttacgccagagccctccgacatcttttcctgcatcgtcacacatgagatcgatagatacactgctatcgcttactgggtcccacggaacgcactgccgtcggacctgctcgagaatgtgctttgcggtgtggccttcggcttaggcgtgttgggcattatagtggggattgtcctgatcatctacttccgaaagccttgctccggagattag

SEQ ID NO: 162008 - DNA, 873 bp, Artificial Sequence
  derived and/or modified sequence
gtgagctgctggttgtcagattcctgtcaggagttacagcgcagaggaattatactgtgttcttatggtgtgactagccccattgcagtgtttggcaggcctggtcgcctgcggaacaggcgccactttgagagacgcttggtgcccatgaagtggctcaaaaaatgtctggacactgcccccacaccaatgtggcccgacgatctgcagaatcacacctttttacacaccgtctattgccaagatggatctccgtctgtcgggcttagcgaggcatacgacgaggatcagctgttcttttttgatttttctcagaacacacgcgtgccccgtctacctgaattcgccgattgggctcaggagcagggtgatgctccggcgattttgtttgacaaagaattctgtgagtggatgatccaacagatcggccccaagctcgatgggaaaattccagtgtcaaggggctttccaattgctgaagtgtttactctgaaacctctggagttcggcaaaccgaatacactggtctgctttgtcagcaatctttttccaccaatgctgaccgtaaactggcagcatcactcggtccccgtagagggctttggtcctactttcgtgtctgccgtagacggactatcctttcaagcatttagctatctaaatttcacccccgagccatcagacatctttagctgcatcgtgacacacgagattgaccgctacaccgccatcgcctactgggtccccaggaatgctctacccagtgatctcttagaaaacgttctgtgtggcgtagcgtttgggctcggtgtgcttggtattatagtgggaatcgtgctgatcatatactttcgaaagccttgttcgggctag

SEQ ID NO: 162009 - DNA, 873 bp, Artificial Sequence
  derived and/or modified sequence
gtgagttgctggctaagcgactcctgccaggaactgcagaggcgcggcattattttgtgttcctacggcgtaacatctcccatcgcggtttttggccgccccggaaggctgcggaataggcggcacttcgaacggcggttggtcccaatgaaatggttaaaaaaatgccttgatactgctcccacgccaatgtggcctgacgaccttcaaaatcatacctttctgcataccgtgtactgtcaagatggatccccttcagtgggactttctgaagcgtacgacgaggatcagctctttttttttgacttctcgcaaaatacccgcgtgccacgattgccagagttcgcggattgggcccaggaacaaggcgatgcaccggccatcttattcgacaaggagttttgcgagtggatgatccagcagattggtcccaagctggacggcaaaattcccgtgtccaggggattccccatcgctgaggtgttcactctgaaaccacttgaattcggcaagccaaacacattagtctgctttgtctctaacttgttcccgcctatgcttacggttaactggcagcatcactccatcccagttgagggattcggcccaactttcgttagcgcagtggacggtctcagcttccaggccttttcctacttgaacttcacccctgaacccagcgatatcttctcatgtatcgtgacccacgaaatagatagatataccgccatcgcatattgggtgccacgaaatgctttacctagtgatctgcttgaaaatgtgctctgcggcgtcgcattcggtctgggtgtgttgggcattattgtaggtatcgtgttgatcatctatttcagaaaaccatgctcggggtag

SEQ ID NO: 162010 - DNA, 873 bp, Artificial Sequence
  derived and/or modified sequence
gtgtcatgctggctcagcgacagctgtcaagaactacagcggcgcgggatcatcctgtgttcgtatggagtcacctcccctattgcagtctttggaaggcccgggagactacgtaatagaaggcattttgagcgacggctggtaccaatgaaatggcttaagaagtgcttagatacagcacccacccctatgtggcctgatgacctgcagaaccatacttttcttcataccgtctactgccaggatgggagccccagcgtgggcctctcagaagcctacgatgaagaccagctgtttttctttgactttagtcagaatacaagggtccctcgcttaccagaattcgccgattgggctcaggaacagggagatgctccggcgatcctgtttgataaggaattttgcgagtggatgattcagcagattgggcctaagcttgatgggaagatccccgtgagtcggggctttcccatcgcagaggttttcacactgaaacctctggagtttggcaaaccaaatacactcgtatgtttcgtgtccaacctgttccctccgatgttgacagtcaactggcaacaccacagcgtccctgtcgaggggttcggtcccacgttcgtgagcgccgtggatggactctccttccaagccttcagctatcttaatttcacacctgaaccttctgacatcttctcgtgtatcgtgacccatgaaatcgataggtatactgccattgcctactgggtgccgaggaatgccctgccatcagatttgttagagaatgtcctctgcggtgttgcgttcggactgggggtcctgggtatcatagtaggaatcgttctgattatctactttagaaaaccctgctccggctag

SEQ ID NO: 162011 - DNA, 501 bp, Artificial Sequence
  derived and/or modified sequence
atggggcacgagcaaaatcagggcgcggcccttcttcagatgctccctctgctgtggctacttccccacagttgggcggtacctgaggggtttcctatagctgaagttttcacattgaaacctctggagtttggcaaaccaaacactcttgtctgttttgtctccaatctatttccacctatgctgactgtaaattggcagcatcattccgtcccggtggagggcttcgggccaacctttgtgtccgccgttgatggtctgtcctttcaggcatttagctatttgaattttaccccggaaccctccgatatcttctcgtgcattgtcacccacgagattgatcggtataccgcaattgcctactgggtgccaaggaacgctctacccagtgacttgctggagaatgtgctctgcggcgtggcattcggacttggagtgctggggatcatcgtgggaatcgtcctgataatatacttcagaaagccatgctcaggggattag

SEQ ID NO: 162012 - DNA, 510 bp, Artificial Sequence
  derived and/or modified sequence
atgtggcctgacgaccttcagaaccacacattcctgcacacagtatactgccaagatggctctccctccgtgggactgtctgaagcttacgacgaggatcagctgtttttcttcgacttcagccagaataccagagtcccacggctgccagagttcgcagattgggcccaagagcaaggagatgcgcccgcaattctgtttgacaaagagttttgcgaatggatgatccaacagattgggcccaaattggacggcaaaatccccgttagcaggggcttcccaatcgctgaagtctttactcttaaacccttagagtttggcaagcctaacactctggtctgcttcgtgtcaaacctgttcccacctatgttgacggtgaactggcagcaccacagcgtgcctgtagagggtttcggcccaacttttgtttcggctgttgacggcctgtcattccaggctttcagctatctaaactttaccccagaaccgtcggacattttcagttgttag

SEQ ID NO: 162013 - DNA, 630 bp, Artificial Sequence
  derived and/or modified sequence
atgggtcatgaacagatgttaccacttctgtggctgctaccccactcctgggccgtccctgaagctcctactccaatgtggccagatgacctgcaaaaccacacattcctgcacacagtgtactgccaggatgggagtcccagtgtgggactctctgaggcctacgacgaggaccagcttttcttcttcgacttttcccagaacactcgggtgcctcgcctgcccgaatttgctgactgggctcaggaacagggagatgctcctgccattttatttgacaaagagttctgcgagtggatgatccagcaaatagggccaaaacttgatgggaaaatcccggtgtccagaggtcaggagttttctggggagtgaagggaggagggctgcattaacctcattgatctgtacactgaataattccccttgataccagctccccatctcaaatactttctggttctcttcatcaccttaatttttccaccagccttggtctgcaccctgtgttcttttggtgggccgaagtacctagcatgtagtaggcattcagaactatgtattgaatgtgatgaattcaacaggtaccaactgatacctactgaatattaacacttgtgctactatgcccag

SEQ ID NO: 162014 - DNA, 1123 bp, Artificial Sequence
  derived and/or modified sequence
gatctaaggccaccctctcggggagggagttggggaagctgggttggctgggttggtagctcctacctactgtgtggcaagaaggtatgggtcatgaacagaaccaaggagctgcgctgctacagatgttaccacttctgtggctgctaccccactcctgggccgtccctgaagctcctactccaatgtggccagatgacctgcaaaaccacacattcctgcacacagtgtactgccaggatgggagtcccagtgtgggactctctgaggcctacgacgaggaccagcttttcttcttcgacttttcccagaacactcgggtgcctcgcctgcccgaatttgctgactgggctcaggaacagggagatgctcctgccattttatttgacaaagagttctgcgagtggatgatccagcaaatagggccaaaacttgatgggaaaatcccggtgtccagagggtttcctatcgctgaagtgttcacgctgaagcccctggagtttggcaagcccaacactttggtctgttttgtcagtaatctcttcccacccatgctgacagtgaactggcagcatcattccgtccctgtggaaggatttgggcctacttttgtctcagctgtcgatggactcagcttccaggccttttcttacttaaacttcacaccagaaccttctgacattttctcctgcattgtgactcacgaaattgaccgctacacagcaattgcctattgggtaccccggaacgcactgccctcagatctgctggagaatgtgctgtgtggcgtggcctttggcctgggtgtgctgggcatcatcgtgggcattgttctcatcatctacttccggaagccttgctcaggtgactgattcttccagaccagagtttgatgccagcagcttcggccatccaaacagaggatgctcagatttctcacatcctgcccaggatctcctcttagggtagaagtctctgggacatccctggggtgtgtgtgtagatttcccacctggggactctgctgtccctgggcttgcatcccagggatcccagagtggcctgcctatcacaaccacatcccttccccccacaaggcaataaatctcatttctttatatca

SEQ ID NO: 162015 - DNA, 1010 bp, Artificial Sequence
  derived and/or modified sequence
ctctcggggagggagttggggaagctgggttggctgggttggtagctcctacctactgtgtggcaagaaggtatgggtcatgaacagaaccaaggagctgcgctgctacagatgttaccacttctgtggctgctaccccactcctgggccgtccctgaagctcctactccaatgtggccagatgacctgcaaaaccacacattcctgcacacagtgtactgccaggatgggagtcccagtgtgggactctctgaggcctacgacgaggaccagcttttcttcttcgacttttcccagaacactcgggtgcctcgcctgcccgaatttgctgactgggctcaggaacagggagatgctcctgccattttatttgacaaagagttctgcgagtggatgatccagcaaatagggccaaaacttgatgggaaaatcccggtgtccagagtgaactggcagcatcattccgtccctgtggaaggatttgggcctacttttgtctcagctgtcgatggactcagcttccaggccttttcttacttaaacttcacaccagaaccttctgacattttctcctgcattgtgactcacgaaattgaccgctacacagcaattgcctattgggtaccccggaacgcactgccctcagatctgctggagaatgtgctgtgtggcgtggcctttggcctgggtgtgctgggcatcatcgtgggcattgttctcatcatctacttccggaagccttgctcaggtgactgattcttccagaccagagtttgatgccagcagcttcggccatccaaacagaggatgctcagatttctcacatcctgcccaggatctcctcttagggtagaagaagtctctgggacatccctggggtgtgtgtgtagatttcccacctggggactctgctgtccctgggcttgcatcccagggatcccagagtggcctgcctatcacaaccacatcccttccccccacaaggcaataaatctcatttctttatatca

SEQ ID NO: 162016 - DNA, 780 bp, Artificial Sequence
  derived and/or modified sequence
cctacctactgtgtggcaagaaggtatgggtcatgaacagaaccaaggagctgcgctgctacagatgttaccacttctgtggctgctaccccactcctgggccgtccctgaagggtttcctatcgctgaagtgttcacgctgaagcccctggagtttggcaagcccaacactttggtctgttttgtcagtaatctcttcccacccatgctgacagtgaactggcagcatcattccgtccctgtggaaggatttgggcctacttttgtctcagctgtcgatggactcagcttccaggccttttcttacttaaacttcacaccagaaccttctgacattttctcctgcattgtgactcacgaaattgaccgctacacagcaattgcctattgggtaccccggaacgcactgccctcagatctgctggagaatgtgctgtgtggcgtggcctttggcctgggtgtgctgggcatcatcgtgggcattgttctcatcatctacttccggaagccttgctcaggtgactgattcttccagaccagagtttgatgccagcagcttcggccatccaaacagaggatgctcagatttctcacatcctgcccaggatctcctcttagggtagaagaagtctctgggacatccctggggtgtgtgtgtagatttcccacctggggactctgctgtccctgggcttgcatcccagggatcccagagtggcctgcctatcacaaccacatcccttccccccacaaggcaataaatctcatttctttatatca

SEQ ID NO: 162017 - DNA, 1126 bp, Artificial Sequence
  derived and/or modified sequence
gatctaaggccaccctctcggggagggagttggggaagctgggttggctgggttggtagctcctacctactgtgtggcaagaaggtatgggtcatgaacagaaccaaggagctgcgctgctacagatgttaccacttctgtggctgctaccccactcctgggccgtccctgaagctcctactccaatgtggccagatgacctgcaaaaccacacattcctgcacacagtgtactgccaggatgggagtcccagtgtgggactctctgaggcctacgacgaggaccagcttttcttcttcgacttttcccagaacactcgggtgcctcgcctgcccgaatttgctgactgggctcaggaacagggagatgctcctgccattttatttgacaaagagttctgcgagtggatgatccagcaaatagggccaaaacttgatgggaaaatcccggtgtccagagggtttcctatcgctgaagtgttcacgctgaagcccctggagtttggcaagcccaacactttggtctgttttgtcagtaatctcttcccacccatgctgacagtgaactggcagcatcattccgtccctgtggaaggatttgggcctacttttgtctcagctgtcgatggactcagcttccaggccttttcttacttaaacttcacaccagaaccttctgacattttctcctgcattgtgactcacgaaattgaccgctacacagcaattgcctattgggtaccccggaacgcactgccctcagatctgctggagaatgtgctgtgtggcgtggcctttggcctgggtgtgctgggcatcatcgtgggcattgttctcatcatctacttccggaagccttgctcaggtgactgattcttccagaccagagtttgatgccagcagcttcggccatccaaacagaggatgctcagatttctcacatcctgcccaggatctcctcttagggtagaagaagtctctgggacatccctggggtgtgtgtgtagatttcccacctggggactctgctgtccctgggcttgcatcccagggatcccagagtggcctgcctatcacaaccacatcccttccccccacaaggcaataaatctcatttctttatatca

SEQ ID NO: 162018 - DNA, 1007 bp, Artificial Sequence
  derived and/or modified sequence
ctctcggggagggagttggggaagctgggttggctgggttggtagctcctacctactgtgtggcaagaaggtatgggtcatgaacagaaccaaggagctgcgctgctacagatgttaccacttctgtggctgctaccccactcctgggccgtccctgaagctcctactccaatgtggccagatgacctgcaaaaccacacattcctgcacacagtgtactgccaggatgggagtcccagtgtgggactctctgaggcctacgacgaggaccagcttttcttcttcgacttttcccagaacactcgggtgcctcgcctgcccgaatttgctgactgggctcaggaacagggagatgctcctgccattttatttgacaaagagttctgcgagtggatgatccagcaaatagggccaaaacttgatgggaaaatcccggtgtccagagtgaactggcagcatcattccgtccctgtggaaggatttgggcctacttttgtctcagctgtcgatggactcagcttccaggccttttcttacttaaacttcacaccagaaccttctgacattttctcctgcattgtgactcacgaaattgaccgctacacagcaattgcctattgggtaccccggaacgcactgccctcagatctgctggagaatgtgctgtgtggcgtggcctttggcctgggtgtgctgggcatcatcgtgggcattgttctcatcatctacttccggaagccttgctcaggtgactgattcttccagaccagagtttgatgccagcagcttcggccatccaaacagaggatgctcagatttctcacatcctgcccaggatctcctcttagggtagaagtctctgggacatccctggggtgtgtgtgtagatttcccacctggggactctgctgtccctgggcttgcatcccagggatcccagagtggcctgcctatcacaaccacatcccttccccccacaaggcaataaatctcatttctttatatca

SEQ ID NO: 162019 - DNA, 777 bp, Artificial Sequence
  derived and/or modified sequence
cctacctactgtgtggcaagaaggtatgggtcatgaacagaaccaaggagctgcgctgctacagatgttaccacttctgtggctgctaccccactcctgggccgtccctgaagggtttcctatcgctgaagtgttcacgctgaagcccctggagtttggcaagcccaacactttggtctgttttgtcagtaatctcttcccacccatgctgacagtgaactggcagcatcattccgtccctgtggaaggatttgggcctacttttgtctcagctgtcgatggactcagcttccaggccttttcttacttaaacttcacaccagaaccttctgacattttctcctgcattgtgactcacgaaattgaccgctacacagcaattgcctattgggtaccccggaacgcactgccctcagatctgctggagaatgtgctgtgtggcgtggcctttggcctgggtgtgctgggcatcatcgtgggcattgttctcatcatctacttccggaagccttgctcaggtgactgattcttccagaccagagtttgatgccagcagcttcggccatccaaacagaggatgctcagatttctcacatcctgcccaggatctcctcttagggtagaagtctctgggacatccctggggtgtgtgtgtagatttcccacctggggactctgctgtccctgggcttgcatcccagggatcccagagtggcctgcctatcacaaccacatcccttccccccacaaggcaataaatctcatttctttatatca

SEQ ID NO: 162020 - DNA, 871 bp, Artificial Sequence
  derived and/or modified sequence
gtttcctgctggctgagcgattcctgccaagagcttcaaagaagagggattattttatgcagttatggggtcacttctcccattgctgtctttgggaggcctggtaggttaaggaacagaagacattttgagagacgcttggtgccaatgaagtggctgaagaaatgtctggatacagctcctactccaatgtggccagatgacctgcaaaaccacacattcctgcacacagtgtactgccaggatgggagtcccagtgtgggactctctgaggcctacgacgaggaccagcttttcttcttcgacttttcccagaacactcgggtgcctcgcctgcccgaatttgctgactgggctcaggaacagggagatgctcctgccattttatttgacaaagagttctgcgagtggatgatccagcaaatagggccaaaacttgatgggaaaatcccggtgtccagagggtttcctatcgctgaagtgttcacgctgaagcccctggagtttggcaagcccaacactttggtctgttttgtcagtaatctcttcccacccatgctgacagtgaactggcagcatcattccgtccctgtggaaggatttgggcctacttttgtctcagctgtcgatggactcagcttccaggccttttcttacttaaacttcacaccagaaccttctgacattttctcctgcattgtgactcacgaaattgaccgctacacagcaattgcctattgggtaccccggaacgcactgccctcagatctgctggagaatgtgctgtgtggcgtggcctttggcctgggtgtgctgggcatcatcgtgggcattgttctcatcatctacttccggaagccttgctcaggtg

SEQ ID NO: 162021 - DNA, 611 bp, Artificial Sequence
  derived and/or modified sequence
ttgactgacatctccgccccacaagggccccttctcacctggatcctaaagccttccagggggcctccaaagttgccctcggcttggtacgggctcctactccaatgtggccagatgacctgcaaaaccacacattcctgcacacagtgtactgccaggatgggagtcccagtgtgggactctctgaggcctacgacgaggaccagcttttcttcttcgacttttcccagaacactcgggtgcctcgcctgcccgaatttgctgactgggctcaggaacagggagatgctcctgccattttatttgacaaagagttctgcgagtggatgatccagcaaatagggccaaaacttgatgggaaaatcccggtgtccagagggtttcctatcgctgaagtgttcacgctgaagcccctggagtttggcaagcccaacactttggtctgttttgtcagtaatctcttcccacccatgctgacagtgaactggcagcatcattccgtccctgtggaaggatttgggcctacttttgtctcagctgtcgatggactcagcttccaggccttttcttacttaaacttcacaccagaaccttctgacattttctcctgc

SEQ ID NO: 162022 - DNA, 1003 bp, Artificial Sequence
  derived and/or modified sequence
ctctcggggagggagttggggaagctgggttggctgggttggtagctcctacctactgtgtggcaagaaggtatgggtcatgaacagaaccaaggagctgcgctgctacagatgttaccacttctgtggctgctaccccactcctgggccgtccctgaagctcctactccaatgtggccagatgacctgcaaaaccacacattcctgcacacagtgtactgccaggatgggagtcccagtgtgggactctctgaggcctacgacgaggaccagcttttcttcttcgacttttcccagaacactcgggtgcctcgcctgcccgaatttgctgactgggctcaggaacagggagatgctcctgccattttatttgacaaagagttctgcgagtggatgatccagcaaatagggccaaaacttgatgggaaaatcccggtgtccagagtgaactggcagcatcattccatccctgtggaaggatttgggcctacttttgtctcagctgtcgatggactcagcttccaggccttttcttacttaaacttcacaccagaaccttctgacattttctcctgcattgtgactcacgaaattgaccgctacacagcaattgcctattgggtaccccggaacgcactgccctcagatctgctggagaatgtgctgtgtggcgtggcctttggcctgggtgtgctgggcatcatcgtgggcattgttctcatcatctacttccggaagccttgctcaggtgactgattcttccagaccagagtttgatgccagcagcttcggccatccaaacagaggatgctcagatttctcacatcctgcccaggatctcctcttagggtagaagaagtctctgggacatccctggggtgtgtgtgtagatttcccacctggggactctgctgtccctgggcttgcatcccagggatcccagagtggcctgcctatcacaaccacatcccttccccccacaaggcaataaatctcatttctt

SEQ ID NO: 162023 - DNA, 518 bp, Artificial Sequence
  derived and/or modified sequence
ctcctactccaatgtggccagatgacctgcaaaaccacacattcctgcacacagtgtactgccaggatgggagtcccagtgtgggactctctgaggcctacgacgaggaccagcttttcttcttcgacttttcccagaacactcgggtgcctcgcctgcccgaatttgctgactgggctcaggaacagggagatgctcctgccattttatttgacaaagagttctgcgagtggatgatccagcaaatagggccaaaacttgatgggaaaatcccggtgtccagagggtttcctatcgctgaagtgttcacgctgaagcccctggagtttggcaagcccaacactttggtctgttttgtcagtaatctcttcccacccatgctgacagtgaactggcagcatcattccgtccctgtggaaggatttgggcctacttttgtctcagctgtcgatggactcagcttccaggccttttcttacttaaacttcacaccagaaccttctgacattttctcctgc

SEQ ID NO: 162024 - DNA, 1119 bp, Artificial Sequence
  derived and/or modified sequence
gatctaaggccaccctctcggggagggagttggggaagctgggttggctgggttggtagctcctacctactgtgtggcaagaaggtatgggtcatgaacagaaccaaggagctgcgctgctacagatgttaccacttctgtggctgctaccccactcctgggccgtccctgaagctcctactccaatgtggccagatgacctgcaaaaccacacattcctgcacacagtgtactgccaggatgggagtcccagtgtgggactctctgaggcctacgacgaggaccagcttttcttcttcgacttttcccagaacactcgggtgcctcgcctgcccgaatttgctgactgggctcaggaacagggagatgctcctgccattttatttgacaaagagttctgcgagtggatgatccagcaaatagggccaaaacttgatgggaaaatcccggtgtccagagggtttcctatcgctgaagtgttcacgctgaagcccctggagtttggcaagcccaacactttggtctgttttgtcagtaatctcttcccacccatgctgacagtgaactggcagcatcattccatccctgtggaaggatttgggcctacttttgtctcagctgtcgatggactcagcttccaggccttttcttacttaaacttcacaccagaaccttctgacattttctcctgcattgtgactcacgaaattgaccgctacacagcaattgcctattgggtaccccggaacgcactgccctcagatctgctggagaatgtgctgtgtggcgtggcctttggcctgggtgtgctgggcatcatcgtgggcattgttctcatcatctacttccggaagccttgctcaggtgactgattcttccagaccagagtttgatgccagcagcttcggccatccaaacagaggatgctcagatttctcacatcctgcccaggatctcctcttagggtagaagaagtctctgggacatccctggggtgtgtgtgtagatttcccacctggggactctgctgtccctgggcttgcatcccagggatcccagagtggcctgcctatcacaaccacatcccttccccccacaaggcaataaatctcatttctt

SEQ ID NO: 162025 - DNA, 518 bp, Artificial Sequence
  derived and/or modified sequence
ctcctactccaatgtggccagatgacctgcaaaaccacacattcctgcacacagtgtactgccaggatgggagtcccagtgtgggactctctgaggcctacgacgaggaccagcttttcttcttcgacttttcccagaacactcgggtgcctcgcctgcccgaatttgctgactgggctcaggaacagggagatgctcctgccattttatttgacaaagagttctgcgagtggatgatccagcaaatagggccaaaacttgatgggaaaatcccggtgtccagagggtttcctatcgctgaagtgttcacgctgaagcccctggagtttggcaagcccaacactttggtctgttttgtcagtaatctcttcccacccatgctgacagtgaactggcagcatcattccatccctgtggaaggatttgggcctacttttgtctcagctgtcgatggactcagcttccaggccttttcttacttaaacttcacaccagaaccttctgacattttctcctgc

SEQ ID NO: 162026 - DNA, 773 bp, Artificial Sequence
  derived and/or modified sequence
cctacctactgtgtggcaagaaggtatgggtcatgaacagaaccaaggagctgcgctgctacagatgttaccacttctgtggctgctaccccactcctgggccgtccctgaagggtttcctatcgctgaagtgttcacgctgaagcccctggagtttggcaagcccaacactttggtctgttttgtcagtaatctcttcccacccatgctgacagtgaactggcagcatcattccatccctgtggaaggatttgggcctacttttgtctcagctgtcgatggactcagcttccaggccttttcttacttaaacttcacaccagaaccttctgacattttctcctgcattgtgactcacgaaattgaccgctacacagcaattgcctattgggtaccccggaacgcactgccctcagatctgctggagaatgtgctgtgtggcgtggcctttggcctgggtgtgctgggcatcatcgtgggcattgttctcatcatctacttccggaagccttgctcaggtgactgattcttccagaccagagtttgatgccagcagcttcggccatccaaacagaggatgctcagatttctcacatcctgcccaggatctcctcttagggtagaagaagtctctgggacatccctggggtgtgtgtgtagatttcccacctggggactctgctgtccctgggcttgcatcccagggatcccagagtggcctgcctatcacaaccacatcccttccccccacaaggcaataaatctcatttctt

SEQ ID NO: 162027 - DNA, 871 bp, Artificial Sequence
  derived and/or modified sequence
gtttcctgctggctgagcgattcctgccaagagcttcaaagaagagggattattttatgcagttatggggtcacttctcccattgctgtctttgggaggcctggtaggttaaggaacagaagacattttgagagacgcttggtgccaatgaagtggctgaagaaatgtctggatacagctcctactccaatgtggccagatgacctgcaaaaccacacattcctgcacacagtgtactgccaggatgggagtcccagtgtgggactctctgaggcctacgacgaggaccagcttttcttcttcgacttttcccagaacactcgggtgcctcgcctgcccgaatttgctgactgggctcaggaacagggagatgctcctgccattttatttgacaaagagttctgcgagtggatgatccagcaaatagggccaaaacttgatgggaaaatcccggtgtccagagggtttcctatcgctgaagtgttcacgctgaagcccctggagtttggcaagcccaacactttggtctgttttgtcagtaatctcttcccacccatgctgacagtgaactggcagcatcattccatccctgtggaaggatttgggcctacttttgtctcagctgtcgatggactcagcttccaggccttttcttacttaaacttcacaccagaaccttctgacattttctcctgcattgtgactcacgaaattgaccgctacacagcaattgcctattgggtaccccggaacgcactgccctcagatctgctggagaatgtgctgtgtggcgtggcctttggcctgggtgtgctgggcatcatcgtgggcattgttctcatcatctacttccggaagccttgctcaggtg

SEQ ID NO: 162028 - DNA, 372 bp, Artificial Sequence
  derived and/or modified sequence
atgggccacgagcagatgctgcccctgctgtggctgctgccccacagctgggccgtgcctgaggcccccacccccatgtggccagatgacctgcagaaccacaccttcctgcacacagtgtactgccaggacggcagccccagcgtgggcctgtctgaggcctatgatgaggaccagctgttcttctttgacttcagccagaacaccagggtgccccggctgcctgagtttgctgactgggcccaggagcagggagatgccccagccatcctgtttgacaaggagttctgtgagtggatgatccagcagatcggccccaagctggatggcaagatccctgtgtcccggggccaggagttctctggagagtag

SEQ ID NO: 162029 - DNA, 786 bp, Artificial Sequence
  derived and/or modified sequence
atgggccacgagcagaaccagggcgccgccctgctgcagatgctgcccctgctgtggctgctgccccacagctgggccgtgcctgaggcccccacccccatgtggccagatgacctgcagaaccacaccttcctgcacacagtgtactgccaggacggcagccccagcgtgggcctgtctgaggcctatgatgaggaccagctgttcttctttgacttcagccagaacaccagggtgccccggctgcctgagtttgctgactgggcccaggagcagggagatgccccagccatcctgtttgacaaggagttctgtgagtggatgatccagcagatcggccccaagctggatggcaagatccctgtgtcccggggcttccccatcgccgaggtgttcaccctgaagcccctggagtttgggaagcccaacaccctggtgtgctttgtgagcaacctcttcccccccatgctgactgtgaactggcagcaccacagcgtgcctgtggagggcttcggccccacctttgtgtctgctgtggatggcctgtccttccaggccttctcctacctgaacttcaccccagagcccagcgacatcttcagctgcatcgtgacccatgaaattgaccgctacacagccatcgcctactgggtgcccagaaatgccctgcccagcgacctgctggagaatgtgctgtgtggggtggccttcggcctgggcgtgctgggcatcatcgtgggcatcgtgctgatcatctacttcaggaagccctgcagcggggactag

SEQ ID NO: 162030 - DNA, 684 bp, Artificial Sequence
  derived and/or modified sequence
atgggccacgagcagaaccagggcgccgccctgctgcagatgctgcccctgctgtggctgctgccccacagctgggccgtgcctgaggcccccacccccatgtggccagatgacctgcagaaccacaccttcctgcacacagtgtactgccaggacggcagccccagcgtgggcctgtctgaggcctatgatgaggaccagctgttcttctttgacttcagccagaacaccagggtgccccggctgcctgagtttgctgactgggcccaggagcagggagatgccccagccatcctgtttgacaaggagttctgtgagtggatgatccagcagatcggccccaagctggatggcaagatccctgtgtcccgggtgaactggcagcaccacagcgtgcctgtggagggcttcggccccacctttgtgtctgctgtggatggcctgtccttccaggccttctcctacctgaacttcaccccagagcccagcgacatcttcagctgcatcgtgacccatgaaattgaccgctacacagccatcgcctactgggtgcccagaaatgccctgcccagcgacctgctggagaatgtgctgtgtggggtggccttcggcctgggcgtgctgggcatcatcgtgggcatcgtgctgatcatctacttcaggaagccctgcagcggggactag

SEQ ID NO: 162031 - DNA, 501 bp, Artificial Sequence
  derived and/or modified sequence
atgggccacgagcagaaccagggcgccgccctgctgcagatgctgcccctgctgtggctgctgccccacagctgggccgtgcctgagggcttccccatcgccgaggtgttcaccctgaagcccctggagtttgggaagcccaacaccctggtgtgctttgtgagcaacctcttcccccccatgctgactgtgaactggcagcaccacagcgtgcctgtggagggcttcggccccacctttgtgtctgctgtggatggcctgtccttccaggccttctcctacctgaacttcaccccagagcccagcgacatcttcagctgcatcgtgacccatgaaattgaccgctacacagccatcgcctactgggtgcccagaaatgccctgcccagcgacctgctggagaatgtgctgtgtggggtggccttcggcctgggcgtgctgggcatcatcgtgggcatcgtgctgatcatctacttcaggaagccctgcagcggggactag

SEQ ID NO: 162032 - DNA, 726 bp, Artificial Sequence
  derived and/or modified sequence
atgaagtggctgaagaagtgcctggacacagcccccacccccatgtggccagatgacctgcagaaccacaccttcctgcacacagtgtactgccaggacggcagccccagcgtgggcctgtctgaggcctatgatgaggaccagctgttcttctttgacttcagccagaacaccagggtgccccggctgcctgagtttgctgactgggcccaggagcagggagatgccccagccatcctgtttgacaaggagttctgtgagtggatgatccagcagatcggccccaagctggatggcaagatccctgtgtcccggggcttccccatcgccgaggtgttcaccctgaagcccctggagtttgggaagcccaacaccctggtgtgctttgtgagcaacctcttcccccccatgctgactgtgaactggcagcaccacagcgtgcctgtggagggcttcggccccacctttgtgtctgctgtggatggcctgtccttccaggccttctcctacctgaacttcaccccagagcccagcgacatcttcagctgcatcgtgacccatgaaattgaccgctacacagccatcgcctactgggtgcccagaaatgccctgcccagcgacctgctggagaatgtgctgtgtggggtggccttcggcctgggcgtgctgggcatcatcgtgggcatcgtgctgatcatctacttcaggaagccctgcagcggctag

SEQ ID NO: 162033 - DNA, 510 bp, Artificial Sequence
  derived and/or modified sequence
atgtggccagatgacctgcagaaccacaccttcctgcacacagtgtactgccaggacggcagccccagcgtgggcctgtctgaggcctatgatgaggaccagctgttcttctttgacttcagccagaacaccagggtgccccggctgcctgagtttgctgactgggcccaggagcagggagatgccccagccatcctgtttgacaaggagttctgtgagtggatgatccagcagatcggccccaagctggatggcaagatccctgtgtcccggggcttccccatcgccgaggtgttcaccctgaagcccctggagtttgggaagcccaacaccctggtgtgctttgtgagcaacctcttcccccccatgctgactgtgaactggcagcaccacagcgtgcctgtggagggcttcggccccacctttgtgtctgctgtggatggcctgtccttccaggccttctcctacctgaacttcaccccagagcccagcgacatcttcagctgctag

SEQ ID NO: 162034 - DNA, 873 bp, Artificial Sequence
  derived and/or modified sequence
gtgtcctgctggctgagtgacagctgccaggagctgcagaggcggggcatcatcctgtgcagctatggagtgaccagccccatcgctgtgtttggccggcccggccgcctgaggaacagaagacactttgaaagaaggctggtgcccatgaagtggctgaagaagtgcctggacacagcccccacccccatgtggccagatgacctgcagaaccacaccttcctgcacacagtgtactgccaggacggcagccccagcgtgggcctgtctgaggcctatgatgaggaccagctgttcttctttgacttcagccagaacaccagggtgccccggctgcctgagtttgctgactgggcccaggagcagggagatgccccagccatcctgtttgacaaggagttctgtgagtggatgatccagcagatcggccccaagctggatggcaagatccctgtgtcccggggcttccccatcgccgaggtgttcaccctgaagcccctggagtttgggaagcccaacaccctggtgtgctttgtgagcaacctcttcccccccatgctgactgtgaactggcagcaccacagcgtgcctgtggagggcttcggccccacctttgtgtctgctgtggatggcctgtccttccaggccttctcctacctgaacttcaccccagagcccagcgacatcttcagctgcatcgtgacccatgaaattgaccgctacacagccatcgcctactgggtgcccagaaatgccctgcccagcgacctgctggagaatgtgctgtgtggggtggccttcggcctgggcgtgctgggcatcatcgtgggcatcgtgctgatcatctacttcaggaagccctgcagcggctag

SEQ ID NO: 162035 - DNA, 684 bp, Artificial Sequence
  derived and/or modified sequence
atgggccacgagcagaaccagggcgccgccctgctgcagatgctgcccctgctgtggctgctgccccacagctgggccgtgcctgaggcccccacccccatgtggccagatgacctgcagaaccacaccttcctgcacacagtgtactgccaggacggcagccccagcgtgggcctgtctgaggcctatgatgaggaccagctgttcttctttgacttcagccagaacaccagggtgccccggctgcctgagtttgctgactgggcccaggagcagggagatgccccagccatcctgtttgacaaggagttctgtgagtggatgatccagcagatcggccccaagctggatggcaagatccctgtgtcccgggtgaactggcagcaccacagcatccctgtggagggcttcggccccacctttgtgtctgctgtggatggcctgtccttccaggccttctcctacctgaacttcaccccagagcccagcgacatcttcagctgcatcgtgacccatgaaattgaccgctacacagccatcgcctactgggtgcccagaaatgccctgcccagcgacctgctggagaatgtgctgtgtggggtggccttcggcctgggcgtgctgggcatcatcgtgggcatcgtgctgatcatctacttcaggaagccctgcagcggggactag

SEQ ID NO: 162036 - DNA, 786 bp, Artificial Sequence
  derived and/or modified sequence
atgggccacgagcagaaccagggcgccgccctgctgcagatgctgcccctgctgtggctgctgccccacagctgggccgtgcctgaggcccccacccccatgtggccagatgacctgcagaaccacaccttcctgcacacagtgtactgccaggacggcagccccagcgtgggcctgtctgaggcctatgatgaggaccagctgttcttctttgacttcagccagaacaccagggtgccccggctgcctgagtttgctgactgggcccaggagcagggagatgccccagccatcctgtttgacaaggagttctgtgagtggatgatccagcagatcggccccaagctggatggcaagatccctgtgtcccggggcttccccatcgccgaggtgttcaccctgaagcccctggagtttgggaagcccaacaccctggtgtgctttgtgagcaacctcttcccccccatgctgactgtgaactggcagcaccacagcatccctgtggagggcttcggccccacctttgtgtctgctgtggatggcctgtccttccaggccttctcctacctgaacttcaccccagagcccagcgacatcttcagctgcatcgtgacccatgaaattgaccgctacacagccatcgcctactgggtgcccagaaatgccctgcccagcgacctgctggagaatgtgctgtgtggggtggccttcggcctgggcgtgctgggcatcatcgtgggcatcgtgctgatcatctacttcaggaagccctgcagcggggactag

SEQ ID NO: 162037 - DNA, 510 bp, Artificial Sequence
  derived and/or modified sequence
atgtggccagatgacctgcagaaccacaccttcctgcacacagtgtactgccaggacggcagccccagcgtgggcctgtctgaggcctatgatgaggaccagctgttcttctttgacttcagccagaacaccagggtgccccggctgcctgagtttgctgactgggcccaggagcagggagatgccccagccatcctgtttgacaaggagttctgtgagtggatgatccagcagatcggccccaagctggatggcaagatccctgtgtcccggggcttccccatcgccgaggtgttcaccctgaagcccctggagtttgggaagcccaacaccctggtgtgctttgtgagcaacctcttcccccccatgctgactgtgaactggcagcaccacagcatccctgtggagggcttcggccccacctttgtgtctgctgtggatggcctgtccttccaggccttctcctacctgaacttcaccccagagcccagcgacatcttcagctgctag

SEQ ID NO: 162038 - DNA, 501 bp, Artificial Sequence
  derived and/or modified sequence
atgggccacgagcagaaccagggcgccgccctgctgcagatgctgcccctgctgtggctgctgccccacagctgggccgtgcctgagggcttccccatcgccgaggtgttcaccctgaagcccctggagtttgggaagcccaacaccctggtgtgctttgtgagcaacctcttcccccccatgctgactgtgaactggcagcaccacagcatccctgtggagggcttcggccccacctttgtgtctgctgtggatggcctgtccttccaggccttctcctacctgaacttcaccccagagcccagcgacatcttcagctgcatcgtgacccatgaaattgaccgctacacagccatcgcctactgggtgcccagaaatgccctgcccagcgacctgctggagaatgtgctgtgtggggtggccttcggcctgggcgtgctgggcatcatcgtgggcatcgtgctgatcatctacttcaggaagccctgcagcggggactag

SEQ ID NO: 162039 - DNA, 873 bp, Artificial Sequence
  derived and/or modified sequence
gtgtcctgctggctgagtgacagctgccaggagctgcagaggcggggcatcatcctgtgcagctatggagtgaccagccccatcgctgtgtttggccggcccggccgcctgaggaacagaagacactttgaaagaaggctggtgcccatgaagtggctgaagaagtgcctggacacagcccccacccccatgtggccagatgacctgcagaaccacaccttcctgcacacagtgtactgccaggacggcagccccagcgtgggcctgtctgaggcctatgatgaggaccagctgttcttctttgacttcagccagaacaccagggtgccccggctgcctgagtttgctgactgggcccaggagcagggagatgccccagccatcctgtttgacaaggagttctgtgagtggatgatccagcagatcggccccaagctggatggcaagatccctgtgtcccggggcttccccatcgccgaggtgttcaccctgaagcccctggagtttgggaagcccaacaccctggtgtgctttgtgagcaacctcttcccccccatgctgactgtgaactggcagcaccacagcatccctgtggagggcttcggccccacctttgtgtctgctgtggatggcctgtccttccaggccttctcctacctgaacttcaccccagagcccagcgacatcttcagctgcatcgtgacccatgaaattgaccgctacacagccatcgcctactgggtgcccagaaatgccctgcccagcgacctgctggagaatgtgctgtgtggggtggccttcggcctgggcgtgctgggcatcatcgtgggcatcgtgctgatcatctacttcaggaagccctgcagcggctag

SEQ ID NO: 162040 - DNA, 372 bp, Artificial Sequence
  derived and/or modified sequence
atgggccacgagcagatgctgcccctgctgtggctgctgccccacagttgggccgtgcccgaggctccgaccccaatgtggcctgacgacttgcagaaccacacattcttgcacaccgtctactgccaggacggctctccgtctgtcggtctcagtgaggcctacgacgaagatcagttattcttttttgatttttcccagaacacccgggttccacggctgcccgagtttgccgattgggctcaggagcagggggatgcaccggctatcctgttcgataaagaattctgcgagtggatgatccagcaaattgggccaaaattggacggcaagattcccgtgtcaagaggtcaggaattctctggagaatag

SEQ ID NO: 162041 - DNA, 786 bp, Artificial Sequence
  derived and/or modified sequence
atgggccacgagcagaaccagggcgccgccctgctgcagatgctgcccctgctttggttgctgcctcatagttgggccgtcccagaagcgccaacccccatgtggcccgacgacttgcagaatcacacattcctgcacacagtatactgccaagatgggagcccttctgtgggcctctcggaggcatacgatgaagaccaactgttcttcttcgatttcagccagaatacaagagtgcccaggctgcccgaattcgctgattgggctcaggaacaaggagatgcaccagcaatcttgttcgataaggagttttgcgaatggatgatccagcagatcggacccaagctggacggaaagataccagtttcccggggtttcccaatcgcagaggtgttcaccctgaaaccacttgagttcgggaagccaaacaccctcgtgtgcttcgtgtctaacctgttccctcccatgctcaccgttaactggcaacatcacagtgtgcctgtggagggctttggtcctacttttgtgtcagctgtggatggactgagctttcaggctttttcttatcttaacttcacccccgagcctagcgacattttttcctgtatagtcacccacgagatcgatcggtatacggctattgcctattgggtaccccggaatgctctgccatccgacttgcttgaaaatgtgctgtgtggagtcgcctttggtctgggggttttgggtattatcgtcggaatagtgcttattatttacttccggaaaccctgctcgggggattag

SEQ ID NO: 162042 - DNA, 684 bp, Artificial Sequence
  derived and/or modified sequence
atgggccacgagcagaaccagggcgccgccctgctgcagatgctgccactgctttggcttctcccccactcctgggccgtgcccgaggcccccacccccatgtggcctgacgacctccagaaccatacctttttgcatactgtgtattgccaagacggatccccctcagttggccttagtgaggcgtatgatgaagaccaactgttctttttcgatttctctcagaacacccgcgttcctcgactcccagaatttgccgactgggctcaggagcagggtgacgcgcccgctatattgtttgataaagaattttgcgaatggatgatacaacaaattggcccaaagctggatggcaaaatacctgtatccagggtcaattggcaacaccattctgtccccgtggaagggtttgggcccacatttgtgtcagccgtcgacggtctgtcgtttcaggccttctcctatctcaatttcacccctgaaccctccgatatattctcctgcattgttacacacgagattgacaggtatactgccatcgcttattgggtcccaagaaatgctttgcccagcgatttgttggaaaacgttctgtgcggcgtggcgttcggactgggggtattaggcattatcgtcgggattgtcctgatcatctactttcggaagccctgcagcggggattag

SEQ ID NO: 162043 - DNA, 501 bp, Artificial Sequence
  derived and/or modified sequence
atgggccacgagcagaaccagggcgccgccctgctgcagatgctgcctcttctgtggctgctgcctcacagttgggccgtccccgagggctttcctattgcggaagtgttcactctcaaaccacttgaattcgggaaaccaaacactctcgtgtgtttcgtgtcaaatctctttccgcccatgctgacagtcaattggcagcaccatagtgttcctgtcgaagggttcggccccacttttgtgagcgctgttgacggcctgagcttccaagcattctcctatctgaacttcactccggaaccttccgacatcttcagctgcattgtgacacacgaaattgacagatatactgcgattgcctactgggttccgcgcaacgccctccctagtgacctcctggaaaacgttctgtgcggtgttgcattcggcttaggcgtgctcgggatcattgtcggtattgtgctgattatttactttcggaagccgtgcagcggtgactag

SEQ ID NO: 162044 - DNA, 786 bp, Artificial Sequence
  derived and/or modified sequence
atgggccacgagcagaaccagggcgccgccctgctgcagatgctgcccctcctgtggctcctaccccacagctgggctgttccagaggcccccacccctatgtggcccgacgacctccagaatcatacatttctccacactgtgtactgtcaggatgggagtccctccgtgggcctttccgaagcttacgacgaagatcagttgttctttttcgattttagccagaacactcgagtgcctcgattacctgaattcgcagactgggctcaggaacagggcgacgcaccagcaatcctttttgacaaagaattttgcgagtggatgatccagcagattggtcctaaactcgatggaaagattcccgtgagtcgagggttccctattgcggaggtgtttacgctcaaacccttagagttcggcaagcccaataccctggtgtgttttgtgtcaaatttgtttccacccatgcttaccgttaattggcagcaccattctgtacccgtagagggcttcggaccgacgtttgtgtctgctgtagatggactgtcttttcaggctttttcctatctgaactttacccctgagccttccgatatttttagctgtatcgttacgcatgagatcgaccgttacaccgccatagcatattgggtccctcgcaatgcattgcccagcgatctgctggagaacgtgctctgtggtgttgcatttgggctcggggttctgggtattatcgttgggatagtgctcattatttactttcgaaaaccctgctccggcgattag

SEQ ID NO: 162045 - DNA, 684 bp, Artificial Sequence
  derived and/or modified sequence
atgggccacgagcagaaccagggcgccgccctgctgcagatgctgccccttctctggctccttccacacagttgggccgtccctgaagcacccactcccatgtggccagacgatctacagaaccacactttcctgcatactgtgtattgccaggatggatcccccagcgtggggctgtcggaggcatatgacgaagatcaactctttttcttcgacttttcacagaatactagagtgccaagactccctgagttcgctgactgggcccaggagcagggagacgcgcccgccatcctctttgacaaggagttttgcgagtggatgatccagcaaatcgggcctaaactcgacggaaagatcccagtcagcagggtgaattggcagcatcactctgttccagtcgagggatttgggccaaccttcgtgagtgccgtcgacggtttaagcttccaggcattctcttacctgaacttcactcctgagccctccgacattttcagctgcatcgtgacccatgaaatcgaccgttacactgccatcgcatactgggtgcccaggaatgccctccctagtgacttgctggagaatgtgctgtgtggcgtcgctttcgggctgggggtgctgggcatcatcgtgggaatcgtgctgataatctactttcgcaagccatgttccggcgactag

SEQ ID NO: 162046 - DNA, 501 bp, Artificial Sequence
  derived and/or modified sequence
atgggccacgagcagaaccagggcgccgccctgctgcagatgctgcctcttctgtggttgctccctcacagctgggccgtgcccgaaggcttcccaatcgcagaagtattcaccttaaagccgttagagtttggcaaacctaatactttggtctgcttcgtgagcaatctgttcccccccatgttgacagttaactggcagcatcattccgtccctgtggaggggttcggcccgaccttcgtctctgctgtcgacggtctgtcctttcaggcctttagttatttgaacttcacgcccgagcctagcgacatcttctcctgtattgtgacccatgagatcgataggtatacagcaattgcttactgggtacctcgcaacgcccttccctctgacctccttgagaacgtgctttgcggagtagcttttggattgggagttctcggtatcatcgtgggaatcgtccttatcatctattttcgcaaaccttgctctggcgactag

SEQ ID NO: 162047 - DNA, 726 bp, Artificial Sequence
  derived and/or modified sequence
atgaagtggctgaagaagtgcctggacaccgcccccacccccatgtggcctgacgacctgcagaatcacacttttctgcacactgtgtactgtcaagatgggagccccagtgttgggttgtctgaagcttatgacgaagatcagctgtttttctttgacttctcccagaacactagggtgccacgtctgccagaattcgcagactgggcgcaggaacagggcgatgctccagctattctgttcgataaagagttttgtgaatggatgattcaacagattggccctaaactcgatgggaaaattcctgtgagtagaggctttcccatagcagaagtgttcaccctgaagcccctagagtttgggaagcccaacacgctagtgtgttttgtgtccaacttgtttcccccaatgctcacagtgaattggcaacaccacagtgttccagtagagggattcggccctacttttgtctctgcagtcgatggactatccttccaggcattcagctacctaaattttacccctgagccatctgacatcttctcttgcatcgtcacccacgaaatcgatcgttacaccgcaatcgcctactgggtgccacgcaacgccttgccttcagacctgctggagaatgtgctctgcggcgttgcgtttggcctgggagtgctgggaattatcgtcggcatcgtcctcatcatctactttagaaaaccatgtagcggctag

SEQ ID NO: 162048 - DNA, 510 bp, Artificial Sequence
  derived and/or modified sequence
atgtggcccgacgacctgcagaaccacaccttcctgcacaccgtgtactgtcaggacggcagtcccagtgtaggtttgagtgaggcttacgatgaggatcagctgtttttttttgacttctctcagaatacgcgggtgcctcgcctgcctgagtttgccgattgggcccaggaacaaggagacgcaccagctatattattcgacaaggagttctgcgagtggatgatacagcagattggccccaagcttgatggaaaaatacctgtgagcaggggattccccatagcagaggtattcaccctgaaaccccttgagttcggcaagccaaatacactcgtatgttttgtgagtaatctgttccctccaatgctcactgtaaattggcagcaccattctgtgccagtcgagggtttcggccctacatttgtctcggcagttgacggcctctcctttcaggccttctcgtacctgaactttacacccgaacccagcgacattttttcatgctag

SEQ ID NO: 162049 - DNA, 873 bp, Artificial Sequence
  derived and/or modified sequence
gtgagctgctggctgagcgacagctgccaggagctgcagcggcgggggataatcctttgtagctacggggtcacaagccccatcgccgtattcggacgccccggccgcctgaggaatcgtagacactttgagcgccgactggtccccatgaagtggctgaagaagtgtctggacactgcacctacgcccatgtggccagacgatctgcagaatcacacctttctgcataccgtgtattgtcaggacgggagtccgtcagtgggcctgagtgaggcttacgatgaggaccagttgtttttttttgatttctcccagaacacacgggtcccccggttaccagaattcgcagattgggcccaggagcaaggcgacgccccggccatcctgtttgataaagaattttgcgagtggatgatccaacagatcggtcctaaactcgatgggaaaatccctgtcagtagaggtttccctatcgccgaagtcttcacgctgaaacccctggaatttggtaaaccaaatacacttgtgtgttttgtgtctaacttgttcccccctatgttaactgttaactggcagcatcactctgtgcccgtcgagggattcggaccgacctttgtttcagcggtggacggccttagcttccaagccttcagttatttgaattttactcccgaaccttctgacatcttctcctgtatcgtcacacacgaaattgacaggtacacagccattgcctactgggtgccacggaacgcgctcccaagcgacctgctcgaaaacgtattgtgtggagtggcttttggactcggagttttaggtataattgtgggaatcgtattgatcatatacttccgtaagccctgctccggctag

SEQ ID NO: 162050 - DNA, 510 bp, Artificial Sequence
  derived and/or modified sequence
atgtggcccgacgacctgcagaaccacaccttcctgcacaccgtgtactgtcaggacggcagccccagcgtgggtttaagcgaggcatacgatgaagatcagctctttttctttgatttcagccagaatacccgggttccaagacttcccgagtttgcagactgggctcaggaacagggcgacgccccagccatcttattcgataaagaattttgcgagtggatgatccagcagataggcccaaagttagacggtaaaatcccagtgtcccggggttttccaatcgcagaggttttcacactgaaacctctcgagtttggtaagcccaatacactcgtgtgctttgtgtctaacctgttcccccctatgctgacggtgaactggcagcaccatagcgtgcccgtggagggcttcggaccaacgtttgtgagtgctgtggatggcctgtcatttcaggccttctcatacctgaattttacaccagagccatccgacattttctcttgctag

SEQ ID NO: 162051 - DNA, 684 bp, Artificial Sequence
  derived and/or modified sequence
atgggccacgagcagaaccagggcgccgccctgctgcagatgctgcccctcctctggcttctcccccactcttgggccgttcccgaagcccccactccaatgtggcccgacgatctgcagaatcacacctttctccatactgtctactgccaagatggttcgccatcagtggggctgtcggaagcttatgacgaagaccagctcttcttctttgacttctcgcagaacacaagagtaccgcgcctgccagagttcgcggactgggcccaggagcagggagacgctccggctatactgttcgacaaggagttttgtgagtggatgattcagcaaatcggccccaagctggatggtaaaatacccgtcagccgggttaattggcagcaccactcagtgcccgtggaaggttttggccccactttcgtctccgcagtcgacggcctgtcttttcaggcattctcctatttaaatttcacccccgaaccttccgacatcttttcatgcatcgtgacgcacgagattgatcgttacacggctattgcatactgggtgccacggaacgctttacctagcgacttactggagaatgtgctttgtggcgtcgcctttgggttgggggtgctcggaatcatcgtcggaatagtgcttataatttactttaggaaaccttgctcgggcgactag

SEQ ID NO: 162052 - DNA, 510 bp, Artificial Sequence
  derived and/or modified sequence
atgtggcccgacgacctgcagaaccacaccttcctgcacaccgtgtactgccaggacggatccccatcagttggcctcagcgaagcatatgacgaagatcagttgttcttttttgatttttcccagaacaccagggtccccagactccccgagtttgcagattgggctcaggagcagggcgacgctcccgctatcctgttcgataaagagttttgcgagtggatgatccaacagattggccctaagctggatggtaaaattcccgtcagcaggggctttcctattgccgaagtgtttacattaaaacccttggagttcggcaagcccaacaccctggtctgttttgtgagtaacctctttcctcccatgttaactgtgaactggcaacaccacagtgtccctgtggaggggtttggaccgacattcgtttcagccgtggatggactatcctttcaggccttttcctacctgaatttcacccctgagccctccgacatcttctcctgttag

SEQ ID NO: 162053 - DNA, 501 bp, Artificial Sequence
  derived and/or modified sequence
atgggccacgagcagaaccagggcgccgccctgctgcagatgctgccattgctgtggttgttacctcattcatgggccgtgccggagggattccctattgcagaggtatttaccctaaagcctctggaattcggaaagccaaataccctggtgtgttttgtatctaatctttttccacctatgctaacggtcaactggcagcatcatagtgtgccggtagagggctttgggcctacatttgtctctgctgttgatggcctgtcctttcaggcattttcatacctgaatttcacacccgaaccatctgatatcttcagttgtatcgtgactcatgagatcgaccgatacacagctatcgcttactgggttcctcgaaatgccctaccctcagatctgctcgaaaacgtgttgtgcggtgtggctttcggactcggagtgctaggcattatcgtcggcatcgtgcttattatctattttcgcaaaccgtgcagcggagattag

SEQ ID NO: 162054 - DNA, 684 bp, Artificial Sequence
  derived and/or modified sequence
atgggccacgagcagaaccagggcgccgccctgctgcagatgctgcccctcctctggttgttgccacattcatgggcagtgcctgaggcgccaacaccaatgtggcctgacgacttgcaaaaccatacttttctgcatacagtgtactgtcaggacggatcaccaagcgtggggctctcagaagcttatgatgaggatcagctcttcttcttcgatttcagccagaatacgcgggtgcctaggcttccagaatttgccgattgggcccaagagcaaggggacgcacccgcgatcttgtttgacaaagaattttgtgaatggatgatccagcagatcggccccaaactggatggtaaaattcccgtgtcccgggttaattggcaacaccacagcatccccgtcgaggggtttggccccacatttgttagtgccgttgacggcctctccttccaggcctttagctatctgaactttacccccgaacccagtgatatcttctcgtgcattgtcacacacgaaatcgacagatacaccgccatcgcctactgggtccctcgaaatgccctgccgtctgatctcctcgaaaatgtcctgtgtggcgtggctttcggactcggcgtgctaggcatcatcgtaggcattgtgctgatcatatactttagaaagccatgctctggtgactag

SEQ ID NO: 162055 - DNA, 873 bp, Artificial Sequence
  derived and/or modified sequence
gtgagctgctggctgagcgacagctgccaggagctgcagcggcggggcatcattttgtgctcgtatggcgtgacctccccgattgcagtgtttggtcgaccaggccgtcttcgcaataggcgacacttcgagagacggctggttccgatgaagtggttgaagaaatgcttggacacagctcctactcctatgtggccggacgacctgcaaaatcacactttcttacacaccgtgtattgtcaggacggcagtccgagtgtaggcctgtcggaagcctatgatgaggaccaactgttcttctttgatttctcgcagaatacacgagtgccccgcctgcctgagtttgctgactgggcacaggaacaaggcgacgctccagccatcctgtttgacaaggagttttgcgaatggatgattcagcaaattggaccaaagctggacggcaaaatccccgttagccgagggtttccaatagccgaggtgtttacgctcaaaccgttagagttcggcaaacccaacacactcgtgtgctttgtttctaatctgttccctccgatgctgacggtcaattggcagcatcactccgttcccgtggagggcttcgggcccactttcgttagtgccgtggatggtctgtctttccaggccttcagctatttaaactttacacccgaacctagtgatatttttagttgtatcgtgacccacgaaatcgacaggtataccgccatagcgtactgggtgcctcgcaacgccttgccctctgatttactcgagaacgtcctgtgcggcgtggcattcgggttgggcgtgcttgggatcatagtcggcatcgtgctgatcatctatttccggaagccctgttccggttag

SEQ ID NO: 162056 - DNA, 510 bp, Artificial Sequence
  derived and/or modified sequence
atgtggcccgacgacctgcagaaccacaccttcctgcacaccgtgtattgccaggacggatcaccatcagtcggcctgagcgaagcctatgatgaggatcaactttttttcttcgacttctcacagaacactcgggtcccaagattacccgagttcgctgattgggcacaagagcaaggcgacgctcccgctatccttttcgataaggagttctgcgaatggatgattcaacagatcggccctaagctcgacgggaaaattcctgtttctcgaggcttccctatcgccgaggtgtttacccttaagcctcttgaatttgggaagcctaacaccctggtttgttttgtgtctaatcttttccctcctatgcttacagttaattggcagcaccacagtgtgcctgtggaaggattcgggcctacctttgtgagcgctgtggacggtttgtctttccaggccttctcctacctgaactttaccccagagccaagcgatatcttctcctgttag

SEQ ID NO: 162057 - DNA, 510 bp, Artificial Sequence
  derived and/or modified sequence
atgtggcccgacgacctgcagaaccacaccttcctgcacaccgtgtattgccaggatgggtccccttccgttgggctcagcgaggcctacgacgaagatcagctgttctttttcgatttcagccagaacactagggtacctaggctcccggagtttgccgattgggctcaggagcagggggatgcaccggccatcctgtttgacaaggagttttgtgagtggatgattcagcagatcggcccgaagctagatggtaagatacctgtgtcacgcggttttccgatagccgaagtcttcaccttaaagccacttgaattcgggaagcctaatacactggtctgttttgtgagcaatctgtttcctccgatgctgaccgtcaattggcagcaccattccgtccccgtggaaggattcggtccaacttttgtgtccgctgtggacgggctcagttttcaggcgttctcctatcttaacttcacccccgaaccttctgatatattctcttgttag

SEQ ID NO: 162058 - DNA, 684 bp, Artificial Sequence
  derived and/or modified sequence
atgggccacgagcagaaccagggcgccgccctgctgcagatgctgcccctgctgtggctgctgccacatagctgggctgtcccagaggcaccaacaccaatgtggccagacgatctacagaatcataccttcttgcacacagtgtactgccaggatgggagcccctctgtcgggctgtctgaagcctatgatgaggaccagctgttttttttcgacttttcacagaataccagggtgccacggttgccagagtttgcagactgggctcaggaacagggggacgctcccgctattctttttgacaaggagttttgcgagtggatgatccagcagataggaccaaagttagatgggaagattccagttagccgcgttaattggcaacaccattcagtgcccgtcgagggattcggtccgaccttcgtctcagctgtggacggtctctcctttcaagccttttcttacttgaacttcactccagaaccatccgacattttttcttgcatagtgactcacgaaatcgaccgctacactgcaatcgcatactgggtccctcgaaacgcactgccctcggatttgctggagaatgttctgtgcggcgttgcgttcggccttggcgtgcttggcattatagtcggcattgtgctcatcatttatttcagaaagccgtgcagcggcgattag

SEQ ID NO: 162059 - DNA, 873 bp, Artificial Sequence
  derived and/or modified sequence
gtgagctgctggctgagcgacagctgccaggagctgcagcggcgggggatcatactgtgctcttatggtgtgacgtcacccatagctgttttcgggcgacctgggaggttgcgtaacaggcgtcattttgaacgccgactggtaccaatgaaatggctgaagaaatgcctggacaccgcccccacccctatgtggcccgatgacttacagaaccatacctttctacataccgtttactgtcaagatggatccccctctgtgggactgtctgaggcatatgacgaggaccagctgttcttcttcgatttcagtcagaatacccgtgtgcctcgactcccagagtttgccgactgggctcaagagcagggagatgctccggcaatcctgttcgacaaagagttctgcgagtggatgatccagcagatcggccccaaactggacggcaagatcccagtgtccagggggttcccgattgctgaagtgtttacactgaaaccccttgagtttggcaaacctaacacgctcgtctgtttcgtgtcgaacctgttcccccctatgctgaccgttaattggcagcatcactctgtccctgtggagggctttggcccaactttcgtcagcgctgtggacggacttagttttcaggcgtttagctacctgaacttcacaccagagccttcagatatctttagttgtatcgttacccatgaaattgaccgttatacggcgattgcatactgggtaccaagaaacgccctgcccagtgatttgctcgagaacgtactgtgcggcgtggccttcggactgggggtccttgggatcattgtcggaatagtgctcataatctattttagaaaaccttgctcgggatag

SEQ ID NO: 162060 - DNA, 786 bp, Artificial Sequence
  derived and/or modified sequence
atgggccacgagcagaaccagggcgccgccctgctgcagatgctgccgcttttatggctccttccacactcctgggcagtgccggaggccccaacacccatgtggcccgatgacctgcaaaatcacacatttctgcacacagtctactgtcaagatgggtcccctagcgtcggcctgtccgaagcatacgatgaagaccagctctttttcttcgacttttcacagaacactagggtgccccggcttcccgaattcgctgactgggcacaggagcaaggtgatgctccagcaatcctgtttgataaggaattttgcgaatggatgattcagcagatcggtcctaagctggatgggaagattcccgtgtctagaggttttccaattgcagaggtgttcactctcaaacccttggagtttggaaaacccaatacccttgtgtgtttcgtgtccaacctattcccacccatgttgaccgtcaactggcagcaccattcggtgcccgttgagggattcgggccaaccttcgtgagcgccgtggacggtttgtcattccaagcattctcatatctgaattttactccagagccttcagacatcttttcctgcatcgtgacccacgagattgatcgatacacggccattgcctactgggtgccccggaatgccttgccgtcagacctcttagagaacgtgttatgcggtgtcgcctttggcctcggcgtattagggattatcgtcggaatcgtgctgattatctacttcaggaaaccatgcagcggagattag

SEQ ID NO: 162061 - DNA, 501 bp, Artificial Sequence
  derived and/or modified sequence
atgggccacgagcagaaccagggcgccgccctgctgcagatgctgcctctgttatggttgcttccgcacagctgggctgttcccgaaggattccctattgccgaggtcttcacactgaaacccctggagttcgggaagcctaacacgctcgtttgcttcgtttccaatcttttccctcccatgctaaccgtcaactggcagcaccattccgttccagttgagggattcgggccgacattcgtctccgccgtcgacggattgtcttttcaggccttctcatacctgaactttacacccgagccttccgatatattcagttgcatcgtaactcatgagatcgacagatatactgcaattgcgtactgggtgcctaggaatgctctgcccagcgaccttctggagaacgtcctgtgcggcgtggcctttggattaggcgtgcttggtataatagtggggatagtactcatcatctattttaggaaaccttgctccggggactag

SEQ ID NO: 162062 - DNA, 510 bp, Artificial Sequence
  derived and/or modified sequence
atgtggcccgacgacctgcagaaccacaccttcctgcacaccgtgtactgtcaggatggatccccttccgttggtctgagcgaagcctatgatgaggaccagctgttcttctttgacttctcacagaacacgcgcgtgccgcggctgccagagttcgcagactgggcccaggaacagggggacgctccagccatcttgtttgataaagagttttgtgaatggatgattcaacagattgggcctaagctggatggcaagatcccagtgtctaggggattccccatcgctgaggtgttcactctcaaaccgctagaattcggtaagccaaataccctcgtatgtttcgttagcaatttgttcccacccatgctgactgtaaattggcaacatcattccgttccagtggaggggtttggccccacattcgtgtccgcggtggatgggctttccttccaagctttctcatacctgaactttacccctgagcccagtgacattttttcctgttag

SEQ ID NO: 162063 - DNA, 786 bp, Artificial Sequence
  derived and/or modified sequence
atgggccacgagcagaaccagggcgccgccctgctgcagatgctgccacttctgtggctcctgcctcacagctgggccgtgccagaggcccccactccaatgtggcctgacgatcttcagaaccataccttcctacacacggtttactgtcaggatggaagtcccagcgtgggattgtcagaggcgtacgacgaggatcaactattcttttttgatttttcacagaatacccgtgtgcctagattgcccgaattcgctgactgggctcaggagcagggcgatgcacccgcaattctgtttgacaaggaattttgcgaatggatgatccagcaaatcggccccaaacttgacgggaagattccagtgtccagaggttttcctatagctgaagttttcactctgaagcccctggagtttggaaaaccaaacacactcgtgtgctttgtttcaaacctcttccctccaatgctaacagttaattggcaacatcactcaatccctgttgagggatttggcccgaccttcgtctccgcagtcgacggactgagttttcaggcgttctcctacctgaacttcactccagagccaagcgacatatttagttgcattgtgacacatgagatcgaccgttacacagccatcgcctactgggtgccgcggaacgcgctgccatctgatctcctggaaaatgtcctgtgtggcgtcgcctttgggctcggcgtgttgggaattatcgtgggaatcgttctgattatatattttagaaaaccttgttcaggggattag

SEQ ID NO: 162064 - DNA, 873 bp, Artificial Sequence
  derived and/or modified sequence
gtgagctgctggctgagcgacagctgccaggagctgcagcggcgggggattatcctctgttcttatggggtcacgtctccaattgccgtgttcgggcgtcctggacggttgcggaacaggcgacatttcgagcgccgactcgtgccgatgaaatggctgaagaaatgcctggacaccgctccaactccaatgtggccagatgacttgcagaaccatacgttcctccatactgtgtattgccaggatgggagtcctagcgtcgggctgtccgaggcttatgatgaggatcagctgtttttcttcgatttttctcagaacacacgggtgcccaggctgccagagttcgccgattgggcgcaggagcagggggacgccccggccatcctttttgacaaagaattctgcgaatggatgatccagcagattgggccaaaactggacggaaagatacccgtgtcccgtggtttcccaatcgccgaagtgtttacgctgaagccattagagtttggcaaacccaatacactcgtttgctttgtgtcaaatttgtttcccccgatgctgaccgtcaactggcagcaccattcagtcccagttgaggggtttggccccacatttgtctccgctgtagacgggttaagctttcaggcctttagctatttaaatttcactcctgagcccagtgatatcttcagctgtatcgttacccatgagatagaccggtatactgccattgcatactgggtccctcgcaatgcactccccagcgatctgctcgaaaacgttctgtgcggggtggctttcgggctcggagtcttaggaatcattgtcggaattgtactgatcatatactttcggaagccatgcagtggctag

SEQ ID NO: 162065 - DNA, 510 bp, Artificial Sequence
  derived and/or modified sequence
atgtggcccgacgacctgcagaaccacaccttcctgcacaccgtgtactgccaggatggatcccccagtgtcggtctgagcgaggcgtacgatgaagaccagctgtttttcttcgacttcagtcaaaacacacgcgtgccgcggctgccagagtttgcagactgggcacaggaacagggcgatgcacccgcaatactgtttgacaaagaattctgcgagtggatgatacagcagattgggcccaaactggacggcaagatccctgtgtctagggggtttcctattgccgaagtgttcaccttgaagccactggaattcggcaaacctaataccctggtttgcttcgtcagcaacctgttcccacctatgctgacagtcaactggcagcaccatagcataccagtcgagggctttgggcctacatttgtgtcggccgtggacggcctttccttccaggctttttcctacctgaactttacaccagagccatccgatattttcagctgttag

SEQ ID NO: 162066 - DNA, 786 bp, Artificial Sequence
  derived and/or modified sequence
atgggccacgagcagaaccagggcgccgccctgctgcagatgctgcccctgctctggctcctcccccattcttgggccgtccccgaagcaccgactcctatgtggcctgacgacctccaaaaccacactttcctgcacaccgtgtattgtcaggacggctcaccttcagtgggcctgtctgaggcttacgacgaggatcagttgttttttttcgatttctctcaaaacactcgggtccctaggcttccagagttcgcggactgggcccaagagcaaggcgacgccccagcgattctcttcgacaaggagttttgcgaatggatgatacaacagatcggccccaaactggacgggaagattccagtgtctcggggtttcccgatcgcagaagtttttacactgaagcctctcgagttcgggaaaccgaacaccctagtgtgctttgtgagcaacctgttcccgcccatgttgacagtgaactggcaacaccacagtgtgccggtcgagggattcgggcccactttcgtgagcgcggtagatggactgagttttcaggccttcagctaccttaacttcacacccgagcctagcgatatcttctcttgtattgtgactcacgagatagatcggtacacagccatcgcttattgggttccaaggaatgctctcccaagtgatctgctagaaaatgtgctgtgtggggtggcttttggacttggagtcctgggcattattgtcggcattgtgctgattatatattttcgcaaaccctgctccggggactag

SEQ ID NO: 162067 - DNA, 501 bp, Artificial Sequence
  derived and/or modified sequence
atgggccacgagcagaaccagggcgccgccctgctgcagatgctgccactattatggcttcttccccatagttgggcagtccccgagggctttcccattgcagaagtttttactctgaagccgctcgagtttgggaagcccaatactctcgtgtgcttcgtcagcaacctgtttccaccgatgcttacagtgaactggcagcaccacagtatccctgtcgaaggcttcggacccaccttcgtgtccgcggtcgacgggttgagctttcaggccttttcttatctgaacttcacgcccgagcctagtgatatcttctcctgtattgtgacacacgaaatcgatagatataccgccatcgcttactgggtaccacggaacgccctccccagcgatcttctcgagaacgttctttgcggagtggcttttggattaggtgtgcttggtattatagtgggaatagtgctcatcatttatttccgcaagccctgtagcggggactag

SEQ ID NO: 162068 - DNA, 786 bp, Artificial Sequence
  derived and/or modified sequence
atgggccacgagcagaaccagggcgccgccctgctgcagatgctgccgttgctctggttgctcccccactcatgggctgtccctgaggccccaacccccatgtggcccgacgacctgcagaatcacaccttcctgcacacagtgtattgtcaggatggttcgccctccgttggactttccgaagcctatgatgaggatcaactctttttcttcgacttcagtcagaatacccgggtaccacgcctgcccgaattcgcggattgggctcaagagcagggcgacgctcccgctattctgtttgacaaagaattctgtgagtggatgattcagcaaatcggaccaaagctggacggtaaaatccccgtttctagaggcttcccaatcgcagaggtgtttaccttgaagcctctggaatttggaaaacccaatactctcgtgtgcttcgtaagcaacctttttccaccgatgttaactgtgaactggcagcaccactcggttcccgtggagggatttggccccactttcgtgtccgcagtggacggactgtcttttcaggctttttcgtacctgaattttaccccagagccctcggacatcttttcttgcatcgtgacccacgagattgaccgctatacagccatcgcatattgggtgccccggaacgccttgccttcggacctattggaaaatgttctatgcggcgtggcattcggcttgggtgtcctgggtattatcgtgggaatcgtgctcatcatttactttcgtaaaccgtgttcgggagattag

SEQ ID NO: 162069 - DNA, 684 bp, Artificial Sequence
  derived and/or modified sequence
atgggccacgagcagaaccagggcgccgccctgctgcagatgctgccattgctatggctcttgccacactcttgggctgtccctgaggcccccaccccaatgtggcccgacgatctacagaatcacaccttccttcacacggtgtactgccaagacgggagtccatctgtcgggctgtcagaggcttatgatgaggatcagttattcttcttcgatttctctcaaaacactcgcgttcctaggctaccggaatttgccgactgggctcaagaacagggggacgcaccagctatactgtttgacaaggagttttgcgagtggatgatccaacaaattggacctaagttagatgggaagatccctgtgagtcgtgtgaactggcaacaccattcagtgcccgtcgagggtttcggacctactttcgtgagtgctgttgatggactgtcttttcaagctttctcgtacctcaattttacgcctgagccctctgacatcttttcgtgcatagtaacccatgaaattgataggtacacggccatagcatattgggtgcccagaaacgctctcccctcggacctcctggaaaacgtactgtgtggagtggccttcgggcttggggtgcttgggattatcgtcgggattgtgctgatcatttacttcagaaaaccctgttctggagattag

SEQ ID NO: 162070 - DNA, 501 bp, Artificial Sequence
  derived and/or modified sequence
atgggccacgagcagaaccagggcgccgccctgctgcagatgctgcctcttttgtggctcctccctcactcttgggcagttccagaaggcttccctatcgctgaggtttttacactaaagcccctggaatttggtaagcccaataccttggtctgttttgtgagcaacctattcccccccatgctgacggtcaactggcaacaccactctgtgccagttgagggattcggcccgacgttcgttagcgccgtcgatggattatcctttcaagctttcagttatttgaactttactcctgaaccaagcgatatcttctcatgcattgtgactcacgaaattgatcgctacactgctatagcttattgggtgcctcgcaatgctcttccgtccgatttactggagaacgtgctttgtggcgtggcctttgggctgggcgtactggggataattgtcgggatcgtgctgatcatctacttccgaaaaccttgttctggcgattag

SEQ ID NO: 162071 - DNA, 684 bp, Artificial Sequence
  derived and/or modified sequence
atgggccacgagcagaaccagggcgccgccctgctgcagatgctgccacttctgtggcttttgccacacagctgggctgttcccgaggccccgacacccatgtggcctgatgacctgcagaaccacacatttctgcatactgtatactgtcaagatggatcccccagcgtggggctgagcgaggcctacgacgaagaccagttgttcttcttcgactttagccagaacacaagggtgccccgcctgcccgaatttgcagattgggcgcaggagcagggagacgcccctgccatactattcgacaaggagttttgcgagtggatgatccagcagattggcccaaagcttgacggcaagatacccgtatcgagagtgaattggcaacaccatagcgtccctgttgaaggcttcggcccgacttttgtgtctgcggtggacgggctgagcttccaggcattctcctatctcaactttactcctgaaccctctgacatattctcatgtatcgtgacccacgagatcgaccggtacaccgcaatcgcttactgggtgccccgcaatgctctgccttcagatctgctggagaacgtcctgtgcggtgtagcgtttggcctcggtgtactaggcatcatcgttggtatcgtgcttattatttattttcgcaaaccttgtagcggagactag

SEQ ID NO: 162072 - DNA, 684 bp, Artificial Sequence
  derived and/or modified sequence
atgggccacgagcagaaccagggcgccgccctgctgcagatgctgccgcttttgtggctgctcccacattcctgggcagtgcccgaggccccgactcccatgtggccagacgacctgcagaaccataccttcctacacaccgtctactgtcaggatgggagcccatcagtcggcctctcagaggcatatgacgaggaccaactttttttcttcgatttctcacaaaacacacgtgtaccacggctgcctgagttcgctgactgggcacaggagcagggagacgctccagccatactgtttgacaaggagttttgtgaatggatgattcagcaaatcggacctaagctggatggtaaaattccggtatcgcgcgtgaactggcagcaccactctgtacctgtcgaggggtttggtcctacctttgtgtccgctgtggatgggctctcgttccaggcattctcatacctgaacttcactccagagccatctgatatctttagctgtatcgtgacgcatgagatagatcgctacactgctattgcctattgggtccctcgcaacgcgctgccatccgatctgctggagaatgttctctgcggagtcgcctttggcctgggcgtgctgggcataatcgtcggtattgtgttaattatctactttagaaaaccatgttcaggagactag

SEQ ID NO: 162073 - DNA, 786 bp, Artificial Sequence
  derived and/or modified sequence
atgggccacgagcagaaccagggcgccgccctgctgcagatgctgcctctgttgtggctcctgccacattcatgggctgtacctgaggcccccacaccaatgtggcctgatgacctgcagaatcatacgttcctgcataccgtgtattgtcaggatggaagcccttctgtgggcctgtctgaggcttatgatgaggatcagctgttctttttcgatttctcgcagaacacacgggtgccacgcctgccggagttcgccgactgggcacaggaacagggcgacgcgcccgctatactttttgataaggaattttgtgaatggatgatacagcaaatcggccctaaactcgacggcaagattcccgtcagtcggggttttcccattgccgaggttttcacattgaagcctctggagttcggtaagcctaacactctggtgtgtttcgtgagcaatttatttccaccaatgctgacggttaattggcagcaccactccgttcctgttgagggcttcggcccaacgttcgtctcagccgttgatgggctatccttccaggccttctcctatctaaacttcacaccagaaccctcggacatattctcctgtatagttacgcacgagattgaccgttataccgccatcgcctattgggtaccccggaacgctctgcccagcgacctgctcgaaaacgtgctgtgtggcgtcgccttcggtctgggggtgctgggtatcatcgtgggaatcgtactgattatttactttcgcaagccttgcagtggcgattag

SEQ ID NO: 162074 - DNA, 501 bp, Artificial Sequence
  derived and/or modified sequence
atgggccacgagcagaaccagggcgccgccctgctgcagatgctgccactcctctggcttctgccacacagttgggcagtaccggaaggcttccccatcgcagaggtcttcacactgaagcccttggagtttgggaagccgaacaccctggtgtgtttcgtcagcaacctcttccctccaatgttaacagtgaactggcaacatcactcggttccagtagagggattcggtcccacattcgtgagcgcagtcgacggcctttcttttcaggcctttagctacttaaacttcacacccgaaccatccgacatcttctcatgcatagtaacacacgagatagacagatacacggcgattgcatattgggttccccggaacgccctgcccagtgatttgttggagaatgtgctgtgcggggtagctttcgggctgggcgtccttgggattatcgttggaatagtcctcattatttatttccgcaagccatgtagcggtgactag

SEQ ID NO: 162075 - DNA, 786 bp, Artificial Sequence
  derived and/or modified sequence
atgggccacgagcagaaccagggcgccgccctgctgcagatgctgccactgctgtggctacttccgcattcttgggccgtgccggaagcgccgactccaatgtggcccgacgacctgcagaaccacacgttcctgcatacagtgtactgccaggatggctctccatcagtcggactgagcgaggcctacgatgaggaccagcttttttttttcgactttagtcagaataccagagtgcctcggcttcctgagtttgctgactgggcacaggagcagggagatgccccggctatcctttttgacaaagaattctgtgaatggatgatccaacagatcggaccaaaactggacggcaaaattccagtgagtcgcggattcccaatcgctgaggtctttactcttaagcctctggagtttggcaagccgaataccctggtgtgctttgtgagtaatttgtttcctcccatgttgacggtaaattggcagcatcacagcgtacccgtggaaggctttggacctacttttgtttccgccgttgatggtctatctttccaggcattcagctacctgaacttcacccctgagccatctgacatattctcttgtatcgtgacccacgagatcgatcgatataccgcaatagcttattgggtgcctcgtaacgccctccccagcgatctgctggagaacgttttatgcggagttgccttcgggctgggcgtactagggatcatcgtcggaatcgtcctcatcatctacttccgcaagccgtgctccggggattag

SEQ ID NO: 162076 - DNA, 873 bp, Artificial Sequence
  derived and/or modified sequence
gtgagctgctggctgagcgacagctgccaggagctgcagcggcggggcattattctctgttcctatggagtcacctctccaattgctgtattcggtagacccggccgcctgaggaatcgcagacacttcgagcggcgcctggtccctatgaaatggttgaagaaatgcctggatactgctcccacaccaatgtggcccgatgatctccagaaccacactttcctccacaccgtttattgtcaggatggaagcccttcagtgggcctaagcgaggcatacgacgaagaccagctctttttcttcgattttagtcagaacacccgcgtgcccaggctgccagagtttgccgattgggctcaggaacagggagacgcccccgccatactgtttgacaaagaattttgcgagtggatgattcagcagattggccctaagcttgatggtaagatccccgtctctcggggtttcccaatcgcggaagtttttactctcaagcccttagaattcggaaagccaaacacacttgtctgtttcgtttctaatctgtttcctccaatgctgaccgtgaactggcagcatcattccgtccccgtcgagggttttggtccaaccttcgtaagcgccgtcgatggactgtctttccaggcgttttcttacctcaactttaccccagaaccttccgatatattcagttgcatagtgacacatgaaattgaccgctatacggccatagcttactgggtgccccgcaatgctctgccctcagaccttctggagaacgtactctgtggagtggctttcggcctcggcgtccttgggatcatcgtgggcattgtgctaattatttattttcggaaaccttgttccggatag

SEQ ID NO: 162077 - DNA, 873 bp, Artificial Sequence
  derived and/or modified sequence
gtgagctgctggctgagcgacagctgccaggagctgcagcggcggggtattattttgtgctcctacggcgtcaccagcccaatcgcggtatttggcagaccaggtagactcaggaacaggcgacattttgaaagacggttagtaccaatgaagtggctcaagaaatgcttggatacagctccaacacccatgtggcccgatgatctgcagaatcacaccttcctgcacaccgtgtattgtcaggacggttcaccatccgtggggttatcggaagcatacgatgaagaccagttgtttttctttgactttagccagaacactcgcgtcccgagattacctgagttcgctgactgggcccaagagcagggtgatgctcccgcaatactgttcgacaaggagttctgtgagtggatgatccagcagataggcccaaaattggacggaaaaatccccgtctcaaggggattccctatcgcggaagtgtttaccttgaagcccctcgaattcgggaaacccaacaccttggtttgttttgttagcaacctgttcccacccatgctgaccgtgaactggcagcatcatagcatcccagtcgagggcttcggacctacgttcgttagcgccgtagatggcctttccttccaggccttcagctacctaaactttacacctgagcctagtgacatcttttcctgcatcgtgactcatgaaatagacaggtacactgcaatcgcctattgggtgccccgcaatgcccttccttccgatttacttgagaacgtgttgtgcggggtggctttcggactgggagtcttaggcattattgtgggaattgtgctgattatctatttccgaaagccatgcagcggctag

SEQ ID NO: 162078 - DNA, 873 bp, Artificial Sequence
  derived and/or modified sequence
gtgagctgctggctgagcgacagctgccaggagctgcagcggcgggggattatcctctgttcctatggtgtcacaagtcctattgctgtgttcggaaggccggggagattgagaaacagacgtcacttcgagagaagactcgtgccaatgaagtggctcaaaaaatgtctcgacacagctccgacacccatgtggccggacgatttgcagaaccacacgttcctgcacactgtttattgccaggacggttcaccctccgttggtctcagcgaggcctacgatgaagaccagctcttcttctttgacttcagtcaaaacactcgcgtgcctaggttacccgaatttgccgactgggcacaagaacagggtgacgctcccgctattcttttcgataaggagttttgtgagtggatgatccagcagattgggccgaaactggatggcaagatccctgtcagcagggggttccccatcgccgaagtgttcaccctgaagccactggagttcggtaagccaaacaccttggtctgctttgtgtcaaatctgtttccccctatgctcactgtaaactggcaacatcattccgtgccggttgagggatttggccctactttcgttagcgcagtcgatggcctcagttttcaagcattctcatacctgaattttaccccggagcctagcgacatattctcctgtattgttacccacgaaatcgatagatataccgcgattgcatactgggtccctaggaatgccctgcctagtgaccttctagagaacgttctgtgcggagtcgccttcggactgggcgtgctgggaatcattgtcggcatcgtattgatcatatatttcagaaaaccctgcagtgggtag

SEQ ID NO: 162079 - DNA, 501 bp, Artificial Sequence
  derived and/or modified sequence
atgggccacgagcagaaccagggcgccgccctgctgcagatgctgcccttgctgtggctgctgccacattcctgggccgttcctgaggggtttcccatcgcagaagtctttacacttaaacccctggagttcggaaaacctaacactctggtgtgtttcgtgtcaaacctatttccgcctatgctaacagtgaactggcagcaccactcggttcctgttgagggctttgggcctacgttcgtatcggccgttgacggtctttcgttccaggcgttttcctacctgaatttcacccccgaaccttcagacatcttttcctgcatagtcacgcatgagatcgaccgctacacagctattgcgtactgggtgccaagaaacgcattaccttccgacctgctggagaatgtattgtgcggggtggcttttggactaggggtgctgggcataattgtgggtatcgtgttgatcatctattttcgtaagccctgtagcggggattag

SEQ ID NO: 162080 - DNA, 510 bp, Artificial Sequence
  derived and/or modified sequence
atgtggcccgacgacctgcagaaccacaccttcctgcacaccgtgtactgccaagacggttccccatctgtcggcctgagtgaggcgtacgacgaagaccaattattctttttcgacttctcgcagaacactagggttccaaggctaccagagttcgccgattgggcacaggaacagggcgacgctccagcaatactgttcgataaagagttttgtgagtggatgatccagcaaattggaccaaagctggacggcaagatcccggtctcacgaggctttcctatagctgaagtatttaccctaaagcctctggaatttggtaagcccaacaccttagtgtgctttgtgtcgaatctctttcctcctatgttaaccgtgaactggcagcaccatagtgttcccgtggaaggcttcggccccacctttgtgtccgccgtcgacgggctttcctttcaggctttttcttacctgaatttcactcccgagccttcagacattttctcttgctag

SEQ ID NO: 162081 - DNA, 372 bp, Artificial Sequence
  derived and/or modified sequence
atgggccatgagcagatgttgcctctcctctggctgctgccccatagttgggccgttccagaagctccaacgccaatgtggccagacgatctgcagaaccatactttcctgcacactgtgtattgccaagacggcagcccatctgttggcttgtcagaagcctacgacgaggaccagctgttttttttcgactttagccagaacactcgcgtgcctcgcctgcctgagttcgcagattgggctcaggagcagggtgacgcaccggcaatcctgttcgataaggaattctgcgagtggatgattcagcaaatcggacctaagctggacggcaaaattcccgtcagcagaggccaggagttttccggggagtag

SEQ ID NO: 162082 - DNA, 786 bp, Artificial Sequence
  derived and/or modified sequence
atgggccacgaacagaaccagggggctgctctactacagatgctcccattgctatggttactgcctcattcctgggccgtgccagaggcacccacccccatgtggccagacgacctgcagaatcacaccttcttgcacaccgtgtattgccaggacggctctccctctgtcggactgagcgaagcctatgatgaagatcagctgtttttttttgacttttcacaaaacacaagagtgccgcgacttcccgaattcgcagactgggcacaggaacagggagatgctcctgccatcttgttcgataaggagttctgcgagtggatgatccagcagatcgggccaaaactggatgggaagatcccggtatctagagggtttccgattgctgaggttttcactcttaagcccctcgagtttgggaaacccaacacgctcgtttgttttgtgtccaatttgttccccccaatgctcaccgtgaactggcaacatcattcggtacctgtggaagggttcggacccacatttgtttccgccgtggatgggctgtctttccaggcattctcttatctgaactttactcccgaacccagtgatatattcagctgtatcgtgacccatgagatagacaggtatactgctatcgcctactgggttcctagaaatgcgctgccttctgatctgctggagaacgtgctgtgtggcgtggcctttggcctgggggtcctggggattatcgttggcatcgttcttataatctattttaggaagccttgtagtggcgattag

SEQ ID NO: 162083 - DNA, 684 bp, Artificial Sequence
  derived and/or modified sequence
atgggccacgagcaaaaccagggcgctgcccttctccagatgcttccattgctctggctcttgccacatagttgggctgtgccagaagcacctactcctatgtggcccgatgacctgcagaaccacaccttccttcatacagtttactgccaggatggatctcccagcgtaggactgagcgaggcttacgatgaagatcaactgttcttttttgatttctcgcagaatacccgtgtccctcgactccctgaattcgcagactgggcacaagaacagggcgatgcccctgccatcctgttcgataaggagttctgcgaatggatgattcaacaaattggtccaaagctagacggcaagatcccagtttctcgagttaactggcagcaccactccgtcccggtggaaggctttgggccaacctttgtatctgccgtggacggcttatcgtttcaagcattttcctatttgaactttaccccagagccctccgacatttttagttgcatcgtcacccatgagatcgatcgttacaccgccatagcctattgggtccctcgtaacgcactcccatctgatctgcttgagaacgtcctctgtggagtggcatttggacttggcgtgctggggattatcgtcggcatcgtgctgattatatattttaggaaaccatgttcaggagactag

SEQ ID NO: 162084 - DNA, 501 bp, Artificial Sequence
  derived and/or modified sequence
atgggccatgaacaaaaccagggcgcagcactgctgcaaatgctccccctgttgtggttgttgccccacagttgggctgtaccggaaggattccctattgcggaggtgtttaccctcaagccgctcgagtttggaaaacccaatacactggtctgtttcgtgtccaacctgttccctcccatgctgacagtcaattggcagcaccattcggtgcctgtagagggcttcggtccaacctttgtgtctgcagtggatggattgagcttccaggccttttcctacctcaacttcacaccagagccttctgacatcttttcttgtattgttacccacgaaatcgatcgctacactgccatcgcctactgggttcccagaaatgcattgccctcagacctacttgagaatgttctctgcggcgtggcgttcggcttgggcgtgctcggtatcatcgtgggcatagtgctaattatttacttccgaaagccttgttcgggtgattag

SEQ ID NO: 162085 - DNA, 786 bp, Artificial Sequence
  derived and/or modified sequence
atgggtcacgagcagaaccagggagctgcactgctccaaatgctcccactcctgtggctcctcccccacagttgggctgtgcctgaggcccctacacccatgtggcccgatgacttgcagaatcatacttttttacacacagtgtactgtcaagatggctcaccaagcgtcggcctgtccgaagcttacgacgaggatcagttgttcttttttgacttttctcagaataccagagttccccgactacccgagttcgctgactgggctcaggagcagggtgatgcgcctgctatcttgtttgataaagagttctgcgagtggatgatccagcagatcgggcctaaactcgatgggaagatccctgtgtcccgcggatttccaattgctgaggtgttcactctgaagcccctcgagttcggcaagcccaacacacttgtctgtttcgtgtccaatctgttccctcctatgctgaccgtcaactggcaacatcattctgtccccgtggaaggattcgggccaactttcgtgtcagcagtagatgggctgtcttttcaggccttctcctacctaaatttcacaccagagcctagtgatatattttcatgcattgtgacacatgagatcgacagatacaccgccatagcctattgggtgccacgaaacgctttgcccagcgacctgttagagaatgtgttgtgtggtgtagcattcggccttggagttctaggcatcatcgtgggtatcgtactcataatatatttcagaaaaccatgttcgggcgactag

SEQ ID NO: 162086 - DNA, 684 bp, Artificial Sequence
  derived and/or modified sequence
atgggccacgagcagaatcagggcgcagcccttctgcagatgctacctctcctgtggttactccctcattcttgggctgttcccgaggcaccgacccccatgtggccggacgacctgcagaaccatacttttctgcatactgtgtattgccaagatggcagtccttccgtggggctaagtgaggcttacgacgaagatcaattattttttttcgatttttcccagaatactagagttcctcgcctgcccgagtttgctgactgggcccaagaacagggagatgctccagcgatcctctttgacaaggagttttgtgaatggatgatccaacagattggtcctaaactcgatggaaagataccggtgtcaagagtgaattggcagcaccattccgtacccgtcgaaggttttggccctacgtttgtgtcagccgtggatggtctgagtttccaggctttttcatatctaaactttacccctgagccaagtgacatttttagttgcattgtaactcatgaaatcgaccgttacaccgctattgcatactgggtgccacggaacgcccttccctccgaccttctggaaaacgttctctgcggagtggcttttggtctgggcgtgctgggaattatcgtcggtattgtgctgataatctattttcgcaaaccctgcagcggcgattag

SEQ ID NO: 162087 - DNA, 501 bp, Artificial Sequence
  derived and/or modified sequence
atgggtcatgagcagaatcagggggctgctctcctgcagatgttgccgctcctgtggctccttccacactcatgggccgtccctgaggggtttcccatcgcggaggtgtttaccctgaaacccctggaattcggaaagcccaacaccctcgtttgctttgtgagtaacctattccctccaatgctaacggtgaactggcaacaccactctgtcccagtggaagggttcgggccaacattcgtatcagctgtcgatggtctgtcattccaggcattttcttacctaaactttaccccagaaccctccgacattttcagctgtatcgtcactcacgaaatagaccgatacaccgccattgcatattgggtgcctcggaacgccctgccgtctgatcttctggagaacgttctgtgcggcgtcgccttcggcttgggagtgctaggcataattgttggcatcgttctgatcatctacttccgaaagccttgtagcggcgattag

SEQ ID NO: 162088 - DNA, 726 bp, Artificial Sequence
  derived and/or modified sequence
atgaaatggctgaagaaatgcctggacactgcacccacgcccatgtggccagacgatcttcaaaaccatacattcctgcacacagtgtattgccaagatgggtcaccatcggttggtctttctgaggcctatgacgaggatcagctgttctttttcgattttagtcagaacacaagggtgccacgccttccagaattcgctgactgggctcaggaacagggggatgcccctgcaattttgttcgataaagagttctgtgaatggatgatccaacagatcggtcctaaactggacggcaagattcccgtgagccgagggtttccgatagccgaggtatttaccctgaagcccctagagtttggtaagccaaacactttggtgtgttttgtgagtaacctgttcccccctatgctgacagttaattggcagcatcattctgttcctgtagaaggctttggaccaacattcgtgtccgccgtggacggtctctcctttcaagccttctcctatcttaatttcacccccgaaccaagcgacatcttctcttgcatcgtcacccacgagatcgaccgttacacagcaattgcatattgggtgcctcgcaacgcgcttccttccgacttactcgaaaatgtgctgtgcggggtggctttcggtcttggcgtcttggggatcattgtcgggatagtcttgattatctattttcggaaaccttgctccggatag

SEQ ID NO: 162089 - DNA, 510 bp, Artificial Sequence
  derived and/or modified sequence
atgtggcctgatgatctgcaaaatcacaccttcctgcacacagtttactgccaagatggcagcccaagtgtgggcttgtccgaagcatatgatgaagatcagctgtttttctttgacttctcccagaatacgagggttcctcgactgccagagttcgcagactgggcgcaggagcaaggcgatgccccagcgatcctcttcgataaggagttctgtgagtggatgattcagcagatcggtcccaagctggatggaaaaatcccggtgagccggggatttccaatagccgaagtgttcaccttaaagccactggaatttgggaagccaaatacgctcgtgtgctttgtgtccaatctcttcccacccatgcttaccgtgaattggcagcaccactctgtccccgtggaggggtttggcccaactttcgtgtctgcggtggacgggctgagcttccaggctttttcttacctaaactttaccccagaaccgtccgatatattctcctgctag

SEQ ID NO: 162090 - DNA, 873 bp, Artificial Sequence
  derived and/or modified sequence
gtgtcctgctggttgagtgattcttgccaagaactgcagcgcagaggcatcattctctgctcatatggggtgacgtccccaatcgctgtgtttggccgacccggtagattgaggaacaggcgccactttgagcgaagacttgtcccaatgaaatggctgaaaaagtgcttggatactgcaccaactccaatgtggcccgacgatttacagaaccatacattcctccacacggtctactgtcaggacggcagcccatcggtcggcctcagcgaagcatacgatgaggaccagttgtttttcttcgatttctcccagaacactcgcgtccctcggctcccagaatttgccgactgggcccaggagcagggggacgctcctgctatcctgtttgataaggagttttgtgaatggatgattcagcagatcgggcctaagctggacggaaaaattccagtttctaggggcttcccaatcgcagaagtattcaccttgaagccgcttgaatttggtaaacccaataccctcgtatgtttcgtgagtaaccttttcccgcctatgctgaccgtaaactggcagcaccacagcgttcctgtggaggggttcggacccaccttcgtatctgctgtggatggtctgtcctttcaggcattcagctatctgaacttcacccctgagccgtccgacattttttcatgtatcgtgacccatgaaatcgatcgctacacggccatcgcctactgggtacctcgaaatgccttaccatctgatctgctcgaaaatgtcttatgcggagtggccttcggccttggcgtcctgggaatcattgtgggcattgtcttaataatatacttcaggaagccctgctcgggatag

SEQ ID NO: 162091 - DNA, 510 bp, Artificial Sequence
  derived and/or modified sequence
atgtggcctgatgatctccagaaccacaccttcctgcacaccgtatactgtcaagacggatccccctccgtcggactgtccgaagcctatgatgaggatcaactgttcttttttgattttagccagaacactcgggtgcctcgactgccggaatttgcggattgggcccaggagcagggagacgcacctgccattctgttcgataaagaattttgcgagtggatgattcaacaaataggccctaagctggatgggaaaataccagtctccaggggttttcctatcgctgaagtgttcactttaaagccgttagaattcggtaaaccaaacaccctcgtttgttttgtgagcaacttatttcccccaatgttgacagtcaactggcagcatcacagcgtgcctgttgaaggctttggcccaaccttcgtttccgccgttgacggcctttctttccaggcctttagttaccttaatttcactccagaaccttccgacatttttagttgctag

SEQ ID NO: 162092 - DNA, 684 bp, Artificial Sequence
  derived and/or modified sequence
atgggccacgagcaaaaccagggggctgctcttctccagatgttacccttgctctggctcctgccacactcctgggcggtacccgaggcccctacacccatgtggccagatgacctgcagaatcatacttttctgcacaccgtgtattgtcaggatggtagcccttccgttggcctttcagaggcctatgacgaggatcagctgtttttttttgatttctcccaaaacaccagggtgcctcgtttgcctgagttcgccgactgggcccaggagcagggcgatgcccctgcaatcctgtttgacaaggaattttgcgaatggatgattcaacaaataggacctaagttggatgggaagatcccggtgtctagagtcaactggcagcaccacagcgtccccgtggagggattcgggcctaccttcgtaagtgccgtggacgggctgagcttccaggcatttagttacctgaacttcaccccagaacccagcgacatcttttcctgtatcgtgacgcacgagattgaccggtacactgcaattgcttactgggtaccacggaatgctctcccaagcgatctacttgagaacgtgctgtgtggggttgcttttggccttggcgtgctgggaatcatcgtagggattgtgctgatcatttatttccggaagccgtgctcgggggattag

SEQ ID NO: 162093 - DNA, 510 bp, Artificial Sequence
  derived and/or modified sequence
atgtggccagatgatttgcaaaatcatacctttttgcacactgtgtactgtcaagatggatccccatccgtcggcctctctgaggcttatgatgaagaccaattattctttttcgattttagtcagaatacacgggtccctcgtctgcctgaatttgcagactgggctcaggagcagggggacgcacccgctattctgttcgacaaagagttttgtgaatggatgattcagcagataggaccaaagctggacggcaagatccccgtgtctagaggttttccaattgcagaagtatttaccctgaagccgctcgagttcggaaagcccaacactctggtgtgctttgtgagcaatctgttcccccctatgttaactgttaattggcagcatcatagtgtgccagtggaaggcttcggacccacatttgtctctgccgtggatggcctgagcttccaagctttcagttatctaaactttacacccgagccgtctgacatcttttcgtgttag

SEQ ID NO: 162094 - DNA, 501 bp, Artificial Sequence
  derived and/or modified sequence
atgggacatgaacagaatcaaggagccgcactgctgcagatgctgccactcctctggcttctgccacattcttgggcagtgcccgaaggctttccaatagcggaagtctttaccctgaaacccttagaattcggcaagcctaacactctggtgtgttttgtctctaacttgttcccaccgatgcttaccgttaattggcagcaccactcagtgcctgtggagggcttcggcccaactttcgtgtccgccgtcgacggtctgagcttccaggccttctcgtacctgaactttacccctgaaccaagtgacatcttctcctgcatcgtcacacatgagattgaccggtacaccgccattgcttactgggtgccacgaaacgcgctaccctccgacttgttggagaacgtgttgtgtggggttgcatttgggctgggcgtgctagggatcatagtgggaattgtactcataatctattttagaaagccttgttccggtgactag

SEQ ID NO: 162095 - DNA, 684 bp, Artificial Sequence
  derived and/or modified sequence
atgggccacgagcagaaccagggtgcagcattgctccaaatgctgcctttgctgtggttacttcctcacagttgggctgtccctgaggccccaacgcccatgtggccagatgacctgcagaaccacacctttctacatacagtgtactgtcaggacggttccccctccgtaggcctttccgaagcttacgatgaggatcagttattttttttcgatttctctcagaacacgcgggtccccagactgcctgaattcgccgattgggctcaggaacaaggggacgcacccgctattcttttcgacaaagaattctgcgagtggatgatccagcagattgggccaaaacttgacgggaagattcccgtgtctagggtgaactggcaacaccacagcattccagtcgagggcttcggtccaacctttgtgagtgccgtcgatggtttgtcctttcaggctttttcatacctgaattttactcctgagcccagtgatatcttcagttgcatcgtgactcatgaaatagacagatatacagccatcgcctattgggttcctcggaatgcactgccaagtgaccttctggagaatgtcctttgcggagtagccttcggcctcggagtgcttggaatcattgtgggaatcgttctgatcatatacttccgcaagccctgcagcggggactag

SEQ ID NO: 162096 - DNA, 873 bp, Artificial Sequence
  derived and/or modified sequence
gtgtcatgctggttaagcgactcttgccaggagcttcagaggcggggaattattctatgcagttatggtgttacctcacccatagccgtgttcggccgtcccggaaggctgcgcaatcgtaggcactttgagcggcgtctggttcctatgaagtggctgaagaaatgcctggatacagctcccacacccatgtggcccgacgatctccaaaatcacactttcctgcacaccgtgtactgtcaggacggcagcccgtcggtaggtctctcagaagcctatgacgaagatcaactgttcttcttcgactttagccagaatacgcgcgtacccaggctgcctgaatttgctgattgggctcaggagcagggcgacgccccagcaatattgttcgataaggagttctgtgaatggatgattcaacaaataggcccaaagcttgatggtaaaattccagtctcccgaggattccccattgctgaggtgtttacattaaaacccctcgagttcggtaaaccaaacactctggtttgtttcgtctcaaatttgtttccaccaatgttgactgttaactggcagcaccatagtgtgcccgttgaaggcttcggtcctactttcgtgagcgccgtggacggacttagcttccaagcatttagctatctcaacttcacgcctgaaccatctgacatattcagttgtatcgtcacccatgagattgacaggtataccgctattgcctactgggtgcctagaaacgctctccccagcgacctgctggaaaatgtgctgtgtggcgtcgccttcggtctcggggtactgggtatcatagtaggaatcgttctgattatttacttccgaaagccttgctctggctag

SEQ ID NO: 162097 - DNA, 510 bp, Artificial Sequence
  derived and/or modified sequence
atgtggcccgatgatctgcagaaccacactttccttcatacagtatactgtcaggacggctcaccaagcgtcggcctttcagaggcctacgacgaggaccagctatttttctttgatttcagtcaaaacactagggtgcctcgcctgccagaattcgcggattgggcacaagaacagggagatgcaccggctatcctgttcgacaaagagttctgcgaatggatgattcagcaaattggccctaagctggacggcaaaattcctgtgtctcgcggttttcctatagccgaagtattcacgctgaaacctctggagttcggaaagcccaacactttggtatgcttcgtaagcaacctcttcccccctatgctgactgtaaattggcagcatcactccgtgcctgtggaaggctttggtcccacattcgtgagcgcagtggacggcctaagtttccaggccttctcatatctcaacttcacgcccgagccttccgatatttttagttgctag

SEQ ID NO: 162098 - DNA, 510 bp, Artificial Sequence
  derived and/or modified sequence
atgtggccagacgacctccaaaaccacactttcctgcacaccgtgtactgccaggacggttctccgtccgtgggtctgagcgaagcctatgacgaggaccagctgtttttctttgacttttctcaaaacacaagggttcctcggctacctgaatttgctgattgggctcaggagcagggggatgcgccagccatccttttcgacaaggagttttgtgagtggatgatccagcaaataggcccaaaactagacgggaaaatccctgtcagtcggggattcccaatcgcggaggtgttcacattgaagcctctggagtttggaaagcccaacaccctggtgtgtttcgttagtaacctgtttccccctatgctgactgttaactggcagcaccacagcgtgcctgtcgagggattcggcccaactttcgtatctgccgtggacgggctctcattccaggcatttagttatttaaattttacccccgagcccagcgatatattcagctgctag

SEQ ID NO: 162099 - DNA, 684 bp, Artificial Sequence
  derived and/or modified sequence
atggggcatgagcagaaccagggcgcagctctcctgcagatgcttcctcttttgtggttactgcctcattcatgggcggtccccgaggctcctactccaatgtggcccgacgacttgcagaaccacacatttctgcacaccgtctattgccaggatggcagtcctagtgtgggtttgagcgaagcttatgatgaggatcagttattcttctttgacttcagtcaaaatacccgcgttcccagactccctgagttcgcagactgggcacaagagcagggcgatgcccctgccatccttttcgataaggaattctgtgaatggatgatccaacagattggcccaaaactcgacgggaagattccagtgtctcgggttaattggcagcatcactccgttccagtggaaggcttcggtcccacttttgtgtcagctgttgatggccttagcttccaggctttcagctatctcaattttacgccagaaccatccgacatattcagttgtattgtcacgcacgagatcgaccgatatacggcaatcgcctactgggttccgaggaatgcgctccctagtgacctactggagaatgtgctgtgtggcgtagcattcggccttggggtactgggcatcatagtcggcattgtgctgattatttatttccgaaagccctgcagtggggactag

SEQ ID NO: 162100 - DNA, 873 bp, Artificial Sequence
  derived and/or modified sequence
gtatcctgttggttgagcgatagctgtcaggagttgcagaggcggggtataattctgtgttcatatggcgtgaccagccccatagccgtgtttgggaggccagggcgactgaggaatcggaggcacttcgagaggcggcttgtccctatgaagtggctgaagaagtgcctcgatactgccccaacgccgatgtggccggatgatctgcagaaccatactttcttacataccgtgtattgtcaggatgggtcaccatctgtgggactatctgaggcgtacgacgaggatcagctcttctttttcgacttcagccagaacacccgcgtgcccaggctacccgagttcgccgactgggcccaggagcagggcgatgcccctgcaatcctattcgacaaggagttttgtgagtggatgattcaacaaatcggcccaaaactagatggaaaaatacccgtttccagggggttcccaatcgccgaagtgttcaccctaaagcccctggagtttggaaagcccaacactctagtttgtttcgtctctaatctgtttcccccaatgcttactgttaattggcagcaccacagtgtgcctgtcgagggcttcggacccacctttgtgtccgccgtcgatgggctgtctttccaggcctttagttacttgaacttcacaccagaaccatcggacattttcagttgtatcgtaacccacgaaatagataggtatacagctattgcctactgggtgccccgtaacgcactgcccagtgatctgctggagaacgtgctgtgtggggtagccttcgggctaggtgtgcttggcatcatcgtgggaatcgtactgataatttatttccgcaagccctgttcagggtag

SEQ ID NO: 162101 - DNA, 786 bp, Artificial Sequence
  derived and/or modified sequence
atgggccacgaacagaaccagggcgctgctctgctccaaatgctccccctcctgtggttgctcccgcattcatgggcagtgccggaggcccctacccccatgtggccagacgatctgcagaatcacaccttcctgcacacagtgtattgtcaggacgggtcaccttcagtgggcctgtcagaagcgtatgacgaggaccagctgttcttcttcgatttttcgcagaacactagggtaccccgactcccggaatttgcagattgggcccaggagcagggcgatgctcctgcaatcctgttcgataaggaattttgcgagtggatgattcagcagatcggaccgaagctggacggcaagataccagtcagtaggggcttcccaatagccgaagtcttcacgctgaagcccctggaattcggtaaaccaaacaccctcgtgtgtttcgtttccaaccttttccccccaatgctcaccgtcaactggcagcaccactcagttccggttgagggcttcggccctacctttgtcagtgcagtggacggactatccttccaggctttcagctatctgaatttcacgcccgagccctctgatattttctcctgtatagttactcatgagatcgaccggtacacagctatcgcatactgggtgcctagaaacgctcttcccagtgacctcctggagaatgtactttgcggagttgccttcgggctgggagtgctgggcattatagtaggcatcgtgcttatcatctattttaggaagccatgctctggggattag

SEQ ID NO: 162102 - DNA, 501 bp, Artificial Sequence
  derived and/or modified sequence
atggggcacgaacagaaccagggggcagccctattgcagatgctccccctgttgtggctcctcccacacagctgggcagtcccagaaggattcccgattgccgaagtctttacactcaagccactggaattcggtaagcccaacaccctcgtgtgctttgtgagcaatctgttccctccaatgctgacggttaactggcagcaccattcggtgccggtcgagggcttcggaccaaccttcgtctcagcagttgacggtttgagcttccaagccttttcgtacctgaatttcactccagagccttctgatatatttagttgcattgtgacgcacgaaattgatcgctatactgctattgcctactgggtgccgcgtaatgcactgccctctgacctactagagaatgtactttgtggggtggctttcggactgggtgtgctggggatcatcgtgggaatcgttctgatcatttactttaggaagccgtgctccggcgattag

SEQ ID NO: 162103 - DNA, 510 bp, Artificial Sequence
  derived and/or modified sequence
atgtggcctgatgatctgcagaatcacaccttcttacacaccgtgtactgccaggacggttcaccttccgtgggcctatctgaggcctatgatgaggatcagctcttttttttcgacttctctcagaacacacgggtgcctaggcttcctgagttcgctgattgggctcaggagcagggcgacgcaccagcaatactctttgataaggagttctgcgaatggatgatccagcagatcggacccaagttggacggcaagattccggtatccagagggtttcccattgccgaggtgtttacactcaaacctctggagtttgggaagcctaacactctggtttgcttcgtgtcgaatctgttcccccctatgctgaccgtaaattggcaacaccactccgtacccgtggaggggttcggccctacatttgtttccgcagtggacggcctttcgttccaggctttttcttatctcaacttcaccccagagccatctgatattttttcctgttag

SEQ ID NO: 162104 - DNA, 786 bp, Artificial Sequence
  derived and/or modified sequence
atggggcacgaacagaatcaaggggcagccctgttgcagatgcttcctctcttgtggcttcttccccactcatgggcagttccggaagctcccactccaatgtggccagacgaccttcagaaccatactttcctacacaccgtgtactgtcaggatgggtccccaagtgtgggcctctcagaagcttacgacgaggaccaattgtttttcttcgacttctctcaaaacacgcgggttcccaggttaccggaattcgccgactgggcccaggaacagggagatgccccagccatcctgtttgacaaggagttctgtgagtggatgatccagcagattgggccaaaactggacggcaagataccagtgagtaggggtttcccaatcgccgaagtattcacccttaagccccttgagtttggtaagccaaacactctggtgtgtttcgtcagtaatctgttcccgccaatgctcacagtcaattggcaacaccactccattccagtggaaggttttggtcccacctttgtaagcgcggtggatgggctaagctttcaggccttcagttatctgaactttacccccgagccctccgacattttctcctgtatcgtgacccacgaaatcgacagatatactgccatagcgtattgggtaccacgcaatgccctgcccagtgatctcctagaaaacgtgctgtgtggggtggccttcggcctgggcgttttgggcatcatagtgggtatcgtattaatcatttacttccgcaagccctgtagcggggactag

SEQ ID NO: 162105 - DNA, 873 bp, Artificial Sequence
  derived and/or modified sequence
gtgagctgctggctgagtgatagttgccaggagttgcagaggcgaggaattatactgtgttcgtatggagtcacctctcccatcgccgtcttcgggaggccgggtcggctgagaaaccggcgacactttgagagacgactcgtaccaatgaagtggctcaagaagtgtctagacacagcccctacgccgatgtggccagacgacctgcagaatcacacatttctgcatacagtttattgccaggatggatcccccagcgtgggcctgagcgaagcctatgatgaagatcagctgtttttttttgatttcagccagaacaccagagttcccaggcttcctgagtttgcagactgggcccaggagcagggggacgcgcctgctattctcttcgacaaagaattttgtgaatggatgatccagcagattggaccaaagctggatggtaagatcccagtgagcaggggattcccaatcgctgaggtgtttaccctgaagcccctcgaatttggcaagcccaatactctggtgtgctttgtgtccaacctgttccccccaatgctcaccgtgaactggcagcatcactccgtacccgtcgaaggatttggacccacctttgtgagtgccgtagacggcctctcctttcaggcttttagttacttgaatttcacccccgagccatccgatattttctcgtgcatcgtaacccatgagattgatcgctacacagccattgcatactgggtcccccgaaatgctctacccagtgacctccttgaaaacgtgttatgcggagtggcctttggtctgggggtgctggggatcatcgttggaatcgtactgataatttatttccggaaaccttgcagcggatag

SEQ ID NO: 162106 - DNA, 510 bp, Artificial Sequence
  derived and/or modified sequence
atgtggccagacgatctacagaaccacactttcctccacactgtgtattgccaggatggttctcccagtgtaggtctttcagaggcctacgacgaggaccagctcttctttttcgattttagccagaacactcgggtgcctagactcccagagtttgccgactgggcacaggaacaaggagatgcccctgcaatcttgttcgacaaggagttctgcgagtggatgatacagcaaatcggcccaaagcttgatggcaagatcccagtctcccgcggatttcctatcgccgaagtgttcacgctcaagccactcgagtttggcaagcccaacacattagtatgttttgtaagcaacctgtttccccctatgctcacggtcaactggcagcaccatagtatcccggttgaaggcttcggccctaccttcgttagtgcagtcgacggcctgtcattccaggctttctcttatctgaattttacccctgagccttctgatatatttagctgttag

SEQ ID NO: 162107 - DNA, 786 bp, Artificial Sequence
  derived and/or modified sequence
atgggccatgaacaaaaccagggagccgcattactgcagatgctgccattactatggctgctcccgcattcttgggcagttcctgaagccccaaccccaatgtggcctgatgatttgcagaatcacacctttctgcacaccgtgtactgccaggacggttctccgtccgttggtttgtcagaagcttacgatgaagaccagctctttttcttcgactttagtcagaacacacgggtccctcggttacccgagttcgcagattgggcccaggagcaaggagacgccccagcaattttgtttgataaggaattttgcgagtggatgattcaacagatcggcccaaagctcgatggaaaaatccccgtttcccggggattccctatcgctgaggtctttacccttaaacccctggaatttggcaagccaaatacccttgtatgcttcgtctcaaacttgtttcctccgatgctgacggtgaattggcagcatcattctgtgcctgtagaaggtttcgggccaacattcgtatctgcggtggacggcttatccttccaggctttctcctacttaaatttcactccagagccttccgacatctttagctgtattgtaactcacgaaattgaccgctataccgctatcgcttactgggttcctcgcaatgccttacctagcgatttactggagaatgtcctgtgcggtgtagccttcggtctgggcgttctcggaatcatagtggggattgtgcttatcatttacttccggaagccgtgcagtggggattag

SEQ ID NO: 162108 - DNA, 501 bp, Artificial Sequence
  derived and/or modified sequence
atgggccacgaacaaaaccagggtgcggctctccttcagatgctgccactgctgtggttgttgccacacagctgggccgtccccgaaggcttccctattgccgaggtgtttacactcaagcccttggagtttgggaaacctaatactctcgtgtgctttgtgagtaatctcttccccccaatgctgacagtgaactggcagcatcatagcatcccggtggaaggtttcggcccaacatttgtgtccgccgttgacggactgagtttccaagcgttctcttatctcaacttcactcccgaaccttcggatattttctcttgtatcgtgacacacgagattgacaggtatactgccattgcatactgggttccgagaaacgctctgccctccgacctgcttgagaatgtactgtgcggtgtcgccttcggcttgggcgtgttgggcataatcgtcggaatcgtcctaattatctacttcaggaaaccctgttccggggactag

SEQ ID NO: 162109 - DNA, 786 bp, Artificial Sequence
  derived and/or modified sequence
atgggccatgaacagaaccagggagccgcactcctacagatgctgccccttttgtggctgcttccacacagctgggcggtgcccgaagctcccactcccatgtggccagacgacttacagaaccataccttccttcacactgtttattgccaagatgggagtccttcggtaggattatccgaggcttacgacgaggatcagttatttttcttcgatttctctcaaaacactcgtgtgcctcgcttaccggaattcgcagactgggcacaggaacagggagatgccccagctattctcttcgataaagaattttgcgagtggatgattcaacagattggccctaagctggacgggaaaattccagtctcaagaggctttccaatagctgaggtgttcacactgaagccattggagttcggcaagccgaacactctggtgtgctttgttagcaatctgtttccgccaatgttaaccgtcaactggcagcatcacagcgtccccgttgaaggttttggaccaaccttcgtgtcagcggtcgacggactgagctttcaggcgtttagctacctgaactttacccctgagcctagcgatattttttcctgtatcgtaacccatgagattgaccgttatactgccattgcttactgggtgcctagaaacgcactgccttctgatcttctcgagaacgttctgtgcggcgtcgcctttgggcttggagtcctggggattatcgtgggaatcgtgctgatcatctacttccggaagccctgcagcggggattag

SEQ ID NO: 162110 - DNA, 684 bp, Artificial Sequence
  derived and/or modified sequence
atgggacatgaacagaaccagggagctgcacttctccagatgctacccctgctctggctcttaccacactcatgggccgttcccgaagctcccactccgatgtggccggacgacttgcagaatcacacattcttacacaccgtttactgtcaggacggaagtccctcggtcggtctttccgaagcttatgacgaggaccagctttttttttttgatttttctcagaatacccgcgtcccgagactaccggaatttgctgattgggcacaagagcaaggcgacgctccggcaattctgttcgataaagagttctgcgagtggatgatacagcagattggaccaaaacttgatggaaaaatacccgtcagtagggtgaattggcaacatcactcggtgccggtggagggattcggccctaccttcgtaagtgcggtcgacggcctgagcttccaggccttcagctacctcaatttcacgcctgaaccatctgacatattctcctgtatcgtgactcatgagatcgacaggtataccgctatagcttactgggtacccaggaacgcccttccaagcgacctgttggagaacgtgctgtgcggcgttgcctttggcctgggggtgctggggatcatcgtggggattgtgctgattatttactttcgcaaaccctgcagcggagactag

SEQ ID NO: 162111 - DNA, 501 bp, Artificial Sequence
  derived and/or modified sequence
atgggtcacgagcagaatcagggagccgcactgctccagatgctgcccctgctttggctccttcctcattcctgggcagtccctgagggctttcctatagcggaagttttcacgctgaagccgcttgagtttgggaaacctaatacactggtctgctttgtgagtaacttatttccacccatgttaacagtgaactggcagcaccacagtgtccccgtcgaaggttttggcccaacctttgtttctgccgtggatggcctctcttttcaggctttctcatacctgaacttcacgccagaaccctccgacatcttttcctgtatcgtgacacatgagatagatcgctacactgcgattgcttactgggtgccaaggaacgctctcccaagtgacttgctcgagaatgtgctttgcggtgtggcgttcggcttgggggttctgggaattattgtgggcatagtcctgatcatatacttccgcaagccctgctccggcgactag

SEQ ID NO: 162112 - DNA, 684 bp, Artificial Sequence
  derived and/or modified sequence
atgggccatgagcagaaccaaggagcggctctgcttcagatgctgcccctgctgtggttgttgccacattcatgggcagtgccggaggcccctacacctatgtggcccgacgacttgcagaatcatacttttcttcacacggtttattgtcaagacggtagtccctccgttggattgtccgaggcatacgatgaggatcagctgttctttttcgatttttcacagaatacccgggtccctaggcttcctgagtttgcagattgggcccaggaacaaggtgacgccccagctatcttatttgacaaggaattctgtgagtggatgatacagcagatcggaccgaagttagatgggaaaatcccagtgtcccgagtgaattggcagcaccattcagtgcccgtggagggcttcgggccaacctttgtgtctgcagtggacgggttgagtttccaggcatttagctaccttaatttcactccggagccgagcgatattttcagctgcattgtgactcatgagatcgacagatatacagctatcgcatactgggtgcctcggaacgcactaccctccgacctgctggaaaatgtactgtgtggcgtagcctttggtctgggggtgcttggaattattgtggggatcgtgttgataatctacttccgcaagccgtgctcaggcgattag

SEQ ID NO: 162113 - DNA, 684 bp, Artificial Sequence
  derived and/or modified sequence
atgggccacgaacagaaccagggagcggcactactgcaaatgctacctctgctgtggctactgcctcattcatgggccgtgcccgaagcacccactcccatgtggcccgacgaccttcagaatcacaccttcctgcacactgtctattgtcaagacgggtcgcccagcgtcggactttccgaggcgtacgacgaggatcagctttttttctttgatttctcacagaacactcgagtgccaaggctgcccgagtttgccgactgggcccaggaacagggtgatgcccctgcaatactcttcgataaagagttttgcgagtggatgattcaacagattgggcctaagttggatgggaagatacctgtaagcagagtaaactggcagcaccattctgtgcccgtggagggattcggccctactttcgtatccgctgtggatggcctttcgtttcaggcgttttcctacttgaacttcacgccagagcccagcgatattttctcgtgtatcgtcacccacgagatcgatagatatactgccattgcttattgggtgccccgtaacgccctgccgtcggacctcctggagaacgtcctgtgcggcgtagctttcggactgggtgtgctgggtattattgtcggcattgtccttatcatctatttccggaagccttgtagcggtgattag

SEQ ID NO: 162114 - DNA, 786 bp, Artificial Sequence
  derived and/or modified sequence
atgggccacgaacagaatcagggagccgctctcctgcagatgctgcccttgctgtggctactgccacacagttgggccgtaccggaggcacccaccccaatgtggcctgacgacctgcagaatcataccttcttgcatactgtctactgccaagacggcagccccagcgtgggccttagcgaggcgtacgatgaagaccagttgttcttctttgatttctcccagaacacaagagttccccgtctgccagaatttgccgactgggcccaagagcagggtgatgcccctgccatattgtttgataaagaattttgcgaatggatgattcagcaaatcgggccaaagctcgacggcaaaatccctgtttctcggggattccctatcgctgaggttttcaccctaaagcccctggaattcgggaagcccaacacactggtgtgcttcgttagtaacctgttcccgccaatgttgaccgtgaactggcaacaccattctgtcccggtggagggatttgggccaacatttgtgagcgccgtagacggcctctcattccaagcctttagttatctgaactttacgcccgagcctagcgatatattctcttgcatcgtgactcacgaaatcgatagatacactgcaatcgcctattgggtaccaagaaatgcattaccttctgatctgctcgagaacgtgctgtgcggtgtggcatttggtctgggagtcttgggcattattgtcggaatagtcctaatcatctactttcgaaaaccatgcagtggtgactag

SEQ ID NO: 162115 - DNA, 501 bp, Artificial Sequence
  derived and/or modified sequence
atgggtcacgaacagaaccaaggtgccgctctgctgcagatgttgccactgctgtggttgctacctcattcgtgggccgtcccagagggatttccaatcgctgaggtgttcactctcaagcctttggagtttggcaaacccaacacactcgtctgtttcgttagtaacttattccctcccatgttaacggtgaattggcagcatcactcggtccccgtggagggcttcggacccacctttgtgtcagctgtggatggcttaagctttcaggctttctcttatctgaactttacccccgagccctcagacatcttttcgtgtattgtaacacacgagattgaccggtacactgccatcgcatattgggttcctcgcaacgctctgccttctgacctccttgaaaacgtcctctgcggcgtggcctttgggcttggggtgttggggatcattgtcggcattgtgttgataatttactttcggaaaccctgctcaggtgattag

SEQ ID NO: 162116 - DNA, 786 bp, Artificial Sequence
  derived and/or modified sequence
atgggtcatgagcagaaccaaggggcagcgttacttcagatgttgcccttgctttggctacttccccattcatgggccgtgcccgaagctcctacgcccatgtggcccgatgacttgcagaatcacacattcctgcacacggtatactgccaagacggcagtccctcagtcggcctcagcgaagcctacgacgaggatcagctcttctttttcgacttcagccagaacactcgcgttcccagattgcctgagtttgccgactgggcccaggaacaaggcgacgcacccgctatattattcgacaaagagttttgcgaatggatgattcagcagattggtccaaagcttgatgggaagattcccgtgtcacggggttttccaatagcggaggtgttcaccctgaagcctctggaattcggaaagccgaataccctggtttgctttgtctctaacctttttcctcccatgttgactgtcaattggcagcaccattcagtgccagtggagggtttcggaccaacatttgtgtccgccgtcgacggtctttcctttcaggccttttcctatctcaactttacaccagagcccagcgatatcttcagctgcatcgtaacccacgaaattgacaggtatactgcaatcgcctactgggtccccagaaatgccctgcccagtgacctcctggagaatgtgctgtgcggggtagcctttggactcggggttctggggatcattgtcggcatcgtgctaatcatatactttaggaagccctgttcaggtgattag

SEQ ID NO: 162117 - DNA, 873 bp, Artificial Sequence
  derived and/or modified sequence
gtgagttgctggctctccgatagttgccaggaactgcaaaggcggggaattattttgtgttcctacggggtgaccagtcctatcgccgtcttcggaaggccaggacgacttagaaacaggagacacttcgagcgtcgactcgttccgatgaaatggctgaaaaaatgcctggatacagcccctacccctatgtggcctgatgatctccagaaccatactttcttgcatacagtctactgtcaggacgggagcccaagcgtgggtctgtcagaagcttatgatgaagatcagctgtttttttttgatttctcacagaataccagagttcctcggctccctgaatttgcagactgggctcaagaacagggagacgctcctgcgatcctgtttgataaagaattctgcgaatggatgatccagcagatcggccctaaactcgacgggaagatacctgtatctcggggattcccgatcgccgaggtttttactttgaaacctctggagtttgggaagcctaataccctcgtgtgcttcgtaagcaacctgttcccacctatgctgaccgtgaactggcagcaccactccgtgccagtggaggggttcggacctaccttcgtgtccgctgtggatggcctgtcctttcaggccttctcctacttaaactttactccggagcctagcgacattttctcatgtatcgtaactcacgaaattgaccgctataccgccattgcctactgggttcctaggaatgccctgccgtctgacttactcgaaaatgttctgtgcggcgtggcctttggcctcggcgtcctggggatcatagtcgggattgttctcataatctactttagaaaaccctgttcgggctag

SEQ ID NO: 162118 - DNA, 873 bp, Artificial Sequence
  derived and/or modified sequence
gtttcttgctggctcagtgatagctgtcaggaacttcagagacgagggataatcctgtgtagctatggtgtcacttccccaattgcagtgtttggcagaccaggtcggttgcggaataggcggcactttgagagacgcctcgtgccaatgaagtggctgaaaaaatgcctcgacaccgctccaactcccatgtggccggatgaccttcaaaatcatacgtttctccacactgtgtactgtcaggacggcagccccagtgttgggctgagcgaggcatatgacgaggaccaattgtttttttttgacttcagccagaacaccagggtccctcgccttcccgagttcgcagattgggcgcaggaacagggcgatgctccagcaatactgttcgataaggaattttgcgaatggatgatccagcaaatagggccaaaactagacggcaagatccctgtcagcagggggtttcccatagccgaggtgttcactctgaagcctctagagtttggcaaacctaacacgctggtgtgcttcgtgagcaacctattccccccaatgctcactgtcaattggcaacatcactcaattccggtcgaggggttcggacctaccttcgtgtccgcagtggatggcctaagtttccaggccttcagctatttgaattttacacccgagccatcagatatctttagctgtattgtgacgcatgagatagatcggtacactgcgatcgcctactgggtgcctcggaacgccctcccatctgatctgttggagaacgtgctgtgtggtgtagcgtttgggctgggcgtattagggattattgtggggattgtgctgattatatatttcaggaagccctgcagcggatag

SEQ ID NO: 162119 - DNA, 873 bp, Artificial Sequence
  derived and/or modified sequence
gtttcttgctggttgtcagactcctgccaggaattgcagcgaaggggcattatcttgtgcagctacggagtgacgtcccctatagccgtcttcggacggcctggaagacttaggaaccggagacatttcgagcggcgactcgtcccaatgaaatggctgaagaaatgtttggatacggccccaacccccatgtggcccgatgatctgcagaatcacacttttcttcacaccgtttattgtcaagacggcagtccctccgttggcctcagtgaagcgtatgacgaggaccagcttttttttttcgacttctctcagaatacaagagtacccaggctacccgaatttgcagactgggcccaggagcagggggatgccccagcgatcctgtttgataaggagttttgcgagtggatgatccagcaaatagggccaaaacttgacggaaaaatccctgtgtcaagaggcttccctatagcagaagtatttactctgaaaccactggagtttggaaaacccaatacactggtttgctttgtttctaacttgtttccacctatgctgacagtgaactggcagcatcacagtgtccctgtggagggcttcggtcccaccttcgtcagtgcagtggatggcttgtcctttcaggcgttctcctacctcaactttactcctgaaccttccgacatattcagttgcatcgtcacacacgagatcgaccgttacaccgcaatcgcttactgggtgccccgaaatgctctgccctcagaccttctggagaacgtgctatgtggggtagcgtttgggctgggcgtcttgggaattatcgttgggattgtcctgatcatctatttcaggaagccgtgtagcggttag

SEQ ID NO: 162120 - DNA, 501 bp, Artificial Sequence
  derived and/or modified sequence
atgggacacgagcaaaaccagggtgcggcactgttgcaaatgttacccttgctgtggttgctgcctcacagctgggcagtcccggaagggttccccattgcagaagtatttactctgaaacctcttgagttcggcaagcccaatactctagtttgtttcgtcagtaatctgtttccccctatgcttactgtcaactggcaacatcacagcgtcccggtggaaggcttcgggccaacttttgtgagcgccgtcgatgggctgtcctttcaggcctttagctacttaaacttcacacctgagccaagtgacatattttcctgtattgtgactcacgagatagaccggtacactgctatcgcatattgggtcccacggaatgcactgcccagtgatctcctggagaatgtgttatgtggggtggcctttggcttaggtgtgctcggcattatcgtgggaattgtcctgataatttatttccgcaagccgtgcagcggcgattag

SEQ ID NO: 162121 - DNA, 510 bp, Artificial Sequence
  derived and/or modified sequence
atgtggcctgatgatctgcaaaaccacaccttcctgcacaccgtatattgtcaggacgggtcacctagcgttggcctgtcagaggcgtatgatgaagaccaattgttcttttttgacttttcacagaatacgagagtcccacgcttacctgagtttgcagattgggcccaagaacagggcgatgctcccgcaattttgtttgataaagaattttgtgaatggatgatccagcaaattggtcccaagctggacggcaagattcccgtcagccggggtttcccaatagcggaagtcttcacactgaagccactggagtttggcaaaccgaacactctggtgtgtttcgtgtctaacctctttccaccaatgctcaccgtaaactggcaacaccactcagttccagtggaaggctttggtccaacatttgtgtcggcagtggacgggctcagttttcaggcattctcttatctcaattttacgcccgaaccctcagatatcttctcctgctag

SEQ ID NO: 162122 - DNA, 1122 bp, Artificial Sequence
  derived and/or modified sequence
gatctaaggccaccctctcggggagggagttggggaagctgggttggctgggttggtagctcctacctactgtgtggcaagaaggtatgggtcatgaacagaaccaaggagctgcgctgctacagatgttaccacttctgtggctgctaccccactcctgggccgtccctgaagctcctactccaatgtggccagatgacctgcaaaaccacacattcctgcacacagtgtactgccaggatgggagtcccagtgtgggactctctgaggcctacgacgaggaccagcttttcttcttcgacttttcccagaacactcgggtgcctcgcctgcccgaatttgctgactgggctcaggaacagggagatgctcctgccattttatttgacaaagagttctgcgagtggatgatccagcaaatagggccaaaacttgatgggaaaatcccggtgtccagagggtttcctatcgctgaagtgttcacgctgaagcccctggagtttggcaagcccaacactttggtctgttttgtcagtaatctcttcccacccatgctgacagtgaactggcagcatcattccgtccctgtggaaggatttgggcctacttttgtctcagctgtcgatggactcagcttccaggccttttcttacttaaacttcacaccagaaccttctgacattttctcctgcattgtgactcacgaaattgaccgctacacagcaattgcctattgggtaccccggaacgcactgccctcagatctgctggagaatgtgctgtgtggcgtggcctttggcctgggtgtgctgggcatcatcgtgggcattgttctcatcatctacttccggaagccttgctcaggtgactgattcttccagaccagagtttgatgccagcagcttcggccatccaaacagaggatgctcagatttctcacatcctgcccaggatctcctcttagggtagaagtctctgggacatccctggggtgtgtgtgtagatttcccacctggggactctgctgtccctgggcttgcatcccagggatcccagagtggcctgcctatcacaaccacatcccttccccccacaaggcaataaatctcatttctttatatc

SEQ ID NO: 162123 - protein, 644 aa, Artificial Sequence
  derived and/or modified sequence
MSRQFSSRSGYRSGGGFSSGSAGIINYQRRTTSSSTRRSGGGGGRFSSCGGGGGSFGAGGGFGSRSLVNLGGSKSISISVARGGGRGSGFGGGYGGGGFGGGGFGGGGFGGGGIGGGGFGGFGSGGGGFGGGGFGGGGYGGGYGPVCPPGGIQEVTINQSLLQPLNVEIDPEIQKVKSREREQIKSLNNQFASFIDKVRFLEQQNQVLQTKWELLQQVDTSTRTHNLEPYFESFINNLRRRVDQLKSDQSRLDSELKNMQDMVEDYRNKYEDEINKRTNAENEFVTIKKDVDGAYMTKVDLQAKLDNLQQEIDFLTALYQAELSQMQTQISETNVILSMDNNRSLDLDSIIAEVKAQYEDIAQKSKAEAESLYQSKYEELQITAGRHGDSVRNSKIEISELNRVIQRLRSEIDNVKKQISNLQQSISDAEQRGENALKDAKNKLNDLEDALQQAKEDLARLLRDYQELMNTKLALDLEIATYRTLLEGEESRMSGECAPNVSVSVSTSHTTISGGGSRGGGGGGYGSGGSSYGSGGGSYGSGGGGGGGRGSYGSGGSSYGSGGGSYGSGGGGGGHGSYGSGSSSGGYRGGSGGGGGGSSGGRGSGGGSSGGSIGGRGSSSGGVKSSGGSSSVKFVSTTYSGVTR

SEQ ID NO: 162124 - DNA, 1935 bp, Artificial Sequence
  derived and/or modified sequence
atgagccgccagttctctagcagaagtggctacaggagcggcggaggattttcatccggttccgccgggattatcaattatcagcggcggacgacgtcgtcctccacacggaggagcggcggcggcggaggacggttcagctcttgtggcggcgggggcggcagttttggagccggcgggggctttggatcaagaagcctggttaacctgggagggagcaaaagcatcagcatctctgtggcccgaggtggcggaagggggagcgggtttgggggagggtatggcggaggaggctttggcgggggaggatttggcggcggggggttcggcggtggcggaatcggggggggcggctttggcggctttggcagtggcgggggggggttcggcggcggtgggtttggcggaggcggctacgggggcgggtacggtccagtttgccccccaggtggcatacaagaagttactatcaaccagagcttgctgcaacctcttaatgtcgagatcgatccagagattcaaaaggttaaaagccgtgaaagagagcagatcaagtcgttaaacaaccaatttgccagctttattgataaggttcgattcctcgagcaacagaaccaggtcctacaaaccaaatgggagctccttcaacaggtggacacgagcacacgaactcataacttagagccctactttgagtcattcatcaataatttgcgcaggcgcgtcgaccaactcaagtcagaccagagtcgactagattcagaacttaaaaacatgcaggacatggtcgaggattaccgcaataagtacgaagacgagatcaacaaacgtactaatgccgagaacgagttcgtaacaatcaagaaggacgtggacggagcgtatatgactaaggtggatctccaggccaagctggacaatctgcaacaggagatcgactttctaactgctttataccaggccgaactgagccaaatgcaaacccagataagtgaaaccaacgtcatcctatctatggacaataatagaagcttagatctggacagcataatagccgaagtcaaagcccagtacgaggacatagcccaaaaatctaaggcagaagctgaaagtctctatcaatccaagtatgaagaactccagataactgctggcagacatggcgacagtgtcagaaactccaagattgagatctcggagctcaatcgcgtcatccagaggctaaggtcggaaattgacaatgtgaaaaagcagatctcaaatcttcagcagtcgatcagcgacgccgagcagcggggagaaaatgccctcaaagatgccaaaaacaaactgaatgacctcgaagatgcattgcagcaagctaaagaagacttggccagacttctcagagattaccaagaactgatgaacaccaagctggcgttggatctggaaatagcaacctacaggacactgctggagggggaggagtcacgaatgtccggcgaatgcgcaccaaacgtatctgtctccgtgtcaaccagccacacaaccatatctggcggaggctcccgcggggggggcggaggaggttatgggagcggtggttcttcatatggctccggcggtggcagttacggatccggcggaggcggaggtgggggacggggatcttacggcagcggcggctcgagttatgggagcggtggcggttcatacggctctggagggggcggagggggccatggaagctatggctccggaagttcaagcggtggctatcgcggagggtctggaggaggcggtgggggaagttcaggagggcgaggttctggtggcggctcaagtggcgggagtattgggggtaggggctcctcatcaggcggggtgaagtcatctggtggctcatcctctgtgaagttcgttagtactacgtatagcggcgtgactaggtag

SEQ ID NO: 162125 - DNA, 2451 bp, Artificial Sequence
  derived and/or modified sequence
agaggagtgtttagctccttcccttactctaccttgctcctacttttctctaagtcaacatgagtcgacagtttagttccaggtctgggtaccgaagtggagggggcttcagctctggctctgctgggatcatcaactaccagcgcaggaccaccagcagctccacacgccgcagtggaggaggtggtgggagattttcaagctgtggtggtggtggtggtagctttggtgctggtggtggatttggaagtcggagtcttgttaaccttggtggcagtaaaagcatctccataagtgtggctagaggaggtggacgtggtagtggctttggtggtggttatggtggtggtggctttggtggtggtggctttggtggtggtggctttggtggaggtggcattgggggtggtggctttggtggttttggcagtggtggtggtggttttggtggaggtggctttgggggtggtggatatgggggtggttatggtcctgtctgccctcctggtggcatacaagaagtcactatcaaccagagccttcttcagcccctcaatgtggagattgaccctgagatccaaaaggtgaagtctcgagaaagggagcaaatcaagtcactcaacaaccaatttgcctccttcattgacaaggtgaggttcctggagcagcagaaccaggtactgcaaacaaaatgggagctgctgcagcaggtagatacctccactagaacccataatttagagccctactttgagtcattcatcaacaatctccgaaggagagtggaccaactgaagagtgatcaatctcggttggattcggaactgaagaacatgcaggacatggtggaggattaccggaacaagtatgaggatgaaatcaacaagcggacaaatgcagagaatgaatttgtgaccatcaagaaggatgtggatggtgcttatatgaccaaggtggaccttcaggccaaacttgacaacttgcagcaggaaattgatttccttacagcactctaccaagcagagttgtctcagatgcagactcaaatcagtgaaactaatgtcatcctctctatggacaacaaccgcagtctcgacctggacagcatcattgctgaggtcaaggcccagtacgaggatatagcccagaagagcaaagctgaggccgagtccttgtaccagagcaagtatgaagagctgcagatcactgctggcagacatggggatagtgtgagaaattcaaagatagaaatttctgagctgaatcgtgtgatccagagacttagatctgaaatcgacaatgtcaagaagcagatctccaacttgcagcagtccatcagtgatgcagagcagcgtggcgagaatgccctcaaggatgccaagaacaagctgaatgacctggaggatgccctgcagcaggccaaggaagacctggcccgcctgctgcgcgactaccaggagctgatgaacacaaagctggccctggatctggagattgccacctacaggaccctcctggagggagaagaaagcaggatgtctggagaatgtgccccgaacgtgagtgtgtctgtgagcacaagccacaccaccatcagtggaggtggcagccgaggaggtggcggcggtggctacggctctggaggtagcagctatggctccggaggtggtagctatggttctggaggtggcggcggcggcggccgtggcagctatggctccggaggtagcagctacggctccggaggtggcagctatggctctggaggtggcggcggcggccatggcagctacggctccggaagcagcagtgggggctacagaggtggctctggaggcggcggcggcggcagctctggcggccggggctctggcggcgggagctctggaggctccataggaggccggggatccagctctgggggtgtcaagtcctctggtggcagttccagcgtgaagtttgtttctaccacttattccggagtaaccagataaagagatgccctctgtttcattagctctagttctcccccagcatcactaacaaatatgcttggcaagaccgaggtcgatttgtcccagccttaccggagaaaagagctatggttagttacactagctcatcctattcccccagctctttcttttctgctgtttcccaatgaagttttcagatcagtggcaatctcagtcccctggctatgaccctgctttgttctttccctgagaaacagttcagcagtgaccaccacccacatgacatttcaaagcacctccttaagccagccagagtaggaccagttagacccagggtgtggacagctccttagcatcttatctctgtgctgttttggttttgtacataaggtgtaagcaagttgtttttcttttgtggagaggtcttaaactccccatttccttgttttgctgcaataaactgcatttgaaattc

SEQ ID NO: 162126 - DNA, 1935 bp, Artificial Sequence
  derived and/or modified sequence
atgagccggcagttcagcagccgcagcggctacagaagtggcggcggcttcagcagcggcagcgctggcatcatcaactaccagaggaggaccaccagcagcagcaccaggagaagtggcggcggcggcggccgcttcagcagctgtggcggcggcggcggcagctttggagctgggggcggcttcggcagccgcagcctggtgaacctgggcggcagcaagagcatcagcatctctgtggcccggggcggcggccggggcagcggctttggaggcggctacggcggcggcggctttggaggcggcggctttggaggcggcggctttggaggcggcggcatcggcggcggcggctttggaggcttcggcagcggcggcggcggctttggaggcggcggctttggaggcggcggctatggaggcggctacggccctgtgtgccccccaggcggcatccaggaggtgaccatcaaccagagcctgctgcagcccctgaatgtggagattgatcctgagatccagaaggtgaagagccgggagcgggagcagatcaagagcctgaacaaccagtttgccagcttcatcgacaaggtgcgcttcctggagcagcagaaccaggtgctgcagaccaagtgggagctgctgcagcaggtggacaccagcaccaggacccacaacctggagccctactttgagagcttcatcaacaacctgcggcggcgggtggaccagctgaagagtgaccagagccggctggacagcgagctgaagaacatgcaggacatggtggaggactacagaaacaagtatgaagatgagatcaacaagaggaccaatgcagaaaatgaatttgtgaccatcaagaaggatgtggatggagcctacatgaccaaggtggacctgcaggccaagctggacaacctgcagcaggagattgacttcctgacagccctgtaccaggccgagctgagccagatgcagacccagatcagcgagaccaacgtcatcctgtccatggacaacaacagaagcctggacctggacagcatcatcgccgaggtgaaggcccagtatgaagatattgcccagaagagcaaggccgaggccgagagcctgtaccagagcaaatatgaggagctgcagatcacagctggaagacatggagacagcgtgaggaacagcaagattgagatcagcgagctgaacagagtcatccagaggctgcggagtgaaattgacaacgtgaagaagcagatcagcaacctgcagcagagcatcagtgatgctgagcagagaggagaaaatgccctgaaggatgccaagaacaagctgaatgacctggaggatgccctgcagcaggccaaggaggacctggcccggctgctgcgggactaccaggagctgatgaacaccaagctggccctggacctggagatcgccacctaccgcaccctgctggagggggaggagagcaggatgtctggagaatgtgcccccaacgtgtctgtgtctgtgtccaccagccacaccaccatcagcggcggcggcagcagaggaggcggcggcggcggctacggcagcggcggcagcagctatggcagcggcggcggcagctatggcagcggcggcggcggcggcggcggccggggcagctatggcagcggcggcagcagctatggcagcggcggcggcagctatggcagcggcggcggcggcggcggccacggcagctatggcagcggcagcagcagcggcggctacagaggaggcagcggcggcggcggcggcggcagcagcggcggccggggcagcggcggcggcagcagcggcggcagcattggaggccggggcagcagcagcggcggcgtgaagagcagcggcggcagcagctctgtgaagtttgtgtccaccacctacagcggcgtgaccaggtag

SEQ ID NO: 162127 - DNA, 1935 bp, Artificial Sequence
  derived and/or modified sequence
atgagccggcagttcagcagccggagcggctaccggagcggcggcggtttttcttctggaagcgccggcattatcaactaccaaagacgcacgacatcttcctctacaagacgctctggcgggggtggaggaaggttcagctcatgcgggggtggtggcgggagcttcggcgcaggtggaggattcggttccagaagcctcgtgaatctggggggatctaaatcaatttccatctctgttgcgcgcggcggaggtcgggggagtggattcgggggagggtacgggggggggggctttggcggcgggggatttggcggaggagggttcggaggtggcggaataggtgggggaggctttggcggatttgggtccggcggaggcggattcggaggggggggcttcggcgggggtgggtatggcgggggctatggacctgtgtgtccacctgggggtatccaggaggtcacaatcaaccaatctcttctccagcccctgaatgtggaaattgatcccgagatccagaaagtgaagtcccgagagcgggagcagataaaatcactgaataatcagtttgcttccttcatcgataaggtcaggttcctggagcaacaaaaccaggtccttcagacaaagtgggagctgttgcagcaagtcgatacctcaaccaggacacataacttagagccatacttcgaaagctttatcaacaacctcagaaggagagtcgaccagcttaaatcagatcagtcaaggctggactcagaattgaaaaatatgcaggatatggtcgaagactaccgtaacaaatacgaagatgagataaacaagcgcactaacgccgagaatgagttcgttactattaaaaaagacgtcgatggcgcatacatgactaaagtggaccttcaggcaaagctcgataacctgcagcaagaaattgatttccttaccgcgctctatcaggccgagctgagtcagatgcaaacgcagatcagtgagaccaatgttatcctctccatggacaacaatcgaagcttggatctagactctataatcgctgaggtgaaagctcagtacgaggatatcgcgcagaaatccaaggccgaggctgagtcgctttatcagtcaaagtatgaggaactccagattaccgccgggagacacggcgactccgtgcgaaacagtaaaatcgagatcagcgaattaaaccgtgtcatacagcgcctcaggtccgaaattgacaacgtgaagaaacagatctctaacttacagcagtcaattagcgacgcagagcagcggggagaaaatgctctcaaggatgctaaaaacaaactgaatgacctggaagacgccctgcaacaagccaaggaggacctcgcacggcttctgcgcgactatcaggaattaatgaacactaaattagcccttgacctcgaaatcgccacataccgcacactgctggagggagaagaatccaggatgtcgggcgagtgtgctcctaatgttagcgtcagtgtgtcgactagtcacacgacaatcagcggtgggggctcacgcggcggtggcggcggcgggtacggcagtggaggtagtagctatggatctggcggggggtcttacggctctggcggagggggcggagggggccgaggcagctacgggagtggaggcagttcttatggctcaggtgggggttcatatgggtctgggggtggcggtggcgggcatgggtcttacggctccggaagctccagtggtggctacagaggaggttcagggggaggcggaggggggtcatcaggaggtaggggatccgggggcggatcttctggggggagcattggaggtaggggatcctcttctggcggagtgaaaagctctgggggctctagttccgttaagttcgtgtcaactacatactctggggtaacaagatag

SEQ ID NO: 162128 - DNA, 1935 bp, Artificial Sequence
  derived and/or modified sequence
atgagtagacagttttcatcacgatcaggataccgctcaggcggaggtttttcttcggggtctgctggaattattaattaccagaggagaactacttcaagcagcacaaggcgttccggcggaggcggtgggagattctcttcttgtggagggggaggcggttcctttggggcaggcggaggattcggtagcaggagtctcgtcaacctcggtggatctaagagtattagcatctcagtggccagagggggtggccgagggtcaggtttcggaggcggatacgggggagggggtttcggcggagggggatttgggggaggcggtttcgggggtggcggaatcggtggcggagggtttggcggttttggatcaggaggagggggatttgggggagggggatttgggggtggaggttatggaggaggatatggacccgtttgcccacctgggggtatccaggaggtgaccataaatcagtctctcctgcagcctctgaacgtcgagattgaccctgaaattcaaaaggtgaaaagcagagaacgagaacagataaagtctctgaataatcagtttgcctcattcatcgataaggtcaggttcttggaacagcaaaaccaggtgctacagaccaaatgggagctcctgcagcaggtagacacctccactaggacacacaatctggagccctatttcgaatcctttataaataatctccgaaggcgggttgaccagctgaagagcgaccaatcaagattagacagtgagctgaaaaatatgcaggacatggtcgaggactaccggaacaaatacgaggacgaaatcaacaagagaactaatgccgaaaacgagtttgtgactataaaaaaggacgtagatggagcttatatgacaaaggtcgacctgcaagcaaagttggataaccttcagcaggaaatcgatttcctaaccgccctataccaggccgagttgagccagatgcagactcaaataagcgagactaatgtcattctgtcaatggacaacaataggtctctggacctggatagtataatcgcagaggtgaaggcccaatacgaagatatcgcacagaagagtaaagccgaggccgaaagtttgtaccagagtaagtatgaggaactgcagatcaccgccggacggcacggcgactcagttaggaactctaagatagagatcagcgagcttaatagggtcatccagagactgcgatctgagattgacaacgttaaaaaacagatctccaacctacagcaaagtattagcgacgcagagcagaggggcgagaatgcacttaaggacgcaaaaaacaaactgaacgatctcgaagacgcacttcagcaagccaaagaggacttagcccgattattgagagactaccaggaactcatgaacacaaagctcgcccttgacttagaaatcgctacttatcggaccttgttggagggggaggagtcgcgcatgtctggcgaatgcgcgcctaatgtttctgtaagcgtgtccaccagtcacacaaccatcagtggcggagggagccgcggaggcggtggcggtggatacggaagtggcggatctagctatggctcgggcggtgggagctatggtagcgggggaggcggtggagggggacgcggatcatacgggtcagggggtagttcttacggaagcggaggagggtcttatgggtcaggaggcggaggagggggtcacgggtcatatggcagtggctcatcctcgggcggttatcgtgggggaagtggcggtggcggtggtgggtcttccggcggtagaggcagtggcggtggatcatctggaggcagtatcggaggcaggggtagcagcagtgggggagtcaaaagttcgggcggtagctcttcggtcaagttcgtgagcaccacttatagtggcgtaacaaggtag

SEQ ID NO: 162129 - DNA, 1935 bp, Artificial Sequence
  derived and/or modified sequence
atgagcagacagttcagcagcagaagcggctacagaagcggcggcggcttcagcagcggcagcgccggcatcatcaactaccagagaagaaccaccagcagcagcaccagaagaagcggcggcggcggcggcagattcagcagctgcggcggcggcggcggcagcttcggcgccggcggcggcttcggcagcagaagcctggtgaacctgggcggcagcaagagcatcagcatcagcgtggccagaggcggcggcagaggcagcggcttcggcggcggctacggcggcggcggcttcggcggcggcggcttcggcggcggcggcttcggcggcggcggcatcggcggcggcggcttcggcggcttcggcagcggcggcggcggcttcggcggcggcggcttcggcggcggcggctacggcggcggctacggccccgtgtgcccccccggcggcatccaggaggtgaccatcaaccagagcctgctgcagcccctgaacgtggagatcgaccccgagatccagaaggtgaagagcagagagagagagcagatcaagagcctgaacaaccagttcgccagcttcatcgacaaggtgagattcctggagcagcagaaccaggtgctgcagaccaagtgggagctgctgcagcaggtggacaccagcaccagaacccacaacctggagccctacttcgagagcttcatcaacaacctgagaagaagagtggaccagctgaagagcgaccagagcagactggacagcgagctgaagaacatgcaggacatggtggaggactacagaaacaagtacgaggacgagatcaacaagagaaccaacgccgagaacgagttcgtgaccatcaagaaggacgtggacggcgcctacatgaccaaggtggacctgcaggccaagctggacaacctgcagcaggagatcgacttcctgaccgccctgtaccaggccgagctgagccagatgcagacccagatcagcgagaccaacgtgatcctgagcatggacaacaacagaagcctggacctggacagcatcatcgccgaggtgaaggcccagtacgaggacatcgcccagaagagcaaggccgaggccgagagcctgtaccagagcaagtacgaggagctgcagatcaccgccggcagacacggcgacagcgtgagaaacagcaagatcgagatcagcgagctgaacagagtgatccagagactgagaagcgagatcgacaacgtgaagaagcagatcagcaacctgcagcagagcatcagcgacgccgagcagagaggcgagaacgccctgaaggacgccaagaacaagctgaacgacctggaggacgccctgcagcaggccaaggaggacctggccagactgctgagagactaccaggagctgatgaacaccaagctggccctggacctggagatcgccacctacagaaccctgctggagggcgaggagagcagaatgagcggcgagtgcgcccccaacgtgagcgtgagcgtgagcaccagccacaccaccatcagcggcggcggcagcagaggcggcggcggcggcggctacggcagcggcggcagcagctacggcagcggcggcggcagctacggcagcggcggcggcggcggcggcggcagaggcagctacggcagcggcggcagcagctacggcagcggcggcggcagctacggcagcggcggcggcggcggcggccacggcagctacggcagcggcagcagcagcggcggctacagaggcggcagcggcggcggcggcggcggcagcagcggcggcagaggcagcggcggcggcagcagcggcggcagcatcggcggcagaggcagcagcagcggcggcgtgaagagcagcggcggcagcagcagcgtgaagttcgtgagcaccacctacagcggcgtgaccagatag

SEQ ID NO: 162130 - protein, 1150 aa, Artificial Sequence
  derived and/or modified sequence
MKLKKQVTVCGAAIFCVAVFSLYLMLDRVQHDPTRHQNGGNFPRSQISVLQNRIEQLEQLLEENHEIISHIKDSVLELTANAEGPPAMLPYYTVNGSWVVPPEPRPSFFSISPQDCQFALGGRGQKPELQMLTVSEELPFDNVDGGVWRQGFDISYDPHDWDAEDLQVFVVPHSHNDPGWIKTFDKYYTEQTQHILNSMVSKLQEDPRRRFLWAEVSFFAKWWDNINVQKRAAVRRLVGNGQLEIATGGWVMPDEANSHYFALIDQLIEGHQWLERNLGATPRSGWAVDPFGYSSTMPYLLRRANLTSMLIQRVHYAIKKHFAATHSLEFMWRQTWDSDSSTDIFCHMMPFYSYDVPHTCGPDPKICCQFDFKRLPGGRINCPWKVPPRAITEANVAERAALLLDQYRKKSQLFRSNVLLVPLGDDFRYDKPQEWDAQFFNYQRLFDFFNSRPNLHVQAQFGTLSDYFDALYKRTGVEPGARPPGFPVLSGDFFSYADREDHYWTGYYTSRPFYKSLDRVLEAHLRGAEVLYSLAAAHARRSGLAGRYPLSDFTLLTEARRTLGLFQHHDAITGTAKEAVVVDYGVRLLRSLVNLKQVIIHAAHYLVLGDKETYHFDPEAPFLQVDDTRLSHDALPERTVIQLDSSPRFVVLFNPLEQERFSMVSLLVNSPRVRVLSEEGQPLAVQISAHWSSATEAVPDVYQVSVPVRLPALGLGVLQLQLGLDGHRTLPSSVRIYLHGRQLSVSRHEAFPLRVIDSGTSDFALSNRYMQVWFSGLTGLLKSIRRVDEEHEQQVDMQVLVYGTRTSKDKSGAYLFLPDGEAKPYVPKEPPVLRVTEGPFFSEVVAYYEHIHQAVRLYNLPGVEGLSLDISSLVDIRDYVNKELALHIHTDIDSQGIFFTDLNGFQVQPRRYLKKLPLQANFYPMPVMAYIQDAQKRLTLHTAQALGVSSLKDGQLEVILDRRLMQDDNRGLGQGLKDNKRTCNRFRLLLERRTVGSEVQDSHSTSYPSLLSHLTSMYLNAPALALPVARMQLPGPGLRSFHPLASSLPCDFHLLNLRTLQAEEDTLPSAETALILHRKGFDCGLEAKNLGFNCTTSQGKVALGSLFHGLDVVFLQPTSLTLLYPLASPSNSTDVYLEPMEIATFRLRLG

SEQ ID NO: 162131 - protein, 1063 aa, Artificial Sequence
  derived and/or modified sequence
MLPYYTVNGSWVVPPEPRPSFFSISPQDCQFALGGRGQKPELQMLTVSEELPFDNVDGGVWRQGFDISYDPHDWDAEDLQVFVVPHSHNDPGWIKTFDKYYTEQTQHILNSMVSKLQEDPRRRFLWAEVSFFAKWWDNINVQKRAAVRRLVGNGQLEIATGGWVMPDEANSHYFALIDQLIEGHQWLERNLGATPRSGWAVDPFGYSSTMPYLLRRANLTSMLIQRVHYAIKKHFAATHSLEFMWRQTWDSDSSTDIFCHMMPFYSYDVPHTCGPDPKICCQFDFKRLPGGRINCPWKVPPRAITEANVAERAALLLDQYRKKSQLFRSNVLLVPLGDDFRYDKPQEWDAQFFNYQRLFDFFNSRPNLHVQAQFGTLSDYFDALYKRTGVEPGARPPGFPVLSGDFFSYADREDHYWTGYYTSRPFYKSLDRVLEAHLRGAEVLYSLAAAHARRSGLAGRYPLSDFTLLTEARRTLGLFQHHDAITGTAKEAVVVDYGVRLLRSLVNLKQVIIHAAHYLVLGDKETYHFDPEAPFLQVDDTRLSHDALPERTVIQLDSSPRFVVLFNPLEQERFSMVSLLVNSPRVRVLSEEGQPLAVQISAHWSSATEAVPDVYQVSVPVRLPALGLGVLQLQLGLDGHRTLPSSVRIYLHGRQLSVSRHEAFPLRVIDSGTSDFALSNRYMQVWFSGLTGLLKSIRRVDEEHEQQVDMQVLVYGTRTSKDKSGAYLFLPDGEAKPYVPKEPPVLRVTEGPFFSEVVAYYEHIHQAVRLYNLPGVEGLSLDISSLVDIRDYVNKELALHIHTDIDSQGIFFTDLNGFQVQPRRYLKKLPLQANFYPMPVMAYIQDAQKRLTLHTAQALGVSSLKDGQLEVILDRRLMQDDNRGLGQGLKDNKRTCNRFRLLLERRTVGSEVQDSHSTSYPSLLSHLTSMYLNAPALALPVARMQLPGPGLRSFHPLASSLPCDFHLLNLRTLQAEEDTLPSAETALILHRKGFDCGLEAKNLGFNCTTSQGKVALGSLFHGLDVVFLQPTSLTLLYPLASPSNSTDVYLEPMEIATFRLRLG

SEQ ID NO: 162132 - protein, 120 aa, Artificial Sequence
  derived and/or modified sequence
MKLKKQVTVCGAAIFCVAVFSLYLMLDRVQHDPTRHQNGGNFPRSQISVLQNRIEQLEQLLEENHEIISHIKDSVLELTANAEGPPAMLPYYTVNGSWVVPPEPRPSFFSISPQDCQFAL

SEQ ID NO: 162133 - DNA, 3453 bp, Artificial Sequence
  derived and/or modified sequence
atgaaactgaaaaaacaggtgactgtgtgtggcgcggccattttttgcgtcgccgtgttctcattgtatctgatgctggacagagtccagcacgatcccacacgccatcagaacggaggtaactttcccagaagccagatcagcgtgctgcaaaacaggatcgagcagctggaacaactcctagaagagaaccacgagatcattagtcatattaaggacagcgtcctcgagttgaccgctaacgcagaaggacccccggccatgctaccgtattacaccgtgaacgggagctgggtcgtccctccagagccacgaccaagctttttctcgatctccccacaggattgccaatttgcattaggcggacgcggccagaagcccgaactgcagatgctgaccgttagcgaagagctgccctttgacaatgtggatgggggggtttggagacaaggttttgatatatcatatgacccccacgactgggacgcagaggatctacaagttttcgtggtccctcactcccataacgaccctggctggatcaagacctttgacaaatattataccgagcaaacccagcatatcctgaacagcatggtgtccaagctgcaagaagatcccaggcgtcgcttcctctgggcagaggtaagttttttcgccaaatggtgggacaatatcaacgtgcagaagagagctgcggtaagaagactagtcggaaatggccagctggagatcgccacgggggggtgggtgatgcccgacgaagcaaactcacactatttcgctctcatagaccagttaatcgaaggccaccagtggctggagagaaacttaggagcgacacctaggtctggctgggccgtggacccctttggctattcaagcacaatgccctatttgttgcggagagctaacctgacgtcaatgctgatccagagggtccactatgcaatcaagaagcatttcgccgctacacacagcctggagttcatgtggcgccagacgtgggacagcgatagtagcaccgacattttctgtcatatgatgccgttctactcttacgacgtcccccacacatgtggccctgatcccaagatttgctgtcagttcgatttcaagagattgccaggcggtcgcatcaattgtccatggaaagtcccaccaagggccatcactgaagctaacgtagctgagagggccgctctgttgcttgatcagtataggaaaaagtcacagctctttcgcagtaatgttctgctggtacccctcggggatgactttcgctacgacaagccacaagagtgggacgcccaattcttcaattatcaaagacttttcgacttttttaattctcgccccaacctgcacgtccaggcacaatttggaactttgtccgactactttgatgcactttataagcgcacaggggtggagcccggggcgcggccccctgggtttccagtgttgtccggcgacttcttttcatatgccgatagggaagatcactattggacaggatactatacaagcagaccattttacaagtccctagatcgggtgctcgaggctcatttaagaggtgccgaagtactctattctctcgccgcggctcacgcaaggagaagcggtttggcaggccggtaccctctctccgacttcaccctgctcaccgaggccaggcggacactgggcctgttccaacaccatgacgccatcaccggaacagccaaagaagctgttgtggtggattatggagtccgcctccttaggagcctggttaatctaaagcaggtcattattcacgccgcccactacctggtcttaggagacaaggagacttatcactttgacccagaagcccctttcctccaagtcgacgatacacgcctctctcacgacgccctcccagaacgaacggttattcagctggacagtagcccaagatttgtcgttttattcaacccattggagcaggagcgcttctccatggtaagcctgctggtcaactctccaagggtgagggtgctcagtgaggaaggtcagcccctggctgtccagatttctgcccattggagcagcgctaccgaggcagtcccagacgtttaccaggttagcgtgccagtgcgactccctgctttaggccttggggtccttcaacttcagctcggactcgacggtcacagaacactaccctcatcagtccgtatttacctccatggccgccaactctctgtgagccgccacgaggcatttccactcagggtgattgatagcggcacctctgactttgccttatcaaatcgctacatgcaggtctggttctccggtcttactggattgctgaagtctattcgacgtgtggacgaggagcacgagcaacaagtcgacatgcaagtcctcgtgtatggcacgcggacctcgaaagacaaatctggggcctatttgttcctcccagacggcgaagcaaagccctatgtccctaaggagccccctgtccttcgagtgacagaaggacccttttttagcgaggtggtggcttattatgaacatattcaccaggccgtgagactctataacctgccaggtgttgaagggctctcactcgacatttcttctctagtggatattagagattacgtgaataaggagctggccctgcacatccacactgatatcgatagtcagggcattttcttcaccgatttgaacgggttccaggtccagccaaggcggtacctgaagaagctgcctctacaggcaaacttttatcccatgccagtgatggcgtatattcaggacgcacagaagcgactgacgctgcataccgcccaagccctcggagtcagtagcctgaaggacggccagctggaagttatcctggatagaagactcatgcaggacgataataggggcctcggccaaggacttaaagataataaaagaacctgcaatcgcttccggttgctgctggagcgccggaccgtgggctcagaggtgcaggactctcatagtaccagctaccctagcctgctgagtcacctaacatccatgtacttaaatgcgcccgctttggccctacctgtggcacgtatgcaactccccggacccgggttaaggtccttccacccgctcgcatcatcgttgccgtgcgattttcatctgctgaacctgcgcacacttcaagcagaagaagacacgctccccagtgctgagacagctttaatcttgcaccgcaaagggttcgactgcgggctggaggccaaaaatttgggcttcaattgtaccacctcccaagggaaagtcgctctgggttctctgtttcatggacttgacgtcgtgttcttgcagcctaccagcctgactttactgtatcccctggcgtcccccagcaatagcaccgatgtctatctggaacctatggaaattgcaacatttcgcctgaggctgggatag

SEQ ID NO: 162134 - DNA, 3192 bp, Artificial Sequence
  derived and/or modified sequence
atgctgccctactatactgttaacgggtcttgggtggtaccacccgagccccggccctccttcttcagtattagcccacaggactgtcagttcgccctagggggcagaggacagaaacccgaattacagatgctgactgtgtccgaagagctcccattcgacaatgtggatggtggtgtctggcgtcagggattcgatatcagctacgaccctcatgattgggatgcagaggacctgcaagtcttcgtggtaccacactcccacaatgatcccggttggatcaaaacctttgataagtactacacagagcagactcaacacattttgaactcaatggtgagcaagctgcaagaggatccccgtcggcggttcctgtgggcagaggtatcattcttcgctaaatggtgggacaacattaacgtccagaaacgcgctgcagtgcggaggcttgtaggcaacggtcagcttgagattgccaccggcgggtgggtcatgcctgatgaggcgaactcccattatttcgccctgatcgaccagctcatagaaggccaccagtggctcgaaagaaatctcggtgccaccccgcggtcggggtgggctgtcgacccctttggttacagtagtactatgccctatcttctgcgacgggccaaccttactagcatgcttattcaacgggttcactacgcaattaagaagcacttcgccgccacccacagcctggaattcatgtggcgacagacctgggacagtgactcctcaacggacattttctgtcatatgatgccattctatagttatgatgtgccccatacatgcggcccagatcccaaaatatgctgccaattcgattttaaaagactacctgggggcaggatcaactgcccttggaaggtgcctccacgcgccatcactgaggccaacgtcgcagagagggccgcactgcttctggatcagtaccgaaagaaaagtcagctgtttagaagcaatgtgctgttagtgccgctcggagacgatttccgatatgataagccacaggagtgggacgcccagttcttcaactatcagcggctgttcgatttctttaatagcaggcctaatctacatgtgcaagcgcaatttggtaccctttccgattatttcgacgccttgtacaaacgcacaggagttgaacccggtgcgagaccgcctgggtttcccgtgctgtctggagatttctttagttacgctgacagggaagaccattactggactggatattatacgtcacggcctttctacaagagcttggaccgcgttctggaagcacaccttagaggggctgaggttctctactctctggctgctgctcacgcaagacgatccggactagccgggagatatccactctccgatttcacgttgctcacagaagctcgaaggacacttgggctcttccagcatcacgacgccatcaccggaaccgcaaaggaggccgtcgtggtcgactacggcgttcggctccttcgctcgctggttaatctcaagcaagtgatcatccacgcagcgcattatctggtcctcggagacaaagaaacttaccatttcgaccctgaagcaccttttcttcaggtggatgatactagactctctcacgacgccttgccagagaggacagtgatccagcttgactcctctcctcggtttgtggtgttgtttaacccattagaacaggagcgcttcagcatggtctcactgcttgtaaattcaccgagagtgagggtgttgagcgaggagggccagcccttggctgtccaaatctctgcccactggagctcagccacagaagccgtgccagacgtgtaccaagtttcagtgcctgttagactgcctgctctgggtctgggggtactccagctacagctcggactcgacgggcacaggaccctgcctagctcagtgcgcatttaccttcacggacgccagctttctgtctccagacatgaagcatttccgttgagggtgattgattctggcaccagcgattttgctttgagtaaccggtatatgcaggtttggttttccgggctcaccggcttgcttaagtccatccgtagggttgatgaggaacatgagcagcaggtcgacatgcaggtgcttgtgtatggaactcggacatctaaggataagtcaggcgcctacctgtttctgccagatggagaagccaagccttatgtgccgaaagaacctccagtactgagggttactgaggggcccttcttcagtgaagttgtggcatattacgagcatatccatcaggctgtgagactgtacaatctacctggcgtagaaggcttaagccttgatatatcaagccttgtggatattcgtgactatgtaaacaaagaactggctctgcacatccatactgacattgactctcaaggcatatttttcactgacctgaacgggttccaggtgcagcctaggcgttacctgaaaaaactacctctgcaggcgaacttttacccgatgccagtgatggcttatatccaagatgcacagaaaaggctcactctgcacaccgctcaagctctgggtgtgtctagcctcaaagatggacaactggaagttattttggaccgaagattaatgcaagatgataacagaggactaggccaagggctgaaagataataaacgtacctgcaataggttccgcctgctgcttgagcggcggactgtgggcagcgaggtacaggactcccactcaaccagttatccaagcctgctttcacacttgacctcgatgtacctgaatgctcccgccttggcacttccagttgcgaggatgcagctccccggccccggactgcggtcatttcatccgctggccagtagtttaccttgcgattttcatctcctgaatctacgcacccttcaggctgaggaggatacattgccttctgcggaaaccgccttaatcctgcatagaaagggattcgactgcggactggaagcaaagaatcttgggttcaactgcaccacctctcagggcaaggtagcgcttgggtcattattccacggcctagacgttgtgtttctgcagccaacgtcactaacactgctgtaccccctggcttcaccatcaaacagtaccgacgtatatcttgagccaatggaaattgccaccttcagactacgtctagggtag

SEQ ID NO: 162135 - DNA, 3453 bp, Artificial Sequence
  derived and/or modified sequence
atgaagctgaagaagcaggtgacagtgtgtggggccgccatcttctgtgtggccgtgttcagcctgtacctgatgctggacagagtgcagcacgaccccaccaggcaccagaatggaggcaacttccccaggagccagatctctgtgctgcagaaccgcatcgagcagctggagcagctgctggaggagaaccacgagatcatcagccacatcaaggacagcgtgctggagctgacagccaatgctgagggccccccagccatgctgccctactacacagtgaatggctcctgggtggtgcccccagagccccggcccagcttcttcagcatcagcccccaggactgccagtttgccctgggcggccggggccagaagccagagctgcagatgctgactgtgtctgaggagctgccctttgacaacgtggatggcggcgtgtggaggcagggctttgacatctcctatgacccccatgactgggatgctgaggacctgcaggtgtttgtggtgccccacagccacaatgaccccggctggatcaagacctttgacaagtactacacagagcagacccagcacatcctgaacagcatggtgtccaagctgcaggaggacccccggcggcgcttcctgtgggccgaggtgtccttctttgccaagtggtgggacaacatcaacgtgcagaagagagctgctgtgcggcggctggtgggcaatggccagctggagatcgccactggaggctgggtgatgccagatgaggccaacagccactactttgccctgattgaccagctgattgagggccaccagtggctggagaggaacctgggcgccacccccaggagcggctgggccgtggaccccttcggctacagcagcaccatgccctacctgctgcggcgggccaacctgacctccatgctgatccagagggtgcactacgccatcaagaagcactttgctgccacccacagcctggagttcatgtggaggcagacctgggacagcgacagcagcacagacatcttctgccacatgatgcccttctacagctatgatgtgccccacacctgtggccctgaccccaagatctgctgccagtttgacttcaagaggctgcccggcggccgcatcaactgcccctggaaggtgcccccccgggccatcacagaggccaacgtggccgagcgggccgccctgctgctggaccagtacaggaagaagagccagctgttccgcagcaatgtgctgctggtgcccctgggagatgacttccgctatgacaagccccaggagtgggatgcccagttcttcaactaccagaggctgtttgacttcttcaacagccggcccaacctgcacgtgcaggcccagtttggcaccctgagtgactactttgatgccctgtacaagaggactggagtggagcccggggcccggcccccaggcttccctgtgctgagcggggacttcttctcctatgctgaccgggaggaccactactggacaggctactacaccagccggcccttctacaagagcctggacagagtgctggaggcccacctgcggggagctgaggtgctgtacagcctggccgccgcccacgcccggcgcagcggcctggccggccgctaccccctgagtgacttcaccctgctgacagaggcccggaggaccctgggcctcttccagcaccatgatgccatcactggaacagccaaggaggccgtggtggtggactatggagtgcggctgctgcggagcctggtgaacctgaagcaggtgatcatccacgccgcccactacctggtgctgggggacaaggagacctaccactttgatcctgaggcccccttcctgcaggtggatgacacccggctgagccatgatgccctgcctgagaggacagtcatccagctggacagcagccccaggtttgtggtgctcttcaaccccctggagcaggagcgcttctccatggtgtccctgctggtgaacagcccccgggtgcgggtgctgtctgaggagggccagcccctggccgtgcagatcagcgcccactggagcagcgccacagaagctgtgcctgatgtgtaccaggtgtctgtgcctgtgcggctgcctgccctgggcctgggcgtgctgcagctgcagctgggcctggatggccacaggaccctgcccagctctgtgcgcatctacctgcacggccggcagctgtctgtgtccagacatgaggccttccccctgcgggtcatcgacagcggcaccagtgactttgccctgagcaaccgctacatgcaggtgtggttcagcggcctgaccggcctgctgaagagcatcagaagagtggatgaggagcacgagcagcaggtggacatgcaggtgctggtgtatggcaccaggaccagcaaggacaagagcggggcctacctgttcctgcctgatggagaggccaagccctacgtgcccaaggagccccctgtgctgcgggtgacagagggccccttcttcagcgaggtggtggcctactatgagcacatccaccaggccgtgcggctgtacaacctgcccggggtggagggcctgagcctggacatcagcagcctggtggacatccgggactatgtgaacaaggagctggccctgcacatccacacagacatcgacagccagggcatcttcttcacagacctgaatggcttccaggtgcagccccggcgctacctgaagaagctgcccctgcaggccaacttctaccccatgcctgtgatggcctacatccaggatgcccagaagaggctgaccctgcacacagcccaggccctgggcgtgagcagcctgaaggatggccagctggaggtgatcctggaccggcggctgatgcaggatgacaacagaggcctgggccagggcctgaaggacaacaagaggacctgcaaccgcttccggctgctgctggagaggagaacagtgggcagcgaggtgcaggacagccacagcaccagctaccccagcctgctgagccacctgacctccatgtacctgaatgccccagccctggccctgcctgtggccaggatgcagctgcccggccctggcctgcggagcttccaccccctggccagcagcctgccctgtgacttccacctgctgaacctgcggaccctgcaggccgaggaggacaccctgcccagcgctgagacagccctgatcctgcacaggaaaggatttgactgtggcctggaggccaagaacctgggcttcaactgcaccaccagccagggcaaggtggccctgggcagcctcttccacggcctggatgtggtgttcctgcagcccaccagcctgaccctgctgtaccccctggccagccccagcaacagcacagatgtgtacctggagcccatggagatcgccaccttccggctgcggctgggctag

SEQ ID NO: 162136 - DNA, 3192 bp, Artificial Sequence
  derived and/or modified sequence
atgctgccctactacacagtgaatggctcctgggtggtgcccccagagccccggcccagcttcttcagcatcagcccccaggactgccagtttgccctgggcggccggggccagaagccagagctgcagatgctgactgtgtctgaggagctgccctttgacaacgtggatggaggagtgtggaggcagggctttgacatctcctatgacccccatgactgggatgctgaggacctgcaggtgtttgtggtgccccacagccacaatgaccccggctggatcaagacctttgacaagtactacacagagcagacccagcacatcctgaacagcatggtgtccaagctgcaggaggacccccggcggcgcttcctgtgggccgaggtgtccttctttgccaagtggtgggacaacatcaacgtgcagaagagagctgctgtgcggcggctggtgggcaatggccagctggagatcgccaccggcggctgggtgatgccagatgaggccaacagccactactttgccctgattgaccagctgattgagggccaccagtggctggagaggaacctgggcgccacccccaggagcggctgggccgtggaccccttcggctacagcagcaccatgccctacctgctgcggcgggccaacctgacctccatgctgatccagagggtgcactacgccatcaagaagcactttgctgccacccacagcctggagttcatgtggaggcagacctgggacagcgacagcagcacagacatcttctgccacatgatgcccttctacagctatgatgtgccccacacctgtggccctgaccccaagatctgctgccagtttgacttcaagaggctgcccggcggccgcatcaactgcccctggaaggtgcccccccgggccatcacagaggccaacgtggccgagagagctgccctgctgctggaccagtacaggaagaagagccagctgttccgcagcaatgtgctgctggtgcccctgggagatgacttccgctatgacaagccccaggagtgggatgcccagttcttcaactaccagaggctgtttgacttcttcaacagccggcccaacctgcacgtgcaggcccagtttggcaccctgagtgactactttgatgccctgtacaagaggactggagtggagcccggggcccggcccccaggcttccctgtgctgagcggggacttcttctcctatgctgaccgggaggaccactactggacaggctactacaccagccggcccttctacaagagcctggacagagtgctggaggcccacctgcggggagctgaggtgctgtacagcctggccgccgcccacgccaggagaagtggcctggccggccgctaccccctgagtgacttcaccctgctgacagaggcccggaggaccctgggcctcttccagcaccatgatgccatcaccggcacagccaaggaggccgtggtggtggactatggagtgcggctgctgcggagcctggtgaacctgaagcaggtgatcatccatgctgcccactacctggtgctgggggacaaggagacctaccactttgatcctgaggcccccttcctgcaggtggatgacacccggctgagccatgatgccctgcctgagaggacagtcatccagctggacagcagccccaggtttgtggtgctcttcaaccccctggagcaggagcgcttctccatggtgtccctgctggtgaacagcccccgggtgcgggtgctgtctgaggagggccagcccctggccgtgcagatcagcgcccactggagcagcgccacagaggccgtgcctgatgtgtaccaggtgtctgtgcctgtgcggctgcctgccctgggcctgggcgtgctgcagctgcagctgggcctggatggccacaggaccctgcccagctctgtgcgcatctacctgcacggccggcagctgtctgtgtccagacatgaggccttccccctgcgggtgattgattctggcaccagtgactttgccctgagcaaccgctacatgcaggtgtggttcagcggcctgaccggcctgctgaagagcatccggcgggtggatgaggagcacgagcagcaggtggacatgcaggtgctggtgtatggcaccaggaccagcaaggacaagagcggggcctacctgttcctgcctgatggagaggccaagccctacgtgcccaaggagccccctgtgctgcgggtgacagagggccccttcttcagcgaggtggtggcctactatgagcacatccaccaggccgtgcggctgtacaacctgcccggggtggagggcctgagcctggacatcagcagcctggtggacatccgggactatgtgaacaaggagctggccctgcacatccacacagacatcgacagccagggcatcttcttcacagacctgaatggcttccaggtgcagccccggcgctacctgaagaagctgcccctgcaggccaacttctaccccatgcctgtgatggcctacatccaggatgcccagaagaggctgaccctgcacacagcccaggccctgggcgtgagcagcctgaaggatggccagctggaggtgatcctggaccggcggctgatgcaggatgacaacagaggcctgggccagggcctgaaggacaacaagaggacctgcaaccgcttccggctgctgctggagaggagaacagtgggcagcgaggtgcaggacagccacagcaccagctaccccagcctgctgagccacctgacctccatgtacctgaatgccccagccctggccctgcctgtggccaggatgcagctgcccggccctggcctgcgctccttccaccccctggccagcagcctgccctgtgacttccacctgctgaacctgcggaccctgcaggccgaggaggacaccctgcccagcgctgagacagccctgatcctgcacaggaagggctttgactgtggcctggaggccaagaacctgggcttcaactgcaccaccagccagggcaaggtggccctgggcagcctcttccacggcctggatgtggtgttcctgcagcccaccagcctgaccctgctgtaccccctggccagccccagcaacagcacagatgtgtacctggagcccatggagatcgccaccttccggctgcggctgggctag

SEQ ID NO: 162137 - DNA, 6268 bp, Artificial Sequence
  derived and/or modified sequence
gtgtgtgtggaggccagtatgaagctgaaaaagcaggtgacagtgtgtggggctgccatcttctgtgtggcagtcttctcgctctacctcatgctggaccgagtgcaacacgatcccacccgacaccagaatggtgggaacttcccccggagccaaatttctgtgctgcagaaccgcattgagcagctggagcagcttttggaggagaaccatgagattatcagccatatcaaggactccgtgctggagctgacagccaacgcagagggcccgcccgccatgctgccctactacacggtcaatggctcctgggtggtgccaccggagccccggcccagcttcttctccatctccccgcaggactgccagtttgctttggggggccggggtcagaagccagagctgcagatgctcactgtgtcggaggagctgccgtttgacaacgtggatggtggtgtgtggaggcaaggcttcgacatctcctacgacccgcacgactgggatgctgaagacctgcaggtgtttgtggtgccccactctcacaatgacccaggctggatcaagacctttgacaagtactacacagagcagacccaacacatcctcaatagcatggtgtctaagctgcaggaggacccccggcggcgcttcctctgggcagaggtctccttcttcgccaagtggtgggacaacatcaatgtccaaaagagagcggcagtccgaaggctggtgggaaacgggcagctggagattgcgacaggaggctgggtgatgccagatgaggccaattcccactactttgcattgattgaccagctcatcgaaggacaccagtggctggagagaaatcttggtgcaaccccccgctctggctgggcagtggacccctttggatacagctccaccatgccttacctgctgcgccgtgccaacctcaccagcatgctgattcagagagtgcactatgccatcaagaagcactttgctgccacccacagcctagagttcatgtggaggcagacatgggactcggactccagcacagacatcttctgtcacatgatgcccttctacagctatgacgtcccccatacctgtggcccagatcccaagatctgctgccaatttgatttcaaacgcctgcctggtgggcgcatcaactgcccttggaaggtgccaccccgggccatcacagaggccaacgtggcagagagggcagccctgcttctggaccaataccggaagaagtcccagctgttccgaagcaacgtcctcctggtgcctcttggagatgacttccgatatgacaagccccaggagtgggatgcccagttcttcaactaccaacggctctttgacttcttcaacagcaggcctaacctccatgtgcaggcccagtttggcactctttctgactattttgatgccctgtacaagaggacaggggtggagccaggggcccggcctccagggtttcctgtgctgagcggggatttcttctcctatgcggaccgggaggatcattactggacaggctattacacttcccggcccttctacaagagcttagaccgagtcctggaagcccacctgcggggggcagaggttctgtacagcctggctgcagctcacgctcgccgctctggtctggctggccggtacccactgtctgatttcaccctcctgacggaagctcggcgcacattggggctcttccagcatcacgatgccatcactggcacggccaaggaggctgtggtggtggactatggggtcaggcttctgcgctcccttgtcaacctgaagcaggtcatcattcatgcagcccactatctggtgctgggggacaaggagacctaccactttgaccctgaggcgcccttcctccaagtggatgacactcgcttaagtcacgacgccctcccagagcgcacggtgatccagctggattcctcgcccaggtttgtggtcctattcaacccactggaacaggagcgattcagcatggtgtccctgctggtcaactctccccgcgtgcgtgtcctttcggaggagggtcagcccctggccgtgcagatcagcgcacactggagctctgccaccgaggcggtccctgacgtctaccaggtgtctgtgcctgtccgcctgccagccctgggcctgggcgtgctgcagctacagctgggcctggatgggcaccgcacgctgccctcctctgtgcgcatctacctgcacggccggcagctgtccgtcagcaggcacgaagcgtttcctctccgtgtcattgactctggcaccagcgacttcgccctcagcaaccgctacatgcaggtctggttctcaggccttactgggctcctcaagagcatccgaagggtggatgaggagcacgagcagcaggtggacatgcaggtccttgtctatggcacccgtacgtccaaagacaagagtggagcctacctcttcctgcccgatggcgaggccaagccctacgtccccaaggagccccccgtgctgcgtgtcactgaaggccctttcttctcagaggtggttgcgtactatgagcacattcaccaggcggtccggctttacaatctgccaggggtggaggggctgtctctggacatatcatccctggtggacatccgggactacgtcaacaaggagctggccctgcacatccatacagacatcgacagccagggtatcttcttcacagacctcaatggctttcaggtgcagccccgacggtatctgaagaagctccccctccaggccaacttctaccccatgccagtcatggcctatatccaggacgcacagaagcgcctcacgctgcacactgcccaggccctgggtgtctctagcctcaaagatggccagctggaggtgatcttggaccggcggctgatgcaggatgacaaccggggcctaggccaagggctcaaggacaacaagagaacctgcaaccgtttccgcctcctgctagagcggcgaaccgtgggcagtgaggtccaagatagccactctaccagctacccatccctcctcagccacctgacctccatgtacctgaacgccccggcgctcgctctgcctgtagccaggatgcagctcccaggccctggtctgcgctcatttcatcctctggcttcctcactgccctgtgacttccacctgctcaacctacgtacgctccaggctgaggaggacaccctaccctcggcggagaccgcactcatcttacaccgcaagggttttgactgcggcctggaggccaagaacttgggcttcaactgcaccacaagccaaggcaaggtagccctgggcagccttttccatggcctggatgtggtattccttcagccaacctccttgacgttactgtaccctctggcctccccgtccaacagcactgacgtctatttggagcccatggagattgctacctttcgcctccgcttgggttagggcttcttgtggcctgaagagaaagttcattcacagagactgcctcttaacatgaagatcattggacaagccacacgggtatcccatcccgatctgcctcccagaactgtgacacactgggctctgccctcattttctgtttattgctgctgctgtgttttcggcgcaacccacaaacccagtgatgggtaaatagggcagacgccagtgagatcagggagagaaggcccttggtcagagtgggcagtgccaggctctgctttgggttgtgagtggacacccaactgggcacaggctcaggcacccatcctttttccaaacagggatatagaagtggtggaagcagacagaagaggtaagggaggctaagtgggtaacagcccagcatcagggtcactgtggcaacagcaggctctaggggaatcctgtggttatgtagagactccatgtcctggtgtgatgagcaggatcagagtgactctgggaggacaggggtggggacccagagttagcagtggggatggagcagtagaaggaatcactgtttctcctaggagtctgaaggcctcgctgctttctgtgatggctttgcagtaagtgccgcctggcctgcatgcattggctaacaggctgcagaatggcaggaaggactcgctagagattgtcatggccagagatcataggtcacttcaggtagcaagacccctggcaaactgggcacttggcctatgtactgatttgtgggatggtggcaggggtgtggggtccttcaccctgcctgaattctctttggcttctgtgctctgtatgctgctgtccccaagggctctttcttattatggcagggagtggggattggtcctactttctttctctggaaaggaaagcctccaagactccatgtgcttgggcagcttgagaaggcgttcagcaccacgcctagcaggcagaccttgaagcctcacctttagtctatctgcagaggtattcagttcctggcacaggggactaggggcatgtagagtatatgaggaggcagtatggctgtgcaggagccttcatttcagcttcaattaatagggaagaatttatgatagctctatagatgctgaaaaggtatttcgtaagatttaaaatccatcccttattaaaactcttagtaaattaagtctggaaagaaacaccctaatctagataaaggtctgtttcagaaaccaacagtgatggcattctaaagagtcagacgccacaggcattcccattaaagtcagaaactagccaagggcaagctattattcagcagtgtcccggcactactaacccctgcaacaagccagatgaggaacataaggaagaattataattgtcattatttgtagacaataaaactgcctacctgtaaaacctaagaatcaactgaagacctgttaagagtattctgtaagtcaacccaatgatacacatcatgttcctgtccacatactggttttccccaaatcagctgataaattcagtgtaattccaatgagattgaaactttggaattgacagttctaaagtgcatttgggagagtgaatgtgtgagaacactaagaccactctgaacgatgataatgagttggggggtggactgctcgggggtgatcctgccagattcccagaggattctcacgccaccattacctcactcagtgtgacctggagggggtcagacagacgggagagtccagaaacagacccagggctacaggaatttagtatatggtaagagggatgttttaagtggggaaaaaggtggattatttaataaacagcacttttagacaactagctatcaaagctagatctcagctgggtgcgatggctcacgcctgtaatcccggcactttgggaggccaaggtgggtggatcacttgaggtcaggagttcgagaccagcctggccaagatggcgaaaccctgtgtctactaaaaatacaaaaactagccaggaatggtggcgcgcgcctgtaatcccagttacttaggaggctgaggcaggagaatcacatcaacctgggaggcggaggttgcagtgagcttagatcatgccaccatgccactgcactccagcctgggtgacacagccaaaaaaaaaaccactaagttagatctctacctcacagtgtccatacaaattagttccagagggaagatataccacaaaattactcaaaaatttttatacctctggtgtgggacggtcttttctaaactttaacatgagacttaaaagatataataagggaaaagataagcagatttcgcaaccaaaaaatatcgaaagtctctgtgtgatggaaaacatcaaggttaaaacacaaatgacagatatggaagaaaatatttgcagcacataaaaaaatcaacgagtacaattactttaggagaaaagcttgcttcagggtccttagagaaagtcactggggcctgccaagctgccacctaaagacaagagtgagagggctgagttcttccaggtcatcagagttgttgctgcccgtattaggccacacagtggaaccccatttatatcatagcagaagaaataggattatcaatgtgaactgcttagcatggtgcctggtatatacgagagctccacaaatgtgagctataatcctactagtaaaggatgctaagcagttccactgtggcaggtgtcatttgctagtagaatttgtaatcaaacaataggaggggaatctgtgaacgcctagaaaatgagcagaataaaggatattatctttggaagtctt

SEQ ID NO: 162138 - DNA, 5478 bp, Artificial Sequence
  derived and/or modified sequence
gcgcgcgggagggctccggctgccccgacagaggccgggctcgggcggcgggagtgcgagcgccactgcggcgtcagaggggccaggaagggacaggaggctgcctgaggcccgtacctggcgcctgtctctgcggtccccggggccgacgaagtcggagcgggtggggagggagccgggcgggcggccagagacctggcggcaggtgcctgccctctgtgatccaactctctccccagctccacccacattggcctagacccagtctctaagggctgaaaatattgcccggaagctcccgagcagaatcagatcgcgctaagtagggcacaacgcagaggcgacaaagctcctcggccccagggcccgcggagcagactccggagcgcggtcccgcccacgctcggctccgcagttagcgtcctccttcctcctgagcaggtgtgtgtggaggccagtatgaagctgaaaaagcaggtgacagtgtgtggggctgccatcttctgtgtggcagtcttctcgctctacctcatgctggaccgagtgcaacacgatcccacccgacaccagaatggtgggaacttcccccggagccaaatttctgtgctgcagaaccgcattgagcagctggagcagcttttggaggagaaccatgagattatcagccatatcaaggactccgtgctggagctgacagccaacgcagagggcccgcccgccatgctgccctactacacggtcaatggctcctgggtggtgccaccggagccccggcccagcttcttctccatctccccgcaggactgccagtttgctttggggggccggggtcagaagccagagctgcagatgctcactgtgtcggaggagctgccgtttgacaacgtggatggtggtgtgtggaggcaaggcttcgacatctcctacgacccgcacgactgggatgctgaagacctgcaggtgtttgtggtgccccactctcacaatgacccaggctggatcaagacctttgacaagtactacacagagcagacccaacacatcctcaatagcatggtgtctaagctgcaggaggacccccggcggcgcttcctctgggcagaggtctccttcttcgccaagtggtgggacaacatcaatgtccaaaagagagcggcagtccgaaggctggtgggaaacgggcagctggagattgcgacaggaggctgggtgatgccagatgaggccaattcccactactttgcattgattgaccagctcatcgaaggacaccagtggctggagagaaatcttggtgcaaccccccgctctggctgggcagtggacccctttggatacagctccaccatgccttacctgctgcgccgtgccaacctcaccagcatgctgattcagagagtgcactatgccatcaagaagcactttgctgccacccacagcctagagttcatgtggaggcagacatgggactcggactccagcacagacatcttctgtcacatgatgcccttctacagctatgacgtcccccatacctgtggcccagatcccaagatctgctgccaatttgatttcaaacgcctgcctggtgggcgcatcaactgcccttggaaggtgccaccccgggccatcacagaggccaacgtggcagagagggcagccctgcttctggaccaataccggaagaagtcccagctgttccgaagcaacgtcctcctggtgcctcttggagatgacttccgatatgacaagccccaggagtgggatgcccagttcttcaactaccaacggctctttgacttcttcaacagcaggcctaacctccatgtgcaggcccagtttggcactctttctgactattttgatgccctgtacaagaggacaggggtggagccaggggcccggcctccagggtttcctgtgctgagcggggatttcttctcctatgcggaccgggaggatcattactggacaggctattacacttcccggcccttctacaagagcttagaccgagtcctggaagcccacctgcggggggcagaggttctgtacagcctggctgcagctcacgctcgccgctctggtctggctggccggtacccactgtctgatttcaccctcctgacggaagctcggcgcacattggggctcttccagcatcacgatgccatcactggcacggccaaggaggctgtggtggtggactatggggtcaggcttctgcgctcccttgtcaacctgaagcaggtcatcattcatgcagcccactatctggtgctgggggacaaggagacctaccactttgaccctgaggcgcccttcctccaagtggatgacactcgcttaagtcacgacgccctcccagagcgcacggtgatccagctggattcctcgcccaggtttgtggtcctattcaacccactggaacaggagcgattcagcatggtgtccctgctggtcaactctccccgcgtgcgtgtcctttcggaggagggtcagcccctggccgtgcagatcagcgcacactggagctctgccaccgaggcggtccctgacgtctaccaggtgtctgtgcctgtccgcctgccagccctgggcctgggcgtgctgcagctacagctgggcctggatgggcaccgcacgctgccctcctctgtgcgcatctacctgcacggccggcagctgtccgtcagcaggcacgaagcgtttcctctccgtgtcattgactctggcaccagcgacttcgccctcagcaaccgctacatgcaggtctggttctcaggccttactgggctcctcaagagcatccgaagggtggatgaggagcacgagcagcaggtggacatgcaggtccttgtctatggcacccgtacgtccaaagacaagagtggagcctacctcttcctgcccgatggcgaggccaagccctacgtccccaaggagccccccgtgctgcgtgtcactgaaggccctttcttctcagaggtggttgcgtactatgagcacattcaccaggcggtccggctttacaatctgccaggggtggaggggctgtctctggacatatcatccctggtggacatccgggactacgtcaacaaggagctggccctgcacatccatacagacatcgacagccagggtatcttcttcacagacctcaatggctttcaggtgcagccccgacggtatctgaagaagctccccctccaggccaacttctaccccatgccagtcatggcctatatccaggacgcacagaagcgcctcacgctgcacactgcccaggccctgggtgtctctagcctcaaagatggccagctggaggtgatcttggaccggcggctgatgcaggatgacaaccggggcctaggccaagggctcaaggacaacaagagaacctgcaaccgtttccgcctcctgctagagcggcgaaccgtgggcagtgaggtccaagatagccactctaccagctacccatccctcctcagccacctgacctccatgtacctgaacgccccggcgctcgctctgcctgtagccaggatgcagctcccaggccctggtctgcgctcatttcatcctctggcttcctcactgccctgtgacttccacctgctcaacctacgtacgctccaggctgaggaggacaccctaccctcggcggagaccgcactcatcttacaccgcaagggttttgactgcggcctggaggccaagaacttgggcttcaactgcaccacaagccaaggcaaggtagccctgggcagccttttccatggcctggatgtggtattccttcagccaacctccttgacgttactgtaccctctggcctccccgtccaacagcactgacgtctatttggagcccatggagattgctacctttcgcctccgcttgggttagggcttcttgtggcctgaagagaaagttcattcacagagactgcctcttaacatgaagatcattggacaagccacacgggtatcccatcccgatctgcctcccagaactgtgacacactgggctctgccctcattttctgtttattgctgctgctgtgttttcggcgcaacccacaaacccagtgatgggtaaatagggcagacgccagtgagatcagggagagaaggcccttggtcagagtgggcagtgccaggctctgctttgggttgtgagtggacacccaactgggcacaggctcaggcacccatcctttttccaaacagggatatagaagtggtggaagcagacagaagaggtaagggaggctaagtgggtaacagcccagcatcagggtcactgtggcaacagcaggctctaggggaatcctgtggttatgtagagactccatgtcctggtgtgatgagcaggatcagagtgactctgggaggacaggggtggggacccagagttagcagtggggatggagcagtagaaggaatcactgtttctcctaggagtctgaaggcctcgctgctttctgtgatggctttgcagtaagtgccgcctggcctgcatgcattggctaacaggctgcagaatggcaggaaggactcgctagagattgtcatggccagagatcataggtcacttcaggtagcaagacccctggcaaactgggcacttggcctatgtactgatttgtgggatggtggcaggggtgtggggtccttcaccctgcctgaattctctttggcttctgtgctctgtatgctgctgtccccaagggctctttcttattatggcagggagtggggattggtcctactttctttctctggaaaggaaagcctccaagactccatgtgcttgggcagcttgagaaggcgttcagcaccacgcctagcaggcagaccttgaagcctcacctttagtctatctgcagaggtattcagttcctggcacaggggactaggggcatgtagagtatatgaggaggcagtatggctgtgcaggagccttcatttcagcttcaattaatagggaagaatttatgatagctctatagatgctgaaaaggtatttcgtaagatttaaaatccatcccttattaaaactcttagtaaattaagtctggaaagaaacaccctaatctagataaaggtctgtttcagaaaccaacagtgatggcattctaaagagtcagacgccacaggcattcccattaaagtcagaaactagccaagggcaagctattattcagcagtgtcccggcactactaacccctgcaacaagccagatgaggaacataaggaagaattataattgtcattatttgtagacaataaaactgcctacctgtaaaacctaagaatcaactgaagacctgttaagagtattctgtaagtcaacccaatgatacacatcatgttcctgtccacatactggttttccccaaatcagctgataaattcagtgtaattccaatgagattgaaactttggaattgacagttctaaagtgcattt

SEQ ID NO: 162139 - DNA, 3453 bp, Artificial Sequence
  derived and/or modified sequence
atgaagctgaagaagcaggtgaccgtgtgcggcgccgccatcttctgtgtggccgttttcagtctatacctgatgctggaccgggtccagcacgatccaaccagacaccagaatggtggcaacttccctcggtcccaaatttcagtgttgcagaatcggattgagcagctagagcaactcctggaggaaaaccacgagattatttctcacattaaggattctgtgcttgaactcacagctaacgccgagggccccccagccatgctaccttattatacggttaatgggtcttgggtggtaccacccgagccccgtccctcatttttcagtatctccccccaagattgtcaattcgccttgggtggacggggtcaaaagcctgagctgcagatgctcaccgtttccgaggagctgccttttgacaacgtagacgggggcgtgtggagacaggggttcgacatctcttatgaccctcacgattgggacgctgaggatctccaagtcttcgttgtccctcattctcacaatgatccagggtggataaaaaccttcgataagtactatactgagcagactcagcatatacttaatagcatggtctctaaactgcaagaagacccacgccgtcgttttctctgggccgaagttagtttcttcgccaaatggtgggacaacattaacgttcagaagagagccgctgtgcgcaggctggtggggaacgggcagctcgagatcgcaactggcggctgggtaatgccagatgaagcgaattcacattattttgctctgattgaccaattgatcgaggggcaccagtggctagaaagaaatcttggggccacccctcgtagcggctgggctgtcgatccctttggctattcctctactatgccttatctacttcgcagagctaatctaacatcgatgctcatccagcgagtccactacgcaattaaaaaacacttcgcagcaactcactcactggaatttatgtggaggcagacgtgggactctgactcctctaccgacattttctgtcatatgatgcccttctactcatacgatgtgccacatacttgtggacctgaccccaagatatgctgtcagtttgacttcaaaagacttcccggaggtcggattaactgcccgtggaaggtacctccgcgtgcaatcacggaagccaatgtggccgagcgggctgcccttctgcttgatcagtatagaaaaaaaagccagttattcaggtccaacgtgctgctggtccccctgggagatgactttagatacgacaaaccgcaggagtgggatgcccagttcttcaattaccagagactatttgatttctttaattcaagaccaaacctccatgtccaggcccagttcggcacactgtcagactatttcgatgcactgtacaaacgaacgggagtcgaaccaggtgctcgcccacccggtttccccgttctgtccggcgactttttcagttatgcggaccgggaagaccactactggactggctactacactagccggcctttctacaaatcgctggacagggtgttggaggcccacctgcgcggcgccgaggtcctgtatagcttggccgccgctcatgctcgccgctccggcctggccggccgctatccattatctgatttcaccctgctaactgaagctcgtcggacacttggattgttccaacaccatgacgctatcacggggactgcgaaggaagcggtggtcgttgattacggggtgaggttgcttcggagtctggttaacctgaagcaggtaattattcacgccgcacactatctggtacttggagacaaagaaacataccatttcgacccagaagcaccattccttcaggtggacgatacccgcttgagccacgatgctctgcctgagagaactgttatccagttggatagctccccgcgattcgttgtgctgttcaacccactggagcaggagcgattctccatggtttccctgctcgttaactcgccccgtgttcgggtcctgagtgaagagggccaacccttggcagtgcagatttctgcccattggtctagcgcgacagaggcagtcccggatgtataccaggtatcagtgccagtgagacttccagccctcgggttgggcgtgctgcaactgcagctgggtctagacggacacaggacactcccgagctcggtgcgcatctatctgcatggcagacaactctccgtcagccggcacgaagctttcccgttgagagtcatcgactcaggcacgtctgattttgctctctcaaaccggtatatgcaagtgtggttcagcggtctgaccggactgctcaaatccataagaagggtggatgaggagcatgaacagcaggtggatatgcaggtgctggtatacgggacccggacgtctaaagacaaatctggagcttacctgtttctgcctgacggcgaagccaaaccctatgttcctaaggaaccccccgtactgagagtgactgagggaccctttttcagtgaagtggtggcctactatgaacatattcaccaagccgtgcggctatataatctccccggtgtagagggactatccctggacatctcttcattggtcgacatacgcgattacgtgaataaggaactggccctgcacatccatacggatattgattcacagggcatttttttcacggatttgaatggcttccaggttcagcccagacgatatctgaagaagctccccctgcaagcaaacttctaccccatgcccgttatggcctacattcaggacgctcagaagcgcctgacactgcacacggctcaggctctcggagtgtcttctctgaaggatgggcagctcgaggtcattctcgatcgtcggctgatgcaggatgataataggggtctgggccaagggctgaaagacaataaaagaacatgtaatcgctttcgcctccttcttgaaaggcgaacagtggggagtgaggtgcaagatagccactctacctcatatcctagtctgctttctcacctgaccagtatgtatctcaatgcgccggctctagccctgcccgtggctagaatgcagctccccggacctggcctgcgcagctttcacccattggcctcttcactaccatgtgacttccacctgttgaatctaagaactctccaggctgaagaagataccctcccgtccgccgagacagctttgattctacacagaaaagggttcgattgcggcttggaggctaagaatctgggtttcaactgtaccacttcccagggaaaggtcgcccttggatcgctgtttcacggactggatgtggtcttcctgcagcccacctccctgaccctcctctatcctctggcctccccatccaactccaccgacgtgtatctcgaacctatggagatcgccacatttcgcctgagacttggctag

SEQ ID NO: 162140 - DNA, 3192 bp, Artificial Sequence
  derived and/or modified sequence
atgctgccctactacaccgtgaacggcagctgggtggtgccccccgaaccgcggccctctttcttttctataagccctcaggactgccagtttgccctgggcggccggggtcagaaacctgaactgcagatgctcaccgtctcagaggagttgccctttgataacgttgacggcggcgtctggaggcagggcttcgatatctcctacgatccgcatgactgggacgccgaggacttgcaggtttttgttgtgccccacagccacaatgatcccggttggatcaagacctttgacaagtactacaccgaacaaacacagcacattttgaacagcatggtcagcaagctgcaggaagatcccagacgtcgcttcctctgggctgaggtatctttctttgccaaatggtgggacaatatcaatgtacagaagcgggctgccgtgcgccggttagttggcaacggacaattggaaattgcaactggtggctgggtgatgcctgacgaagctaactcccattacttcgccctgatagaccaactgatcgaggggcatcagtggttggaacggaacttgggcgccacgccacgttctggttgggcggtcgacccctttggctatagtagcacaatgccttacttactccgccgagcgaatctcacctctatgcttatccaaagggtccattacgcaatcaagaagcacttcgctgctacccatagtttggaatttatgtggcgccaaacatgggacagcgatagtagtactgacatcttctgtcacatgatgccgttctactcttatgatgtcccccacacatgcggtcctgatcccaagatctgttgccagttcgactttaagcggctgcctggaggacgcatcaactgcccatggaaggtaccgcctcgtgccataactgaggccaatgtggctgaaagagcagccctgttactagaccagtaccggaaaaagtcccagctgttccggtccaatgtgcttctggtgcccctcggcgatgactttagatacgacaagccacaggagtgggacgcacagttcttcaattaccagcgcctattcgacttctttaatagtcgcccaaacctccatgtgcaggcccagtttgggaccctgagcgactactttgacgccttgtacaaacggacaggggtagaacccggagcccggccgccaggatttccagtactgtccggcgatttcttcagctacgcagaccgggaagaccattactggacaggttactacacgtcacgaccattctacaagtcgctggaccgcgttctggaggcccatttaagaggagccgaggtgctctactctctggccgccgctcacgcacgccgctcgggattggccgggcgataccctctgtccgatttcaccctgctgaccgaagcccgtcgcactttaggactgttccagcatcacgatgccatcaccggaaccgccaaggaagcggtcgttgtggactacggcgtgcgcctgctgaggtccctggtcaacctcaaacaggtcatcatccacgccgcgcattacctcgtactgggggacaaggagacataccatttcgaccctgaggcgccatttctgcaagtcgatgacacccggttatcccacgacgcgctgcccgaaagaaccgtgatccagttagacagttcccctcgattcgttgtgttgttcaacccactggaacaggaacggttctccatggttagtctgctggtcaacagccccagagtgagggtcctcagcgaagaggggcagccgctggctgtgcagatttccgcccactggtcatccgctacagaggccgttccagatgtttaccaagtttctgtaccagtacggcttcccgcactggggctgggcgtgctgcagctgcagttaggacttgatggacatcggaccctgccctcgtcggttagaatctatctgcatggccggcagctgagcgtgtcaaggcacgaagcgtttcctttacgggtgatcgattctggcactagtgatttcgccctgagcaacaggtacatgcaagtatggttctccggccttaccggactgctgaagtcgatcaggcgcgtggacgaagaacacgaacagcaggtggatatgcaggtgctcgtatacggcaccaggacctctaaggataagtctggagcatacttatttcttccagatggagaggcaaagccatatgtgcccaaggagccacccgtcctgagagtaaccgaggggcccttttttagcgaagttgtcgcttattatgaacacatacatcaagccgttcgactgtataacttgccgggcgtagagggtctttcgctagacatatcttccctggtggacatcagagattacgtcaacaaagagttagcacttcatattcacacggatatcgacagccagggcatcttttttaccgacctgaacggttttcaggtacagcctcgaaggtatctgaagaagctaccactgcaggcaaacttttaccctatgcccgtgatggcatacatccaagatgcccaaaaacgtctcaccctccataccgcccaggcgctgggcgtctcatccctaaaagatggccaactcgaggtgatcctggaccggcgcctgatgcaggatgataacagggggctgggccaaggcttgaaggacaataaacggacatgtaacaggttccggctgttgcttgagcggcggaccgtcgggtccgaggtgcaggattcccactctacctcctatccaagtcttttatcacatctgacttccatgtacctgaacgccccagcactcgctctgccggtggcccggatgcagctgcccgggcctggcctgcgctctttccatcctttggcatcttcactgccgtgtgacttccacttgcttaaccttcgcacattgcaggctgaggaagatactcttccctctgcagaaacagctcttattctgcacagaaaaggatttgactgcgggctggaggcgaaaaacctagggttcaattgtactacatcacagggtaaagtcgcccttggctccttatttcatggactggatgtcgtgtttcttcagccgactagcttgactttactctacccactcgctagtccttcaaattctacagacgtatatttagagcccatggagatagccactttcaggctgaggcttgggtag

SEQ ID NO: 162141 - DNA, 3453 bp, Artificial Sequence
  derived and/or modified sequence
atgaaactcaaaaaacaggtcaccgtgtgcggcgctgccatattttgtgtggcagtattcagtctatatcttatgctggatagggtccagcatgacccaaccagacatcagaacggcggaaacttccctaggtcccagattagcgttctccagaatagaattgaacagttagaacagctccttgaggagaatcatgagatcataagccacattaaggattccgttctggaactgacagccaatgcagagggccctcccgcaatgctcccatactatactgtgaacggaagctgggtcgtccccccagaacctagacccagtttcttcagcatttcaccacaggactgtcagtttgcactgggagggagaggccagaaaccggagctgcaaatgctcaccgtgtcagaagagctgccattcgataacgtagatggaggggtgtggcgtcagggattcgacatcagttacgatccccatgattgggacgccgaggacctgcaggtattcgttgtcccacactcccataacgaccccggatggattaaaaccttcgacaagtactacaccgagcaaactcagcacattctcaactcgatggtatcaaaactgcaagaagatccaaggcgtcgtttcctgtgggcagaggttagcttcttcgcaaaatggtgggataacattaatgtgcagaaacgagccgctgtacgacgcctcgttggcaacgggcagcttgagatcgctactggcggatgggtgatgcccgatgaggcgaattcccactacttcgcactgattgaccagttgatcgaaggccaccagtggctggaacgcaatcttggcgctactcctcggtctggatgggcggtggatccttttgggtacagcagcaccatgccatatctgctgagacgagcgaacctgacctccatgttgattcagagagtgcactacgcaatcaagaaacatttcgctgcgacacacagcttggaattcatgtggcgccagacctgggactcggactctagcacagatatcttttgtcatatgatgccgttttactcttacgatgtcccacatacttgcggtcccgatccaaaaatttgttgccagttcgacttcaaaagactgccagggggaaggatcaactgtccttggaaagtcccaccaagagccattaccgaggctaacgttgccgagagggcagctctgctactggaccagtaccgtaaaaaaagccaactctttcgctcaaatgtgttgctggtgccacttggcgacgactttagatatgataaaccacaggaatgggacgcacaatttttcaattaccaaaggctctttgatttcttcaactctagacccaatcttcatgtgcaggcacagttcggcactctgtctgattattttgacgcactatataaaaggactggggtggagcccggagcgcgtcctcccggattccctgtgctctccggagattttttctcgtatgccgaccgcgaggaccactactggactggatattacacctcacggccattttataagtccctggaccgcgtgttagaggcccacttgcgcggtgccgaggtgctctatagtctggctgccgcacacgcacggaggagcggtctggccggacggtaccccctgtctgacttcacactactcactgaggcccgacggactctcggacttttccagcatcacgatgcaattacgggtactgccaaggaggcagtggtggtggactacggcgtccgcctgctacgaagcctggttaacctcaaacaggtgatcatccatgctgctcattatctggtgcttggagacaaggagacctaccattttgatcccgaggcccctttcctgcaggtggacgataccaggttgtcacatgacgcccttcccgagcgcacagtgattcagctcgactcttcccctcggttcgtagttctatttaacccacttgagcaggaaaggttctccatggtttccctcctggtcaacagccccagagtacgcgttctgtctgaagagggccagccactggcggttcagatctctgcccattggagctccgcaaccgaggcggtgcccgacgtgtaccaggtgtccgtgcccgtcagactgcctgccctcggcttgggcgtgctccagctgcaactggggcttgacggccaccggacactgccgtcaagcgtcagaatttacctgcatgggagacagctgtccgtgtcacgccatgaggccttccccttgcgtgtgattgatagcggcactagcgacttcgcactgagtaacagatatatgcaggtgtggttcagtggtctcactgggctgctgaagtccattagaagggtggatgaagagcacgaacagcaggtcgacatgcaggtgctagtgtatgggacaaggaccagcaaggataagtcaggagcttacctgttccttccagatggcgaagccaagccttatgtaccgaaggaacctcccgtgctgagggtaacggagggtccgttttttagtgaggtagtggcttactatgaacacattcatcaagctgttcggctgtataacctccctggggtcgagggcctctcactggacatcagcagcttagtggacatccgggattatgtgaataaagagctggccctccacatccataccgatatagacagccagggtattttttttactgacttgaacggctttcaggtgcaacctcgcaggtatcttaagaagctgccactgcaagccaacttctaccccatgcccgtaatggcatatatccaagatgctcaaaagcggctgacattgcacaccgcacaggctttgggggtgtccagcctgaaggatggtcagttggaagtgatactggacaggcgccttatgcaggacgacaacagaggattgggccaagggctgaaggacaacaaacgtacatgcaatcgcttccgacttctgttggaaagaagaacagtgggctccgaagtccaagactctcactccacttcctatccttcgttgctcagtcacctcactagtatgtaccttaacgctccagccctcgctttgcctgtggcacgaatgcagctcccgggacctggactgaggtcgttccacccactcgcctcatccctgccttgcgatttccacctgctcaacttgaggactctgcaggcggaagaagacactctgccttccgccgagaccgcgctaattttgcataggaaaggcttcgactgtgggctggaagccaagaatctcggattcaactgcactactagtcagggcaaagtcgccctgggtagcttatttcacggattggatgtggtcttcctgcagccgacaagcctgacacttctttatcctctggccagccccagcaatagtacagatgtatatctagagcctatggagattgccacgtttcgtcttaggctcggatag

SEQ ID NO: 162142 - DNA, 3192 bp, Artificial Sequence
  derived and/or modified sequence
atgctcccctactatacggtgaacgggagctgggtggtgccgccagagcccagaccatcattcttcagcatatccccacaagactgccagtttgctctagggggaagggggcagaaacctgagcttcagatgctgactgtgtccgaggagttgccgttcgacaatgtggacgggggtgtgtggaggcagggtttcgacatatcttacgacccgcatgattgggatgcggaggatttgcaggtgtttgtcgtcccacactcgcataacgatccaggatggatcaaaacatttgacaaatactacaccgagcagactcagcacatcttgaattcaatggtgagcaaactacaagaggacccacgcagacgatttctttgggccgaggtttcctttttcgcaaaatggtgggacaacataaatgtgcagaaaagggccgcagtccgacggttggttggaaacggccaactcgagattgcgactggcggttgggttatgcctgacgaggccaacagccactattttgcccttatcgatcaattgatcgaaggtcatcagtggctagagcgcaatctgggcgcaacccctcgttcaggatgggccgttgatcccttcggctacagcagcacgatgccttatctgttaagaagggctaatctgacaagtatgctgattcagcgggtacactacgccattaagaaacattttgccgctacacactccctggagttcatgtggaggcagacttgggattctgattcgtctaccgacatcttttgccacatgatgcccttttactcgtatgacgttcctcatacctgcggccctgacccaaagatttgttgtcagtttgattttaagcgacttcctgggggaagaatcaactgcccatggaaggttcccccacgcgctataacggaggccaatgttgccgagagggcagctctgttacttgatcagtatcgaaaaaaaagccagctgttccggtcaaacgttctgttagtgcctctgggggacgatttcagatatgacaagcctcaggaatgggacgcgcaatttttcaattaccagaggctcttcgatttttttaatagcagacctaacctccatgtgcaggcgcagtttggaacactatccgactatttcgatgctctctataaaaggacgggcgtggagcccggagcgaggcctccgggattccccgtcctgtcaggcgattttttctcctacgccgaccgggaagatcattattggacaggctactacaccagcagacccttttacaagagcctggacagggtactggaagcgcaccttcgaggagcagaagtgttgtactcgcttgccgctgcccacgcaaggcgttcaggcttggcaggaaggtatccactcagcgatttcactctgctgaccgaggccagacgtacccttgggctttttcagcaccatgacgccatcaccggaacagcaaaggaagccgtcgttgtggattatggggtcaggctgctgcgatctctcgtcaatctgaaacaggtcatcatccacgccgctcattacctggtattaggggataaggagacataccacttcgatcccgaggccccatttttacaggtagatgatactagacttagccatgacgccctgccagagcgaaccgtgatccaactcgacagcagcccaaggtttgtggttctgtttaatcctctggaacaggagcgtttttctatggtgtcgctgctcgtgaattctcccagagtcagagtgctcagcgaggaaggtcagcccttagcagtgcagattagcgcccattggagctcggcaacagaggcagtgcccgacgtgtaccaggtgtcagtcccagtccggcttcccgcactagggttaggagtgctgcagcttcagcttggtctcgacggtcaccggactttgccctcatctgttagaatttacctacacggaagacagttgagtgtgtcaaggcacgaggccttccccctccgagtcatcgatagcggaactagcgattttgcgttgtctaatcgctacatgcaagtctggtttagcggactaaccggtcttcttaagtccattagaagggtcgatgaggagcatgagcagcaggtggacatgcaagtgcttgtctacggcactcggactagcaaggataagagcggcgcttacctcttcctgcccgacggagaggcaaagccgtacgtgcctaaggaacccccagttcttcgcgtcaccgagggacctttcttttccgaggtagtggcttattacgaacacatccatcaggccgtacgactgtacaacctgccaggcgtcgagggactcagcctcgacattagtagccttgtggatattcgtgattatgtaaacaaagaactcgcccttcatatacacaccgatatagatagccaaggaatatttttcactgacctgaacgggtttcaggtgcagccacggaggtatctaaagaaattgcctctgcaggctaacttttatccgatgccagttatggcttatattcaggacgcgcagaaaaggcttaccttacacaccgcccaggcgctgggagtgagcagcctgaaggacggccagctggaagtgatcctagaccggcgactgatgcaagacgacaatcgtggcctgggccaggggcttaaggataacaagcgtacatgcaatcgtttcagacttttgctggagagacgaaccgtgggaagcgaggtacaggattcacatagtacatcttacccttcgctcttgtcacacctgacctcaatgtatctgaatgccccagcactggctctccctgtcgccagaatgcagctcccgggacccggtctgaggagctttcacccactggccagttcattaccttgtgacttccacttgctcaacttacgaaccctccaggccgaagaggacacacttccatctgccgaaaccgcgttgatcctgcacagaaaaggcttcgactgtggcctcgaggcaaagaatttgggcttcaattgcaccaccagtcaagggaaggtcgctcttggttctctatttcatggcttagacgttgttttcctgcagccaaccagcctcactttgttgtacccacttgcttctccatccaatagcacagatgtgtacttggagccaatggagatcgctacgttcaggctgcggctgggatag

SEQ ID NO: 162143 - DNA, 3453 bp, Artificial Sequence
  derived and/or modified sequence
atgaagctgaagaagcaggtgaccgtgtgcggcgccgccatcttctgcgtggccgtgttcagcctgtacctgatgctggacagagtgcagcacgaccccaccagacaccagaacggcggcaacttccccagaagccagatcagcgtgctgcagaacagaatcgagcagctggagcagctgctggaggagaaccacgagatcatcagccacatcaaggacagcgtgctggagctgaccgccaacgccgagggcccccccgccatgctgccctactacaccgtgaacggcagctgggtggtgccccccgagcccagacccagcttcttcagcatcagcccccaggactgccagttcgccctgggcggcagaggccagaagcccgagctgcagatgctgaccgtgagcgaggagctgcccttcgacaacgtggacggcggcgtgtggagacagggcttcgacatcagctacgacccccacgactgggacgccgaggacctgcaggtgttcgtggtgccccacagccacaacgaccccggctggatcaagaccttcgacaagtactacaccgagcagacccagcacatcctgaacagcatggtgagcaagctgcaggaggaccccagaagaagattcctgtgggccgaggtgagcttcttcgccaagtggtgggacaacatcaacgtgcagaagagagccgccgtgagaagactggtgggcaacggccagctggagatcgccaccggcggctgggtgatgcccgacgaggccaacagccactacttcgccctgatcgaccagctgatcgagggccaccagtggctggagagaaacctgggcgccacccccagaagcggctgggccgtggaccccttcggctacagcagcaccatgccctacctgctgagaagagccaacctgaccagcatgctgatccagagagtgcactacgccatcaagaagcacttcgccgccacccacagcctggagttcatgtggagacagacctgggacagcgacagcagcaccgacatcttctgccacatgatgcccttctacagctacgacgtgccccacacctgcggccccgaccccaagatctgctgccagttcgacttcaagagactgcccggcggcagaatcaactgcccctggaaggtgccccccagagccatcaccgaggccaacgtggccgagagagccgccctgctgctggaccagtacagaaagaagagccagctgttcagaagcaacgtgctgctggtgcccctgggcgacgacttcagatacgacaagccccaggagtgggacgcccagttcttcaactaccagagactgttcgacttcttcaacagcagacccaacctgcacgtgcaggcccagttcggcaccctgagcgactacttcgacgccctgtacaagagaaccggcgtggagcccggcgccagaccccccggcttccccgtgctgagcggcgacttcttcagctacgccgacagagaggaccactactggaccggctactacaccagcagacccttctacaagagcctggacagagtgctggaggcccacctgagaggcgccgaggtgctgtacagcctggccgccgcccacgccagaagaagcggcctggccggcagataccccctgagcgacttcaccctgctgaccgaggccagaagaaccctgggcctgttccagcaccacgacgccatcaccggcaccgccaaggaggccgtggtggtggactacggcgtgagactgctgagaagcctggtgaacctgaagcaggtgatcatccacgccgcccactacctggtgctgggcgacaaggagacctaccacttcgaccccgaggcccccttcctgcaggtggacgacaccagactgagccacgacgccctgcccgagagaaccgtgatccagctggacagcagccccagattcgtggtgctgttcaaccccctggagcaggagagattcagcatggtgagcctgctggtgaacagccccagagtgagagtgctgagcgaggagggccagcccctggccgtgcagatcagcgcccactggagcagcgccaccgaggccgtgcccgacgtgtaccaggtgagcgtgcccgtgagactgcccgccctgggcctgggcgtgctgcagctgcagctgggcctggacggccacagaaccctgcccagcagcgtgagaatctacctgcacggcagacagctgagcgtgagcagacacgaggccttccccctgagagtgatcgacagcggcaccagcgacttcgccctgagcaacagatacatgcaggtgtggttcagcggcctgaccggcctgctgaagagcatcagaagagtggacgaggagcacgagcagcaggtggacatgcaggtgctggtgtacggcaccagaaccagcaaggacaagagcggcgcctacctgttcctgcccgacggcgaggccaagccctacgtgcccaaggagccccccgtgctgagagtgaccgagggccccttcttcagcgaggtggtggcctactacgagcacatccaccaggccgtgagactgtacaacctgcccggcgtggagggcctgagcctggacatcagcagcctggtggacatcagagactacgtgaacaaggagctggccctgcacatccacaccgacatcgacagccagggcatcttcttcaccgacctgaacggcttccaggtgcagcccagaagatacctgaagaagctgcccctgcaggccaacttctaccccatgcccgtgatggcctacatccaggacgcccagaagagactgaccctgcacaccgcccaggccctgggcgtgagcagcctgaaggacggccagctggaggtgatcctggacagaagactgatgcaggacgacaacagaggcctgggccagggcctgaaggacaacaagagaacctgcaacagattcagactgctgctggagagaagaaccgtgggcagcgaggtgcaggacagccacagcaccagctaccccagcctgctgagccacctgaccagcatgtacctgaacgcccccgccctggccctgcccgtggccagaatgcagctgcccggccccggcctgagaagcttccaccccctggccagcagcctgccctgcgacttccacctgctgaacctgagaaccctgcaggccgaggaggacaccctgcccagcgccgagaccgccctgatcctgcacagaaagggcttcgactgcggcctggaggccaagaacctgggcttcaactgcaccaccagccagggcaaggtggccctgggcagcctgttccacggcctggacgtggtgttcctgcagcccaccagcctgaccctgctgtaccccctggccagccccagcaacagcaccgacgtgtacctggagcccatggagatcgccaccttcagactgagactgggctag

SEQ ID NO: 162144 - DNA, 3192 bp, Artificial Sequence
  derived and/or modified sequence
atgctgccctactacaccgtgaacggcagctgggtggtgccccccgagcccagacccagcttcttcagcatcagcccccaggactgccagttcgccctgggcggcagaggccagaagcccgagctgcagatgctgaccgtgagcgaggagctgcccttcgacaacgtggacggcggcgtgtggagacagggcttcgacatcagctacgacccccacgactgggacgccgaggacctgcaggtgttcgtggtgccccacagccacaacgaccccggctggatcaagaccttcgacaagtactacaccgagcagacccagcacatcctgaacagcatggtgagcaagctgcaggaggaccccagaagaagattcctgtgggccgaggtgagcttcttcgccaagtggtgggacaacatcaacgtgcagaagagagccgccgtgagaagactggtgggcaacggccagctggagatcgccaccggcggctgggtgatgcccgacgaggccaacagccactacttcgccctgatcgaccagctgatcgagggccaccagtggctggagagaaacctgggcgccacccccagaagcggctgggccgtggaccccttcggctacagcagcaccatgccctacctgctgagaagagccaacctgaccagcatgctgatccagagagtgcactacgccatcaagaagcacttcgccgccacccacagcctggagttcatgtggagacagacctgggacagcgacagcagcaccgacatcttctgccacatgatgcccttctacagctacgacgtgccccacacctgcggccccgaccccaagatctgctgccagttcgacttcaagagactgcccggcggcagaatcaactgcccctggaaggtgccccccagagccatcaccgaggccaacgtggccgagagagccgccctgctgctggaccagtacagaaagaagagccagctgttcagaagcaacgtgctgctggtgcccctgggcgacgacttcagatacgacaagccccaggagtgggacgcccagttcttcaactaccagagactgttcgacttcttcaacagcagacccaacctgcacgtgcaggcccagttcggcaccctgagcgactacttcgacgccctgtacaagagaaccggcgtggagcccggcgccagaccccccggcttccccgtgctgagcggcgacttcttcagctacgccgacagagaggaccactactggaccggctactacaccagcagacccttctacaagagcctggacagagtgctggaggcccacctgagaggcgccgaggtgctgtacagcctggccgccgcccacgccagaagaagcggcctggccggcagataccccctgagcgacttcaccctgctgaccgaggccagaagaaccctgggcctgttccagcaccacgacgccatcaccggcaccgccaaggaggccgtggtggtggactacggcgtgagactgctgagaagcctggtgaacctgaagcaggtgatcatccacgccgcccactacctggtgctgggcgacaaggagacctaccacttcgaccccgaggcccccttcctgcaggtggacgacaccagactgagccacgacgccctgcccgagagaaccgtgatccagctggacagcagccccagattcgtggtgctgttcaaccccctggagcaggagagattcagcatggtgagcctgctggtgaacagccccagagtgagagtgctgagcgaggagggccagcccctggccgtgcagatcagcgcccactggagcagcgccaccgaggccgtgcccgacgtgtaccaggtgagcgtgcccgtgagactgcccgccctgggcctgggcgtgctgcagctgcagctgggcctggacggccacagaaccctgcccagcagcgtgagaatctacctgcacggcagacagctgagcgtgagcagacacgaggccttccccctgagagtgatcgacagcggcaccagcgacttcgccctgagcaacagatacatgcaggtgtggttcagcggcctgaccggcctgctgaagagcatcagaagagtggacgaggagcacgagcagcaggtggacatgcaggtgctggtgtacggcaccagaaccagcaaggacaagagcggcgcctacctgttcctgcccgacggcgaggccaagccctacgtgcccaaggagccccccgtgctgagagtgaccgagggccccttcttcagcgaggtggtggcctactacgagcacatccaccaggccgtgagactgtacaacctgcccggcgtggagggcctgagcctggacatcagcagcctggtggacatcagagactacgtgaacaaggagctggccctgcacatccacaccgacatcgacagccagggcatcttcttcaccgacctgaacggcttccaggtgcagcccagaagatacctgaagaagctgcccctgcaggccaacttctaccccatgcccgtgatggcctacatccaggacgcccagaagagactgaccctgcacaccgcccaggccctgggcgtgagcagcctgaaggacggccagctggaggtgatcctggacagaagactgatgcaggacgacaacagaggcctgggccagggcctgaaggacaacaagagaacctgcaacagattcagactgctgctggagagaagaaccgtgggcagcgaggtgcaggacagccacagcaccagctaccccagcctgctgagccacctgaccagcatgtacctgaacgcccccgccctggccctgcccgtggccagaatgcagctgcccggccccggcctgagaagcttccaccccctggccagcagcctgccctgcgacttccacctgctgaacctgagaaccctgcaggccgaggaggacaccctgcccagcgccgagaccgccctgatcctgcacagaaagggcttcgactgcggcctggaggccaagaacctgggcttcaactgcaccaccagccagggcaaggtggccctgggcagcctgttccacggcctggacgtggtgttcctgcagcccaccagcctgaccctgctgtaccccctggccagccccagcaacagcaccgacgtgtacctggagcccatggagatcgccaccttcagactgagactgggctag

SEQ ID NO: 162145 - protein, 343 aa, Artificial Sequence
  derived and/or modified sequence
MPPPRTGRGLLWLGLVLSSVCVALGSETQANSTTDALNVLLIIVDDLRPSLGCYGDKLVRSPNIDQLASHSLLFQNAFAQQAVCAPSRVSFLTGRRPDTTRLYDFNSYWRVHAGNFSTIPQYFKENGYVTMSVGKVFHPGISSNHTDDSPYSWSFPPYHPSSEKYENTKTCRGPDGELHANLLCPVDVLDVPEGTLPDKQSTEQAIQLLEKMKTSASPFFLAVGYHKPHIPFRYPKEFQKLYPLENITLAPDPEVPDGLPPVAYNPWMDIRQREDVQALNISVPYGPIPVDFQRKIRQSYFASVSYLDTQVGRLLSALDDLQLANSTIIAFTSDHGFLMRTNT

SEQ ID NO: 162146 - protein, 312 aa, Artificial Sequence
  derived and/or modified sequence
MPPPRTGRGLLWLGLVLSSVCVALGSETQANSTTDALNVLLIIVDDLRPSLGCYGDKLVRSPNIDQLASHSLLFQNAFAQQAVCAPSRVSFLTGRRPDTTRLYDFNSYWRVHAGNFSTIPQYFKENGYVTMSVGKVFHPGISSNHTDDSPYSWSFPPYHPSSEKYENTKTCRGPDGELHANLLCPVDVLDVPEGTLPDKQSTEQAIQLLEKMKTSASPFFLAVGYHKPHIPFRYPKEFQKLYPLENITLAPDPEVPDGLPPVAYNPWMDIRQREDVQALNISVPYGPIPVDFQEDQSSTGFRLKTSSTRKYK

SEQ ID NO: 162147 - protein, 179 aa, Artificial Sequence
  derived and/or modified sequence
MPPPRTGRGLLWLGLVLSSVCVALGSETQANSTTDALNVLLIIVDDLRPSLGCYGDKLVRSPNIDQLASHSLLFQNAFAQQAVCAPSRVSFLTGRRPDTTRLYDFNSYWRVHAGNFSTIPQYFKENGYVTMSVGKVFHPGTAPCPESGFSWFVVSESSIPILGMGLSLQSPLLAGRVPR

SEQ ID NO: 162148 - protein, 86 aa, Artificial Sequence
  derived and/or modified sequence
MPPPRTGRGLLWLGLVLSSVCVALGSETQANSTTDALNVLLIIVDDLRPSLGCYGDKLVRSPNIDQLASHSLLFQNAFAQQAVCAP

SEQ ID NO: 162149 - DNA, 1437 bp, Artificial Sequence
  derived and/or modified sequence
agaacccgccccggaggggagggacgcagggaagagtcgcacggacgcactcgcgctgcggccagcgcccgggcctgcgggcccgggcggcggctgtgttgcgcagtcttcatgggttcccgacgaggaggtctctgtggctgcggcggcggctgctaactgcgccacctgctgcagcctgtccccgccgctctgaagcggccgcgtcgaagccgaaatgccgccaccccggaccggccgaggccttctctggctgggtctggttctgagctccgtctgcgtcgccctcggatccgaaacgcaggccaactcgaccacagatgctctgaacgttcttctcatcatcgtggatgacctgcgcccctccctgggctgttatggggataagctggtgaggtccccaaatattgaccaactggcatcccacagcctcctcttccagaatgcctttgcgcagcaagcagtgtgcgccccgagccgcgtttctttcctcactggcaggagacctgacaccacccgcctgtacgacttcaactcctactggagggtgcacgctggaaacttctccaccatcccccagtacttcaaggagaatggctatgtgaccatgtcggtgggaaaagtctttcaccctgggatatcttctaaccataccgatgattctccgtatagctggtcttttccaccttatcatccttcctctgagaagtatgaaaacactaagacatgtcgagggccagatggagaactccatgccaacctgctttgccctgtggatgtgctggatgttcccgagggcaccttgcctgacaaacagagcactgagcaagccatacagttgttggaaaagatgaaaacgtcagccagtcctttcttcctggccgttgggtatcataagccacacatccccttcagataccccaaggaatttcagaagttgtatcccttggagaacatcaccctggcccccgatcccgaggtccctgatggcctaccccctgtggcctacaacccctggatggacatcaggcaacgggaagacgtccaagccttaaacatcagtgtgccgtatggtccaattcctgtggactttcagcggaaaatccgccagagctactttgcctctgtgtcatatttggatacacaggtcggccgcctcttgagtgctttggacgatcttcagctggccaacagcaccatcattgcatttacctcggatcatggtttcctcatgaggacaaatacctgattttgaataaagcagcattcagttgaaataaccctttctgtggtaattccaagtgaatatttttcttctaggtgatgagtttctacttcctctggtttttacaacaggaaatgaaatggtatctaaaataaacaagctgtggtatgatgattattcaaaaaaaaaaaaaaaaaaaaaaaaaaaaaaaa

SEQ ID NO: 162150 - DNA, 1032 bp, Artificial Sequence
  derived and/or modified sequence
atgcccccccccagaaccggcagaggcctgctgtggctgggcctggtgctgagcagcgtgtgcgtggccctgggcagcgagacccaggccaacagcaccaccgacgccctgaacgtgctgctgatcatcgtggacgacctgagacccagcctgggctgctacggcgacaagctggtgagaagccccaacatcgaccagctggccagccacagcctgctgttccagaacgccttcgcccagcaggccgtgtgcgcccccagcagagtgagcttcctgaccggcagaagacccgacaccaccagactgtacgacttcaacagctactggagagtgcacgccggcaacttcagcaccatcccccagtacttcaaggagaacggctacgtgaccatgagcgtgggcaaggtgttccaccccggcatcagcagcaaccacaccgacgacagcccctacagctggagcttccccccctaccaccccagcagcgagaagtacgagaacaccaagacctgcagaggccccgacggcgagctgcacgccaacctgctgtgccccgtggacgtgctggacgtgcccgagggcaccctgcccgacaagcagagcaccgagcaggccatccagctgctggagaagatgaagaccagcgccagccccttcttcctggccgtgggctaccacaagccccacatccccttcagataccccaaggagttccagaagctgtaccccctggagaacatcaccctggcccccgaccccgaggtgcccgacggcctgccccccgtggcctacaacccctggatggacatcagacagagagaggacgtgcaggccctgaacatcagcgtgccctacggccccatccccgtggacttccagagaaagatcagacagagctacttcgccagcgtgagctacctggacacccaggtgggcagactgctgagcgccctggacgacctgcagctggccaacagcaccatcatcgccttcaccagcgaccacggcttcctgatgagaaccaacacctag

SEQ ID NO: 162151 - DNA, 939 bp, Artificial Sequence
  derived and/or modified sequence
atgcccccccccagaaccggcagaggcctgctgtggctgggcctggtgctgagcagcgtgtgcgtggccctgggcagcgagacccaggccaacagcaccaccgacgccctgaacgtgctgctgatcatcgtggacgacctgagacccagcctgggctgctacggcgacaagctggtgagaagccccaacatcgaccagctggccagccacagcctgctgttccagaacgccttcgcccagcaggccgtgtgcgcccccagcagagtgagcttcctgaccggcagaagacccgacaccaccagactgtacgacttcaacagctactggagagtgcacgccggcaacttcagcaccatcccccagtacttcaaggagaacggctacgtgaccatgagcgtgggcaaggtgttccaccccggcatcagcagcaaccacaccgacgacagcccctacagctggagcttccccccctaccaccccagcagcgagaagtacgagaacaccaagacctgcagaggccccgacggcgagctgcacgccaacctgctgtgccccgtggacgtgctggacgtgcccgagggcaccctgcccgacaagcagagcaccgagcaggccatccagctgctggagaagatgaagaccagcgccagccccttcttcctggccgtgggctaccacaagccccacatccccttcagataccccaaggagttccagaagctgtaccccctggagaacatcaccctggcccccgaccccgaggtgcccgacggcctgccccccgtggcctacaacccctggatggacatcagacagagagaggacgtgcaggccctgaacatcagcgtgccctacggccccatccccgtggacttccaggaggaccagagcagcaccggcttcagactgaagaccagcagcaccagaaagtacaagtag

SEQ ID NO: 162152 - DNA, 540 bp, Artificial Sequence
  derived and/or modified sequence
atgcccccccccagaaccggcagaggcctgctgtggctgggcctggtgctgagcagcgtgtgcgtggccctgggcagcgagacccaggccaacagcaccaccgacgccctgaacgtgctgctgatcatcgtggacgacctgagacccagcctgggctgctacggcgacaagctggtgagaagccccaacatcgaccagctggccagccacagcctgctgttccagaacgccttcgcccagcaggccgtgtgcgcccccagcagagtgagcttcctgaccggcagaagacccgacaccaccagactgtacgacttcaacagctactggagagtgcacgccggcaacttcagcaccatcccccagtacttcaaggagaacggctacgtgaccatgagcgtgggcaaggtgttccaccccggcaccgccccctgccccgagagcggcttcagctggttcgtggtgagcgagagcagcatccccatcctgggcatgggcctgagcctgcagagccccctgctggccggcagagtgcccagatag

SEQ ID NO: 162153 - DNA, 261 bp, Artificial Sequence
  derived and/or modified sequence
atgcccccccccagaaccggcagaggcctgctgtggctgggcctggtgctgagcagcgtgtgcgtggccctgggcagcgagacccaggccaacagcaccaccgacgccctgaacgtgctgctgatcatcgtggacgacctgagacccagcctgggctgctacggcgacaagctggtgagaagccccaacatcgaccagctggccagccacagcctgctgttccagaacgccttcgcccagcaggccgtgtgcgccccctag

SEQ ID NO: 162154 - DNA, 1032 bp, Artificial Sequence
  derived and/or modified sequence
atgccgcctcccaggacgggccgggggctactctggctgggccttgtgttgagctctgtctgcgtggcgcttggctctgagacccaagctaatagcactacagatgccttgaacgttctgttaatcatcgttgatgatctgagacctagcctcggctgttacggcgataagttggtgcggagtccaaacattgatcagctggcatctcactctctgctttttcagaatgcctttgcccagcaggccgtctgtgctccgtcccgcgtgtccttccttactgggaggagacccgatactacacgcttgtacgatttcaactcttattggagggtgcacgccgggaactttagcactattcctcagtatttcaaggaaaatggatatgttacaatgagcgtggggaaggtgtttcatcccgggatatcctccaaccacacagacgacagcccctactcctggtcctttccgccataccatccgtcaagcgagaagtatgagaataccaagacctgtcggggcccagatggcgaactacacgccaaccttctttgtccagtggacgtcctcgacgtgccggaaggcaccctccccgacaagcaatcaacagagcaggccatacaacttttggagaaaatgaaaacctccgcgagccccttttttctcgcagtaggctatcataagccccacatcccttttagataccccaaagaattccaaaagttataccctctcgagaacattactctggctccagatcccgaagtcccagacggtttgcctcccgtcgcttataacccctggatggatatccgacagagggaggacgtgcaggctctgaacatcagcgttccctatggcccaatccccgtggacttccagagaaaaattcgccagtcctactttgcttccgtctcataccttgatacacaggtaggcagactcttaagcgccttagatgatctgcagctcgccaatagtacgattattgcgttcacctccgaccatggctttctgatgaggaccaacacctag

SEQ ID NO: 162155 - DNA, 939 bp, Artificial Sequence
  derived and/or modified sequence
atgccaccgccaagaacaggtcggggcctgctgtggctcgggttagtgctgtctagcgtgtgtgtggccctcggtagtgagacacaggccaatagcacaaccgacgcactgaacgtgctgttgatcatcgtcgatgatctacgtccgtctttagggtgctatggcgacaagctggtacggtcccccaacatagaccaattagcctctcactcactacttttccaaaacgctttcgcccaacaggccgtgtgtgcgcctagccgagtttcctttctgaccggcagacgacctgatacaacgcggctgtacgatttcaatagctactggagggtccacgccgggaacttttccactattccacagtacttcaaagagaacgggtacgttaccatgtctgtcggcaaggtgtttcatccaggaattagcagtaaccacacggatgacagcccttattcttggagttttcctccctaccacccctcctctgagaaatacgaaaacaccaaaacatgtagaggacccgacggagagctccacgccaatctgttgtgccccgtggatgttctggacgtgcccgaaggcactctcccagataaacaatcgaccgaacaggccatacaactcctggagaaaatgaagacaagcgcctctccctttttcctggccgtgggatatcacaagccacacatcccatttcgataccctaaggagttccagaaactctatcctctggaaaacataactttggccccagaccctgaagtcccagacggtcttccaccagttgcttacaacccgtggatggatatcagacagagagaagacgttcaagccctaaacatctccgtcccctacggacctatcccagtcgatttccaggaggatcaatccagtaccgggtttcgactcaagacaagctccacacggaaatacaagtag

SEQ ID NO: 162156 - DNA, 540 bp, Artificial Sequence
  derived and/or modified sequence
atgccccccccccgcaccggccgaggtctgctttggctaggcctcgttctgtccagtgtttgtgtcgccctggggtctgagactcaagccaactctacaactgatgcccttaacgtactgctgattatcgtcgatgacttacgaccctctctgggctgttatggggataagctggtcagatcacctaatattgatcagctcgccagtcattccctgctgtttcagaatgcattcgcgcagcaggctgtctgtgccccgagtcgggtgtccttcctgaccgggagaagacccgatactacacgcctgtatgattttaactcatactggagggtgcacgcagggaacttttcaaccatacctcagtactttaaggagaatggatacgtcacaatgagcgtgggcaaggtgttccatcccggaacagctccctgtccagagtctggcttctcttggtttgtggtgagcgagtcctccattcccatcctggggatgggactgtcactgcagtcaccgctgttagccggacgcgtgccccggtag

SEQ ID NO: 162157 - DNA, 261 bp, Artificial Sequence
  derived and/or modified sequence
atgccaccaccaagaacaggacgagggctcctgtggctcgggcttgtcctgtcaagcgtgtgcgtggctctggggtccgaaacccaggctaactccactacggacgcattgaatgtgctgttgatcatcgtggacgacctgcgtccaagccttggatgttacggcgataaactggtcagatcccccaatattgatcagctggcgtcacatagtctgctgttccagaacgctttcgcccagcaggctgtttgcgcgccctag

SEQ ID NO: 162158 - DNA, 1032 bp, Artificial Sequence
  derived and/or modified sequence
atgcccccacccaggacaggccggggcctgctgtggctgggcctggtgctgagctctgtgtgtgtggccctgggcagcgagacccaggccaacagcaccacagatgccctgaatgtgctgctgatcatcgtggatgacctgcggcccagcctgggctgctacggggacaagctggtgcgcagccccaacatcgaccagctggccagccacagcctgctcttccagaatgcctttgcccagcaggccgtgtgtgcccccagccgggtgtccttcctgactggaagaagaccagacaccacccggctgtatgacttcaacagctactggagggtgcatgctggcaacttcagcaccatcccccagtacttcaaggaaaatggctacgtgaccatgtctgtgggcaaggtgttccaccctggcatcagcagcaaccacacagatgacagcccctacagctggagcttccccccctaccaccccagcagcgagaagtatgagaacaccaagacctgccggggcccagatggagagctgcacgccaacctgctgtgccctgtggatgtgctggatgtgcctgagggcaccctgcctgacaagcagagcacagagcaggccatccagctgctggagaagatgaagaccagcgccagccccttcttcctggccgtgggctaccacaagccccacatccccttccgctaccccaaggagttccagaagctgtaccccctggagaacatcaccctggccccagaccctgaggtgcctgatggcctgccccctgtggcctacaacccctggatggacatccggcagcgggaggatgtgcaggccctgaacatctctgtgccctacggccccatccctgtggacttccagaggaagatccggcagagctactttgcctctgtgtcctacctggacacccaggtgggccgcctgctgagcgccctggatgacctgcagctggccaacagcaccatcatcgccttcaccagtgaccacggcttcctgatgaggaccaacacctag

SEQ ID NO: 162159 - DNA, 939 bp, Artificial Sequence
  derived and/or modified sequence
atgcccccacccaggacaggccggggcctgctgtggctgggcctggtgctgagctctgtgtgtgtggccctgggcagcgagacccaggccaacagcaccacagatgccctgaatgtgctgctgatcatcgtggatgacctgcggcccagcctgggctgctacggggacaagctggtgcgcagccccaacatcgaccagctggccagccacagcctgctcttccagaatgcctttgcccagcaggccgtgtgtgcccccagccgggtgtccttcctgactggaagaagaccagacaccacccggctgtatgacttcaacagctactggagggtgcatgctggcaacttcagcaccatcccccagtacttcaaggaaaatggctacgtgaccatgtctgtgggcaaggtgttccaccctggcatcagcagcaaccacacagatgacagcccctacagctggagcttccccccctaccaccccagcagcgagaagtatgagaacaccaagacctgccggggcccagatggagagctgcacgccaacctgctgtgccctgtggatgtgctggatgtgcctgagggcaccctgcctgacaagcagagcacagagcaggccatccagctgctggagaagatgaagaccagcgccagccccttcttcctggccgtgggctaccacaagccccacatccccttccgctaccccaaggagttccagaagctgtaccccctggagaacatcaccctggccccagaccctgaggtgcctgatggcctgccccctgtggcctacaacccctggatggacatccggcagcgggaggatgtgcaggccctgaacatctctgtgccctacggccccatccctgtggacttccaggaggaccagagcagcacaggcttccggctgaagaccagcagcaccaggaagtacaagtag

SEQ ID NO: 162160 - DNA, 540 bp, Artificial Sequence
  derived and/or modified sequence
atgcccccacccaggacaggccggggcctgctgtggctgggcctggtgctgagctctgtgtgtgtggccctgggcagcgagacccaggccaacagcaccacagatgccctgaatgtgctgctgatcatcgtggatgacctgcggcccagcctgggctgctacggggacaagctggtgcgcagccccaacatcgaccagctggccagccacagcctgctcttccagaatgcctttgcccagcaggccgtgtgtgcccccagccgggtgtccttcctgactggaagaagaccagacaccacccggctgtatgacttcaacagctactggagggtgcatgctggcaacttcagcaccatcccccagtacttcaaggaaaatggctacgtgaccatgtctgtgggcaaggtgttccaccctggaacagccccctgcccagagagcggcttctcctggtttgtggtgtctgagagcagcatccccatcctgggcatgggcctgagcctgcagagccccctgctggccggccgggtgcccaggtag

SEQ ID NO: 162161 - DNA, 261 bp, Artificial Sequence
  derived and/or modified sequence
atgcccccacccaggacaggccggggcctgctgtggctgggcctggtgctgagctctgtgtgtgtggccctgggcagcgagacccaggccaacagcaccacagatgccctgaatgtgctgctgatcatcgtggatgacctgcggcccagcctgggctgctacggggacaagctggtgcgcagccccaacatcgaccagctggccagccacagcctgctcttccagaatgcctttgcccagcaggccgtgtgtgccccctag

SEQ ID NO: 162162 - DNA, 1032 bp, Artificial Sequence
  derived and/or modified sequence
atgccccccccccggaccggccggggcctgctgtggctgggcctggtattgtcgagcgtgtgcgtagccctcggatcagagacccaggccaacagcacaacagatgccctaaacgtcctgctgatcatcgtagatgacctccgccctagcctgggctgctatggcgataagctggttcggagccctaacatagaccagctggcatcccactccttactgtttcagaatgcatttgcccagcaggcagtttgcgccccctcaagggtttcattcttgacaggcagacgcccggataccacccgcttgtatgactttaactcttattggcgggtacacgccggcaattttagtacaatcccccagtactttaaggagaacggatacgtgacaatgtctgtggggaaggtctttcatccagggatatcctcaaatcacactgatgattcaccttactcttggagcttccctccctatcacccttcgtcagagaaatatgaaaacacaaagacttgccgtggacccgacggcgaactgcacgcgaatttattgtgtcccgttgacgtattagacgtcccagagggtaccttgccagacaagcaaagtactgagcaagccatacagttgctagaaaaaatgaaaacatctgcatcacccttttttctggccgtcggatatcacaaacctcacatcccattccgctatcccaaggagtttcagaagctttaccccctggagaatataaccctggcacctgatcccgaggtgccggacggcctccctccagtcgcatataacccctggatggatatccgacagcgtgaagatgtccaggcacttaacatctccgtaccctacggcccaattcctgtggatttccagagaaaaataagacagtcttactttgcctcagtatcttacctggatacgcaagtgggcaggttactgtccgcattggacgatttgcaactagccaattccactataattgccttcacttccgaccacggcttcctaatgcggacaaacacatag

SEQ ID NO: 162163 - DNA, 939 bp, Artificial Sequence
  derived and/or modified sequence
atgccccccccccggaccggccggggcctgctgtggctgggcctggtactgagctctgtgtgtgtggccttaggtagcgagactcaagcaaattccaccacggatgcacttaacgtactcctgattatagtagacgatctccgtccctcgctgggttgctacggggacaaactcgttcgctctcccaacattgaccaactcgctagccatagtttactatttcagaatgctttcgctcagcaggccgtctgtgcaccatctagggttagctttttaactgggaggaggcccgacacgacaagactctatgattttaatagttactggagggttcatgccggcaatttctccaccatccctcagtacttcaaggagaacggatacgtcactatgagcgtgggaaaagtcttccaccctggcatttctagtaaccacacagacgattccccttactcatggtctttccccccctaccatccctcttcagagaagtacgagaacactaaaacatgtcggggccccgacggtgagctccacgccaatttgctgtgcccggttgatgtccttgacgtccccgaaggaactttacccgataaacagtcaactgagcaggccattcagctgctggaaaaaatgaagaccagtgcttcccccttcttcctcgccgtcggataccacaagccacatataccattccgatacccgaaagaattccagaagctctatcctttggagaatattacactcgccccagacccagaggtaccagacgggcttccccccgtagcctataatccctggatggacatcaggcagcgcgaagatgttcaggcactaaacatctcagttccatacggcccaattcccgtcgactttcaggaggaccagtccagtacaggttttagattaaagaccagcagtacacgaaagtacaagtag

SEQ ID NO: 162164 - DNA, 540 bp, Artificial Sequence
  derived and/or modified sequence
atgccccccccccggaccggccggggcctgctgtggctgggcctggtcctgtcatccgtatgcgttgccctcggctcagagacacaggcaaattctaccactgatgccctaaatgtgcttcttatcatagtggacgatttgcgaccttccctcggatgctatggcgataaactcgtccgcagtcctaatattgatcagctggcctcccattcactgctcttccagaatgctttcgcacagcaggccgtatgcgctccttcccgagtgagcttcttgacaggccggcgcccggataccacacgcctttacgatttcaattcatattggcgcgtccacgctggaaatttcagtacgatccctcagtactttaaggagaacggctacgtgactatgagtgtcggaaaagtgtttcaccctggcacagccccctgtcctgaaagcggttttagttggtttgtggtgtctgagtcgagcattcctattttgggcatgggcctttctctccagtctccgcttctcgctgggcgcgtgccacgctag

SEQ ID NO: 162165 - DNA, 261 bp, Artificial Sequence
  derived and/or modified sequence
atgccccccccccggaccggccggggcctgctgtggctgggcctggtactctcatccgtatgtgtggcactagggagcgaaacccaggctaattctacgaccgacgccctcaacgtccttctgatcatcgtggacgacttgagaccaagcctgggctgttatggcgacaagctggttagaagtccaaatattgaccaattggcctcgcactcacttttgttccaaaatgcattcgcccagcaagccgtctgcgccccctag

SEQ ID NO: 162166 - DNA, 1032 bp, Artificial Sequence
  derived and/or modified sequence
atgccaccacccagaacaggaagaggccttctgtggctgggactcgtgctgtctagcgtgtgcgtcgctctcggtagcgaaacccaggctaatagcacaaccgacgctctaaacgtgttactcatcatagttgacgatttgcgcccatccttagggtgctatggcgacaagctggtacgcagccctaacatcgaccagctggcctctcattctcttctgtttcagaacgcgttcgctcagcaggcagtttgtgcgccaagcagggtaagctttctaactggacgcagaccggacacgaccagactgtatgacttcaactcttactggagggttcatgcaggcaacttttcaaccattcctcagtactttaaggagaatgggtatgtcactatgtctgttgggaaggtgtttcatccgggtatctcaagcaaccacacagatgactccccttattcgtggtcattccccccatatcacccttcaagcgaaaagtatgagaatacaaagacctgtcgaggacccgacggtgagttacacgccaacttactgtgtcctgtggatgttctggacgtgcctgagggcactcttcccgacaaacagtccaccgagcaggccatccaactgctggagaagatgaagaccagtgcgagccccttcttcctcgccgtagggtatcataagccacacattcctttcaggtatccaaaagagtttcaaaaattgtacccactggagaatattacacttgcgccagatccagaagtccctgatggcctgcctcctgtcgcgtacaatccttggatggacattagacagagagaggatgtgcaggctctgaacatctctgtgccttatgggccaataccggtggatttccagcgcaagatcagacagagctattttgccagcgtaagctacctggacacacaggttggtcgtctcctgagtgctcttgacgacctacaactggccaactcaactattatagcctttacgtccgaccacggttttctcatgcgaaccaacacgtag

SEQ ID NO: 162167 - DNA, 939 bp, Artificial Sequence
  derived and/or modified sequence
atgccgccaccacgcacaggaagaggactgctgtggttgggtcttgtgctgagtagcgtttgtgtggccctggggtcagagacacaagccaatagcactaccgatgccctcaatgtgttgctgataattgtagatgatctgagaccttctctggggtgctatggcgataagctggtgagaagccccaacattgaccagttggcatctcactcactcctgttccagaatgccttcgctcagcaggcggtgtgtgccccttctcgggtttcttttctaacagggagacggcctgacacaactagactgtatgacttcaactcctattggcgggtccatgcaggtaattttagcacaatccctcagtacttcaaggaaaacggttacgtaactatgtctgtgggtaaagtgtttcacccagggatatcgagtaaccataccgatgacagcccgtactcctggtcctttccgccataccacccaagctcagaaaaatacgaaaacactaaaacctgcagaggcccagacggagagctgcacgccaatctcctatgccctgttgacgttttagatgtcccggagggaactctgccagataagcagagtactgagcaggccatccagcttctcgagaagatgaaaacctcagcctcgcctttctttctggctgttggatatcacaaacctcatattcccttccgctacccaaaggagttccagaagctgtatccgctggaaaacattactctggcccctgatccagaggtccccgacgggctcccaccagtagcctataacccttggatggacatcaggcagagagaagacgtacaggcccttaatatctccgtcccgtacggacccattcctgtcgatttccaggaggaccagagtagcactggattcagactcaagacctcatccacaaggaaatacaagtag

SEQ ID NO: 162168 - DNA, 540 bp, Artificial Sequence
  derived and/or modified sequence
atgccacctccccgtaccggacgcggactcctatggctgggattggttctgagtagtgtctgcgtcgccctcggctcagagacccaggctaactcaaccacagacgccctaaatgttctgttgatcattgtagatgatctccggccatccctcgggtgctacggggacaagctggtgagatcaccaaatattgaccagctagcttcacacagcctcctttttcaaaacgcctttgcccagcaggccgtgtgcgctccttctagagtcagcttcctcaccggcaggcgtcctgatactacacgtttgtatgactttaacagttactggcgcgttcacgccggaaactttagcactatcccgcagtacttcaaggagaacggctatgttactatgtcagtcggcaaagtgttccatccaggtaccgccccatgccccgaatccggattttcatggttcgtcgtatctgaatcttcgatcccaatcctggggatggggttgtcattgcagagccctctgcttgcagggagggtcccacgttag

SEQ ID NO: 162169 - DNA, 261 bp, Artificial Sequence
  derived and/or modified sequence
atgccgcctccacgtaccggaagaggactgctgtggctgggcctcgtgctctctagcgtgtgcgtggctctcggtagtgagacacaagctaattcaactactgatgcattaaacgtgctgctgatcatcgtggatgacctgcgccctagtcttgggtgttatggggacaaactcgttcgctcaccaaatattgaccagttggcctctcattccctgctgttccagaacgcattcgcccagcaagcggtgtgtgctccttag

SEQ ID NO: 162170 - DNA, 1399 bp, Artificial Sequence
  derived and/or modified sequence
gccccggaggggagggacgcagggaagagtcgcacggacgcactcgcgctgcggccagcgcccgggcctgcgggcccgggcggcggctgtgttgcgcagtcttcatgggttcccgacgaggaggtctctgtggctgcggcggcggctgctaactgcgccacctgctgcagcctgtccccgccgctctgaagcggccgcgtcgaagccgaaatgccgccaccccggaccggccgaggccttctctggctgggtctggttctgagctccgtctgcgtcgccctcggatccgaaacgcaggccaactcgaccacagatgctctgaacgttcttctcatcatcgtggatgacctgcgcccctccctgggctgttatggggataagctggtgaggtccccaaatattgaccaactggcatcccacagcctcctcttccagaatgcctttgcgcagcaagcagtgtgcgccccgagccgcgtttctttcctcactggcaggagacctgacaccacccgcctgtacgacttcaactcctactggagggtgcacgctggaaacttctccaccatcccccagtacttcaaggagaatggctatgtgaccatgtcggtgggaaaagtctttcaccctgggatatcttctaaccataccgatgattctccgtatagctggtcttttccaccttatcatccttcctctgagaagtatgaaaacactaagacatgtcgagggccagatggagaactccatgccaacctgctttgccctgtggatgtgctggatgttcccgagggcaccttgcctgacaaacagagcactgagcaagccatacagttgttggaaaagatgaaaacgtcagccagtcctttcttcctggccgttgggtatcataagccacacatccccttcagataccccaaggaatttcagaagttgtatcccttggagaacatcaccctggcccccgatcccgaggtccctgatggcctaccccctgtggcctacaacccctggatggacatcaggcaacgggaagacgtccaagccttaaacatcagtgtgccgtatggtccaattcctgtggactttcagcggaaaatccgccagagctactttgcctctgtgtcatatttggatacacaggtcggccgcctcttgagtgctttggacgatcttcagctggccaacagcaccatcattgcatttacctcggatcatggtttcctcatgaggacaaatacctgattttgaataaagcagcattcagttgaaataaccctttctgtggtaattccaagtgaatatttttcttctaggtgatgagtttctacttcctctggtttttacaacaggaaatgaaatggtatctaaaataaacaagctgtggtatgatgattattca

SEQ ID NO: 162171 - DNA, 1156 bp, Artificial Sequence
  derived and/or modified sequence
agaacccgccccggaggggagggacgcagggaagagtcgcacggacgcactcgcgctgcggccagcgcccgggcctgcgggcccgggcggcggctgtgttgcgcagtcttcatgggttcccgacgaggaggtctctgtggctgcggcggcggctgctaactgcgccacctgctgcagcctgtccccgccgctctgaagcggccgcgtcgaagccgaaatgccgccaccccggaccggccgaggccttctctggctgggtctggttctgagctccgtctgcgtcgccctcggatccgaaacgcaggccaactcgaccacagatgctctgaacgttcttctcatcatcgtggatgacctgcgcccctccctgggctgttatggggataagctggtgaggtccccaaatattgaccaactggcatcccacagcctcctcttccagaatgcctttgcgcagcaagcagtgtgcgccccgagccgcgtttctttcctcactggcaggagacctgacaccacccgcctgtacgacttcaactcctactggagggtgcacgctggaaacttctccaccatcccccagtacttcaaggagaatggctatgtgaccatgtcggtgggaaaagtctttcaccctgggatatcttctaaccataccgatgattctccgtatagctggtcttttccaccttatcatccttcctctgagaagtatgaaaacactaagacatgtcgagggccagatggagaactccatgccaacctgctttgccctgtggatgtgctggatgttcccgagggcaccttgcctgacaaacagagcactgagcaagccatacagttgttggaaaagatgaaaacgtcagccagtcctttcttcctggccgttgggtatcataagccacacatccccttcagataccccaaggaatttcagaagttgtatcccttggagaacatcaccctggcccccgatcccgaggtccctgatggcctaccccctgtggcctacaacccctggatggacatcaggcaacgggaagacgtccaagccttaaacatcagtgtgccgtatggtccaattcctgtggactttcaggaggaccaaagttccacaggtttcagactgaagacttcatctaccagaaagtataagtag

SEQ ID NO: 162172 - DNA, 1213 bp, Artificial Sequence
  derived and/or modified sequence
ctgcgggcccgggcggcggctgtgttgcgcagtcttcatgggttcccgacgaggaggtctctgtggctgcggcggcggctgctaactgcgccacctgctgcagcctgtccccgccgctctgaagcggccgcgtcgaagccgaaatgccgccaccccggaccggccgaggccttctctggctgggtctggttctgagctccgtctgcgtcgccctcggatccgaaacgcaggccaactcgaccacagatgctctgaacgttcttctcatcatcgtggatgacctgcgcccctccctgggctgttatggggataagctggtgaggtccccaaatattgaccaactggcatcccacagcctcctcttccagaatgcctttgcgcagcaagcagtgtgcgccccgagccgcgtttctttcctcactggcaggagacctgacaccacccgcctgtacgacttcaactcctactggagggtgcacgctggaaacttctccaccatcccccagtacttcaaggagaatggctatgtgaccatgtcggtgggaaaagtctttcaccctggtactgctccatgtccagagtctgggttctcttggtttgtggtgtctgaatccagcattcccatcctggggatggggctgtctttgcagagccctcttctggctgggcgagtccctcgctagtcagtgcttcctttctaaaaaactgacttgtcaacccagccacgttttcacccaaagtgaaaaagggtagaaagagctttgcttcctttcagaaaccactgagggtgtgctgttgggtctttcagctcctcgggtggtagggaggacacaggctggggaggtggcagtgttgggtggagtccagctcagggccccaccctctcccctgcagggtacctgtcagtaaacctaggggtggggtgaggacacctgagggcctcccgtgtggccagcattgctgttgctgacttattgcccaatgagggggctgtgcttaggtaggggctgctatccactctggaaattaagtcagaaagatgagtgtaatctggtacccaggatctatagggtcccagagacggacattccttacctcaaatgctgcctgataaactggctctctttaatgccaatatggggatagtgaaaagcaaacaaactttaaaactttttatttatagaagtaatgcatgagtatttgagaaaaaaaa

SEQ ID NO: 162173 - DNA, 572 bp, Artificial Sequence
  derived and/or modified sequence
agcattttatcatgtttgttggcgcttgtatgtcgtcttttgagaagcgtctgttcatgtcctttgcctggtttttaatggggttgtttttagcttgttgattttagttccttgtagattctggatattagacatttttggatgcatactttccttgacctcatgaggacacccttcccaggacaggggggacatctgctgcttcccaaatgccacatttcttcaaataaaaagcagaagacagcatgcagtacataaggaactcatgtcttgcctgtccccgccgctctgaagcggccgcgtcgaagccgaaatgccgccaccccggaccggccgaggccttctctggctgggtctggttctgagctccgtctgcgtcgccctcggatccgaaacgcaggccaactcgaccacagatgctctgaacgttcttctcatcatcgtggatgacctgcgcccctccctgggctgttatggggataagctggtgaggtccccaaatattgaccaactggcatcccacagcctcctcttccagaatgcctttgcgcagcaagcagtgtgcgccccga

SEQ ID NO: 162174 - DNA, 1032 bp, Artificial Sequence
  derived and/or modified sequence
atgcctcctccacgcactggccggggtttgttgtggctcggcttggttttaagttctgtgtgcgtggctttgggctcggagactcaagcgaattcaactactgatgccctaaacgttttactcataattgtagacgatctcaggccaagtctgggatgctatggcgataagcttgtgcgcagtccaaatattgaccagttggcatcgcattccctgctttttcagaacgccttcgcacaacaagccgtatgcgctccgagccgcgtgtcttttcttaccggacggcgtccagatacaacaagactctacgactttaactcctattggagagtgcacgccggtaatttctcgacaatcccccaatatttcaaagaaaacggctatgtaactatgtcagtgggcaaggtcttccaccccggcatttcaagcaatcatacagatgattctccctactcctggtccttccccccttatcacccctctagcgagaagtacgaaaacacaaagacctgcagggggcctgacggagagctacatgccaatctcttatgccccgtagacgtcctggacgtccctgagggtacattacccgataagcaatctactgagcaagccatccaattgcttgagaagatgaagacttccgcgtcccctttctttctcgcggtggggtatcataagccacacattcctttccgttacccaaaggaatttcagaaactgtatcccctagagaacatcaccttggctcctgatccggaagttcccgacggcctgcctcccgttgcttacaatccatggatggatattcggcaaagggaggatgtgcaagccctgaatatttctgtgccttacggtccaattccagtggatttccagaggaagattcgacagtcctacttcgcctcagttagttatctggatacccaggttggacggctcctcagcgccctggacgatcttcaactggctaacagcacgatcatagcgtttacaagcgaccatggattcttaatgagaacaaatacgtag

SEQ ID NO: 162175 - DNA, 939 bp, Artificial Sequence
  derived and/or modified sequence
atgcctcctccccggaccggccggggtctgctgtggctggggttggtgctctcctctgtctgcgtagcattaggaagcgagacacaggctaattccaccaccgatgccttaaatgttctgctgattatcgtggacgatctcagaccatcactcggatgctacggcgacaaactggttcgttctcccaacattgatcaattggccagccattcactcctgttccagaatgcattcgctcagcaagctgtttgcgccccaagccgagtttcattcctgacgggaagacgtccggatacaaccaggttgtatgacttcaactcttactggcgagtacacgctggcaacttctctacaattcctcagtattttaaagagaacggttacgtcacaatgtcagtgggcaaggtgttccacccaggtatctcctctaatcacacagatgatagcccatatagttggtcttttcctccataccatccttcaagtgaaaagtatgagaacactaagacttgtcgcggccccgacggggaactgcatgcaaacctgctatgccccgtggacgtgctggacgttcccgaagggaccctccccgataagcagagcacagaacaggctatccagcttcttgaaaagatgaaaaccagcgctagcccttttttcctcgccgtcggctatcataaaccacatatcccattcagataccccaaagaatttcagaaactgtatccactcgagaatatcaccctcgccccggaccccgaggtgcctgacggtctccctcccgttgcttataacccttggatggatattagacaaagagaagatgtgcaagcattgaacatcagtgtcccttatggcccgattcccgtggatttccaagaagaccagtcctcaactggattccgcctcaaaactagttccacaaggaaatataaatag

SEQ ID NO: 162176 - DNA, 540 bp, Artificial Sequence
  derived and/or modified sequence
atgcctcccccgagaaccggacgcggactcctgtggcttgggctcgttctctcctccgtttgcgtcgcacttggctctgaaactcaggctaattctaccactgacgccctgaatgtcctgttaatcattgtggatgatctacgaccctcactcggctgctatggcgataagctggtacgctcacctaacatcgaccagttggccagccacagtctcctctttcagaatgcatttgcccagcaggctgtttgtgccccgtctcgggtgtctttcctcactggccgccggcccgacacaacacggctttacgatttcaacagctactggcgggttcatgctggaaatttttccacaataccccagtactttaaagagaatggatacgtcaccatgagcgtgggtaaggtgtttcatccaggcacagccccctgccctgaaagcggtttctcctggttcgtggtttctgagtcttcgattccaatcctgggaatgggtctctccctgcaatcccccctcctagctggtagagtgccccgctag

SEQ ID NO: 162177 - DNA, 261 bp, Artificial Sequence
  derived and/or modified sequence
atgccaccaccgagaacaggacgcggtttgctgtggcttgggttggtcctttctagtgtatgcgtcgccctgggttccgagactcaagccaactccactaccgacgcgctgaacgtactgctcattatagttgacgacctccggccttcccttggctgttacggtgacaaactcgttaggtcacccaacatcgaccaactcgcttcgcattctctgctttttcagaacgcattcgcccaacaggctgtttgcgctccttag

SEQ ID NO: 162178 - DNA, 1032 bp, Artificial Sequence
  derived and/or modified sequence
atgccaccacccagaaccggccgtggactgttatggttgggactggtgctatcatccgtgtgtgtggccctggggtctgaaacccaagcaaatagtaccactgatgctctgaacgtgctattaattatcgtagatgacctaagaccaagtctgggctgttatggggacaagctagtgcgctcaccaaacatagaccaactagcaagtcattctctgttatttcagaacgcttttgcgcagcaagcagtgtgtgcaccatcacgggtgagctttctgacaggtcgacgaccagacacaaccaggctttacgatttcaactcttattggcgtgtccacgctggcaatttcagcactattcctcaatatttcaaagaaaatggctacgtgaccatgagcgtgggcaaagtgtttcaccctggtataagctcaaaccatactgatgactccccctactcctggtccttccctccgtaccacccaagttctgaaaaatatgaaaacaccaaaacctgcaggggacccgacggtgagttgcacgcgaaccttctctgccctgtcgatgtattggacgtacccgaagggactttacccgataagcagagcaccgaacaggccatccagctccttgaaaaaatgaagaccagtgctagcccattctttctcgcagttggctatcacaagccacacatccctttccgttaccccaaagagttccagaaactgtatccgttggagaatatcactctggctcctgatccagaagtgccagacggtctccccccagtcgcatataacccttggatggacattaggcaacgtgaggacgttcaggctctcaacatcagcgtgccatacggtccgatccctgtcgacttccagcgtaagattaggcagtcctacttcgcctccgtttcatatttggacacacaggttggccgactcctcagtgctctggacgatctacaactggctaattcaacaattatcgccttcactagtgaccatggtttccttatgcgcaccaacacctag

SEQ ID NO: 162179 - DNA, 939 bp, Artificial Sequence
  derived and/or modified sequence
atgccaccgccccggactggcagagggcttctgtggctgggtctcgtgcttagttccgtgtgtgtggctctcggtagcgaaactcaggccaattccacaactgacgccctgaatgtcctgctcattatcgtcgatgatctgcgcccatcactgggatgctacggtgataaattagtgcggtccccgaacatcgaccagttagctagccactccctgctctttcagaacgcctttgcacagcaagcagtatgtgccccttcccgggtatctttcttgacgggacgccgccctgatacaactaggctatacgacttcaactcttattggcgcgttcacgccggcaacttttccactatcccacagtattttaaagaaaacggctacgtaactatgtccgtcggcaaggtgtttcaccctggaatctcaagtaatcatactgacgatagtccgtattcctggtcttttccaccctaccacccttccagtgaaaagtacgaaaacactaagacttgcagaggccctgacggagaactccacgctaacctgttatgccccgttgacgtgctcgatgtgcccgaggggacccttcctgataaacaaagcacagaacaggctatccagcttcttgaaaagatgaaaaccagcgctagcccttttttcctcgccgtcggctatcataaaccacatatcccattcagataccccaaagaatttcagaaactgtatccactcgagaatatcaccctcgccccggaccccgaggtgcctgacggtctccctcccgttgcttataacccttggatggatattagacaaagagaagatgtgcaagcattgaacatcagtgtcccttatggcccgattcccgtggatttccaagaagaccagtcctcaactggattcagactcaagacaagcagcactagaaaatacaagtag

SEQ ID NO: 162180 - DNA, 540 bp, Artificial Sequence
  derived and/or modified sequence
atgcctcccccgagaaccggacgcggactcctgtggcttgggctcgttctctcctccgtttgcgtcgcacttggctctgaaactcaggctaattctaccactgacgccctgaatgtcctgttaatcattgtggatgatctacgaccctcactcggctgctatggcgataagctggtacgctcacctaacatcgaccagttggccagccacagtctcctctttcagaatgcatttgcccagcaggctgtttgtgccccgtctcgggtgtctttcctcactggccgccggcccgacacaacaagactttacgactttaattcttactggcgggtgcacgcaggaaatttcagcactatcccacagtacttcaaagagaacggctacgtcacaatgtcagttggcaaagtgttccatcccggaactgctccgtgccccgagtccgggttttcatggtttgtggtgtcagagtcaagtatacccatcctaggcatgggtttgtccctgcaatcaccactgttggccgggcgggtgccaaggtag

SEQ ID NO: 162181 - RNA, 1032 nt, Artificial Sequence
  derived and/or modified sequence
augccuccuccacgcacuggccgggguuuguuguggcucggcuugguuuuaaguucugugugcguggcuuugggcucggagacucaagcgaauucaacuacugaugcccuaaacguuuuacucauaauuguagacgaucucaggccaagucugggaugcuauggcgauaagcuugugcgcaguccaaauauugaccaguuggcaucgcauucccugcuuuuucagaacgccuucgcacaacaagccguaugcgcuccgagccgcgugucuuuucuuaccggacggcguccagauacaacaagacucuacgacuuuaacuccuauuggagagugcacgccgguaauuucucgacaaucccccaauauuucaaagaaaacggcuauguaacuaugucagugggcaaggucuuccaccccggcauuucaagcaaucauacagaugauucucccuacuccugguccuuccccccuuaucaccccucuagcgagaaguacgaaaacacaaagaccugcagggggccugacggagagcuacaugccaaucucuuaugccccguagacguccuggacgucccugaggguacauuacccgauaagcaaucuacugagcaagccauccaauugcuugagaagaugaagacuuccgcguccccuuucuuucucgcggugggguaucauaagccacacauuccuuuccguuacccaaaggaauuucagaaacuguauccccuagagaacaucaccuuggcuccugauccggaaguucccgacggccugccucccguugcuuacaauccauggauggauauucggcaaagggaggaugugcaagcccugaauauuucugugccuuacgguccaauuccaguggauuuccagaggaagauucgacaguccuacuucgccucaguuaguuaucuggauacccagguuggacggcuccucagcgcccuggacgaucuucaacuggcuaacagcacgaucauagcguuuacaagcgaccauggauucuuaaugagaacaaauacguag

SEQ ID NO: 162182 - RNA, 939 nt, Artificial Sequence
  derived and/or modified sequence
augccuccuccccggaccggccggggucugcuguggcugggguuggugcucuccucugucugcguagcauuaggaagcgagacacaggcuaauuccaccaccgaugccuuaaauguucugcugauuaucguggacgaucucagaccaucacucggaugcuacggcgacaaacugguucguucucccaacauugaucaauuggccagccauucacuccuguuccagaaugcauucgcucagcaagcuguuugcgccccaagccgaguuucauuccugacgggaagacguccggauacaaccagguuguaugacuucaacucuuacuggcgaguacacgcuggcaacuucucuacaauuccucaguauuuuaaagagaacgguuacgucacaaugucagugggcaagguguuccacccagguaucuccucuaaucacacagaugauagcccauauaguuggucuuuuccuccauaccauccuucaagugaaaaguaugagaacacuaagacuugucgcggccccgacggggaacugcaugcaaaccugcuaugccccguggacgugcuggacguucccgaagggacccuccccgauaagcagagcacagaacaggcuauccagcuucuugaaaagaugaaaaccagcgcuagcccuuuuuuccucgccgucggcuaucauaaaccacauaucccauucagauaccccaaagaauuucagaaacuguauccacucgagaauaucacccucgccccggaccccgaggugccugacggucucccucccguugcuuauaacccuuggauggauauuagacaaagagaagaugugcaagcauugaacaucagugucccuuauggcccgauucccguggauuuccaagaagaccaguccucaacuggauuccgccucaaaacuaguuccacaaggaaauauaaauag

SEQ ID NO: 162183 - RNA, 540 nt, Artificial Sequence
  derived and/or modified sequence
augccucccccgagaaccggacgcggacuccuguggcuugggcucguucucuccuccguuugcgucgcacuuggcucugaaacucaggcuaauucuaccacugacgcccugaauguccuguuaaucauuguggaugaucuacgacccucacucggcugcuauggcgauaagcugguacgcucaccuaacaucgaccaguuggccagccacagucuccucuuucagaaugcauuugcccagcaggcuguuugugccccgucucgggugucuuuccucacuggccgccggcccgacacaacacggcuuuacgauuucaacagcuacuggcggguucaugcuggaaauuuuuccacaauaccccaguacuuuaaagagaauggauacgucaccaugagcguggguaagguguuucauccaggcacagcccccugcccugaaagcgguuucuccugguucgugguuucugagucuucgauuccaauccugggaaugggucucucccugcaauccccccuccuagcugguagagugccccgcuag

SEQ ID NO: 162184 - RNA, 261 nt, Artificial Sequence
  derived and/or modified sequence
augccaccaccgagaacaggacgcgguuugcuguggcuuggguugguccuuucuaguguaugcgucgcccuggguuccgagacucaagccaacuccacuaccgacgcgcugaacguacugcucauuauaguugacgaccuccggccuucccuuggcuguuacggugacaaacucguuaggucacccaacaucgaccaacucgcuucgcauucucugcuuuuucagaacgcauucgcccaacaggcuguuugcgcuccuuag

SEQ ID NO: 162185 - RNA, 1032 nt, Artificial Sequence
  derived and/or modified sequence
augccaccacccagaaccggccguggacuguuaugguugggacuggugcuaucauccguguguguggcccuggggucugaaacccaagcaaauaguaccacugaugcucugaacgugcuauuaauuaucguagaugaccuaagaccaagucugggcuguuauggggacaagcuagugcgcucaccaaacauagaccaacuagcaagucauucucuguuauuucagaacgcuuuugcgcagcaagcagugugugcaccaucacgggugagcuuucugacaggucgacgaccagacacaaccaggcuuuacgauuucaacucuuauuggcguguccacgcuggcaauuucagcacuauuccucaauauuucaaagaaaauggcuacgugaccaugagcgugggcaaaguguuucacccugguauaagcucaaaccauacugaugacucccccuacuccugguccuucccuccguaccacccaaguucugaaaaauaugaaaacaccaaaaccugcaggggacccgacggugaguugcacgcgaaccuucucugcccugucgauguauuggacguacccgaagggacuuuacccgauaagcagagcaccgaacaggccauccagcuccuugaaaaaaugaagaccagugcuagcccauucuuucucgcaguuggcuaucacaagccacacaucccuuuccguuaccccaaagaguuccagaaacuguauccguuggagaauaucacucuggcuccugauccagaagugccagacggucuccccccagucgcauauaacccuuggauggacauuaggcaacgugaggacguucaggcucucaacaucagcgugccauacgguccgaucccugucgacuuccagcguaagauuaggcaguccuacuucgccuccguuucauauuuggacacacagguuggccgacuccucagugcucuggacgaucuacaacuggcuaauucaacaauuaucgccuucacuagugaccaugguuuccuuaugcgcaccaacaccuag

SEQ ID NO: 162186 - RNA, 939 nt, Artificial Sequence
  derived and/or modified sequence
augccaccgccccggacuggcagagggcuucuguggcugggucucgugcuuaguuccguguguguggcucucgguagcgaaacucaggccaauuccacaacugacgcccugaauguccugcucauuaucgucgaugaucugcgcccaucacugggaugcuacggugauaaauuagugcgguccccgaacaucgaccaguuagcuagccacucccugcucuuucagaacgccuuugcacagcaagcaguaugugccccuucccggguaucuuucuugacgggacgccgcccugauacaacuaggcuauacgacuucaacucuuauuggcgcguucacgccggcaacuuuuccacuaucccacaguauuuuaaagaaaacggcuacguaacuauguccgucggcaagguguuucacccuggaaucucaaguaaucauacugacgauaguccguauuccuggucuuuuccacccuaccacccuuccagugaaaaguacgaaaacacuaagacuugcagaggcccugacggagaacuccacgcuaaccuguuaugccccguugacgugcucgaugugcccgaggggacccuuccugauaaacaaagcacagaacaggcuauccagcuucuugaaaagaugaaaaccagcgcuagcccuuuuuuccucgccgucggcuaucauaaaccacauaucccauucagauaccccaaagaauuucagaaacuguauccacucgagaauaucacccucgccccggaccccgaggugccugacggucucccucccguugcuuauaacccuuggauggauauuagacaaagagaagaugugcaagcauugaacaucagugucccuuauggcccgauucccguggauuuccaagaagaccaguccucaacuggauucagacucaagacaagcagcacuagaaaauacaaguag

SEQ ID NO: 162187 - RNA, 540 nt, Artificial Sequence
  derived and/or modified sequence
augccucccccgagaaccggacgcggacuccuguggcuugggcucguucucuccuccguuugcgucgcacuuggcucugaaacucaggcuaauucuaccacugacgcccugaauguccuguuaaucauuguggaugaucuacgacccucacucggcugcuauggcgauaagcugguacgcucaccuaacaucgaccaguuggccagccacagucuccucuuucagaaugcauuugcccagcaggcuguuugugccccgucucgggugucuuuccucacuggccgccggcccgacacaacaagacuuuacgacuuuaauucuuacuggcgggugcacgcaggaaauuucagcacuaucccacaguacuucaaagagaacggcuacgucacaaugucaguuggcaaaguguuccaucccggaacugcuccgugccccgaguccggguuuucaugguuuguggugucagagucaaguauacccauccuaggcauggguuugucccugcaaucaccacuguuggccgggcgggugccaagguag

SEQ ID NO: 162188 - protein, 601 aa, Artificial Sequence
  derived and/or modified sequence
LELYDLQILGTKPPMNSDTHRNFDPTATLRNQGDFTWNSMSGRSVRLRSVPIQSLSELERARLQEVAFYQLQQDCDLSCQITIPKDGQKRKKSLRKKLDSLGKEKNKDKEFIPQAFGMPLSQVIANDRAYKLKQDLQRDEQKDASDFVASLLPFGNKRQNKELSSSNSSLSSTSETPNESTSPNTPEPAPRARRRGAMSVDSITDLDDNQSRLLEALQLSLPAEAQSKKEKARDKKLSLNPIYRQVPRLVDSCCQHLEKHGLQTVGIFRVGSSKKRVRQLREEFDRGIDVSLEEEHSVHDVAALLKEFLRDMPDPLLTRELYTAFINTLLLEPEEQLGTLQLLIYLLPPCNCDTLHRLLQFLSIVARHADDNISKDGQEVTGNKMTSLNLATIFGPNLLHKQKSSDKEFSVQSSARAEESTAIIAVVQKMIENYEALFMVPPDLQNEVLISLLETDPDVVDYLLRRKASQSSSPDMLQSEVSFSVGGRHSSTDSNKASSGDISPYDNNSPVLSERSLLAMQEDAAPGGSEKLYRVPGQFMLVGHLSSSKSRESSPGPRLGKGNWSLASRRWPKQATLLLLHVAWCGALRTFSSSLPYLMFL

SEQ ID NO: 162189 - protein, 765 aa, Artificial Sequence
  derived and/or modified sequence
MSAQSLLHSVFSCSSPASSSAASAKGFSKRKLRQTRSLDPALIGGCGSDEAGAEGSARGATAGRLYSPSLPAESLGPRLASSSRGPPPRATRLPPPGPLCSSFSTPSTPQEKSPSGSFHFDYEVPLGRGGLKKSMAWDLPSVLAGPASSRSASSILCSSGGGPNGIFASPRRWLQQRKFQSPPDSRGHPYVVWKSEGDFTWNSMSGRSVRLRSVPIQSLSELERARLQEVAFYQLQQDCDLSCQITIPKDGQKRKKSLRKKLDSLGKEKNKDKEFIPQAFGMPLSQVIANDRAYKLKQDLQRDEQKDASDFVASLLPFGNKRQNKELSSSNSSLSSTSETPNESTSPNTPEPAPRARRRGAMSVDSITDLDDNQSRLLEALQLSLPAEAQSKKEKARDKKLSLNPIYRQVPRLVDSCCQHLEKHGLQTVGIFRVGSSKKRVRQLREEFDRGIDVSLEEEHSVHDVAALLKEFLRDMPDPLLTRELYTAFINTLLLEPEEQLGTLQLLIYLLPPCNCDTLHRLLQFLSIVARHADDNISKDGQEVTGNKMTSLNLATIFGPNLLHKQKSSDKEFSVQSSARAEESTAIIAVVQKMIENYEALFMVPPDLQNEVLISLLETDPDVVDYLLRRKASQSSSPDMLQSEVSFSVGGRHSSTDSNKASSGDISPYDNNSPVLSERSLLAMQEDAAPGGSEKLYRVPGQFMLVGHLSSSKSRESSPGPRLGKGNWSLASRRWPKQATLLLLHVAWCGALRTFSSSLPYLMFL

SEQ ID NO: 162190 - DNA, 1806 bp, Artificial Sequence
  derived and/or modified sequence
ctggagctctacgatcttcaaatccttggtacaaagcctcctatgaattctgacacccaccgcaacttcgatcctactgcgactctcaggaatcaaggtgactttacatggaactcaatgagtggcaggtcagttcgattgcggtccgtccctatacaaagcttatctgagcttgagcgggcgcggttacaggaagtagccttttatcagcttcagcaagactgcgatctctcttgtcagatcactatacccaaagatggacagaaaaggaagaaaagtctacgcaaaaagctggactccctggggaaggagaaaaataaagataaggaattcattccgcaagcgtttggaatgccgctgtcgcaggtgattgccaacgatcgggcgtacaaactcaagcaggatctccaacgggacgaacagaaggatgcctccgacttcgtcgcatctctcctcccatttggcaataagcgacaaaataaagagctgtcgtccagtaactcttcgctgtcatctacatcagaaaccccaaacgaatcgaccagcccgaacacaccggaacccgctcctcgtgccagacgtagaggcgcaatgagcgtggacagcattaccgatcttgatgataatcagagtaggctgcttgaggccttgcagctctccctgcccgcagaagcccagtcgaaaaaagagaaggcacgcgataagaagctgtcactgaatccaatctacagacaggtgccaaggctggtagacagttgttgccaacacctcgagaaacacggtttgcagacggtcggtatctttcgcgtgggcagctctaaaaaaagggtacgccaactccgcgaggagttcgaccggggcatcgatgtgagcttggaagaagagcactcagtccatgatgtggctgccttactaaaggagttcctgagggacatgcccgatcctctgcttacccgggaactatataccgctttcattaacacacttcttctggagccagaagagcagctcggaaccctgcagctactcatttacctgctgcctccctgcaattgtgatactctccataggcttttgcagtttctctccatcgtggcccgacacgcagatgataatattagtaaagatggacaggaggtaaccggaaacaaaatgacttctttgaatttggcgaccatttttggcccaaatttgctgcacaagcaaaagagctccgataaagaattttcagtacagtcctctgctagggctgaggagagtacagctattatcgcagtagtacagaagatgatcgaaaattatgaggcgctgtttatggttcctcccgatctgcagaatgaggtattgataagccttctggaaacagaccctgacgttgtggactacctgctacgtcggaaggcctcccaaagttcttctcccgatatgctccagagtgaggtatctttcagtgtgggagggaggcactcatctacagatagcaataaggctagttccggggacatctccccgtacgacaacaactcacctgtactctcagaaaggtcactgctggctatgcaggaggacgctgcccccggggggtctgagaagctttaccgagtccccgggcagtttatgctagtgggccacctgtcctcctctaagtctagggaaagctctcccggtcccagactgggaaaaggaaattggagtcttgcttcaaggcgatggcccaagcaggctactctactgctgttgcacgtggcatggtgcggagctctcaggactttttctagcagcctcccgtatctcatgtttctgtag

SEQ ID NO: 162191 - DNA, 2298 bp, Artificial Sequence
  derived and/or modified sequence
atgtcagctcaatctctgctgcactctgtcttttcctgtagttccccggcctccagttctgcagcatctgccaaaggttttagcaagagaaagctacggcagactcggagtttagacccagccctgataggaggatgtgggtctgatgaggccggggctgaggggtccgcccgaggggccaccgctggccgactttactcgcctagcctcccagctgagtcccttggcccaaggttagcttcttctagcaggggaccccctccacgtgccacgaggctacccccacctggaccattgtgctcctcttttagtacgccgtccactcctcaggaaaagtccccctccggttcatttcattttgactacgaagtaccattaggcaggggtgggctgaaaaagtccatggcatgggatcttcctagcgtgttagctggccctgcaagctcgcgttcagcgtccagcatcttgtgttccagcggcggagggccaaatggtatttttgcgagcccccgtagatggctgcagcagagaaagtttcagtctccacccgattccagaggccatccatacgtggtctggaagtccgaaggcgattttacttggaatagtatgagcggacgaagtgttcgtttgcggtcagtccctatacagagtctgtccgagttagagagagctcggctacaggaggtcgcattttaccagctgcaacaggattgcgacctcagctgtcagatcacgattccgaaagacgggcagaagcgtaaaaagtctcttaggaagaaactggactccctcggcaaagagaaaaataaggataaggaatttattcctcaggcctttggaatgcctctttctcaagttatagccaacgaccgcgcgtataaattgaagcaggatttacagcgagatgaacaaaaagatgcctccgactttgttgctagtctgttgccctttggtaataaacggcagaacaaagagttgtcttcgtcaaacagttccctttctagcaccagcgagacacccaatgagtccacatcccccaacacacctgagccggcacctagggcccgtcggcggggggctatgagcgttgactcaattactgatcttgacgataaccaaagccggttgcttgaggccctgcagctgtccctgccagccgaggcccagtcaaaaaaggaaaaagcgagagataagaagctctccttaaaccccatttatcgccaagttcccagactggtggattcatgctgtcagcaccttgaaaaacacggccttcagactgtcggtatcttcagggtgggatcttctaaaaagagggtgaggcagcttagagaggaattcgatcggggtatagatgtgtccctggaggaagaacactccgtacacgacgtggccgcattgttaaaggaattcctaagggatatgccagacccactcctaacgcgcgagctctatactgcatttatcaacactctcttgcttgaacctgaagaacagctgggaaccctgcagctgctgatttatctcctgccaccttgcaactgcgacacacttcacaggctcctgcagttcctctccattgttgctcgccacgcagacgacaatattagcaaagacggtcaagaggttaccggtaacaaaatgacctctctcaacctggccacaatattcgggccaaacctgttgcataagcagaagagtagtgacaaagagttctctgtccagtcctccgccagggctgaggaatcgacagcgatcattgcagtcgtgcagaagatgatagagaactacgaagctctgtttatggtgcctccagatctgcagaacgaggttcttatatccctgttagagacagatcccgatgtggtggattacctgcttaggcgcaaggccagccaatcaagctctccagatatgctgcagagcgaggtgagcttctcggtgggtggaagacactcatcaaccgattctaataaggcatccagtggcgatattagtccttacgacaataactcacctgtgctttcagagcggtcccttctggctatgcaggaggacgctgcgcccgggggatctgaaaagctgtatcgggtgcccggacagttcatgctagtgggacacctgtcctcaagcaagtccagggaatccagccctggaccgagactgggaaaggggaactggtccctcgcatctcgccgctggcctaaacaggcaacactgctgctcctccacgtagcgtggtgcggagctctaaggaccttctcctcttcattaccctatctgatgtttctgtag

SEQ ID NO: 162192 - DNA, 2073 bp, Artificial Sequence
  derived and/or modified sequence
atgagtgcccaaagcctgctccactcagtatttagctgcagttcccccgcttccagttctgccgcttctgcaaagggtttttccaaaagaaagcttagacagaccaggtcactggacccagccttgatcggtggctgtggatccgatgaggcaggtgcggaaggctctgccaggggagcgacagcaggtcggctctacagtccatccttgccggcagagtctctcgggcctagactcgcttcttccagtcgaggcccgccacctcgggcaaccagattgcctccacctggacccctctgttcgtcgtttagtactccctctacacctcaggaaaagagcccgagtggctcatttcacttcgactatgaagtccctctgggccgcggcggcctcaagaaatctatggcctgggacctgccgtccgtccttgcgggtcctgcctcctcgagatccgccagctctatcctgtgcagctcaggaggcggacctaacggaatttttgcctccccacggagatggctgcaacagcgtaaattccagagtccccccgattctcggggacatccatacgtcgtttggaagtccgaactggagttgtatgacttgcaaatcctaggaaccaagcctcccatgaatagtgatacgcaccggaatttcgatccaactgccaccctccgaaatcagggggacttcacctggaatagcatgtccggaaggagtgttcgactgcgcagcgtcccaatccaaagtttgagcgaattagaaagagctcgcctccaggaggtggctttctatcaactccagcaagattgcgacctcagctgccagataaccattccaaaggatgggcagaagcgcaagaagtctctccgtaagaaactcgattctttgggcaaagaaaaaaataaggacaaagaatttattccccaggccttcggcatgcccctttcccaggtgatagccaacgatcgggcctacaagttgaagcaggatttacagcgtgacgagcagaaggacgcctcggatttcgttgcatcactccttccattcggtaataagaggcagaacaaagagctctcgtcatcaaatagctccctgtcttctaccagcgagaccccaaacgagtccacctctccgaacacacctgagccggctcccagagcccgccgcagaggtgccatgtccgtcgacagcatcacagatttggacgacaaccaatcgaggctgcttgaggctttgcaactgagccttccagccgaggcacagtccaagaaggaaaaagccagggataagaagctctctctgaacccgatctaccgccaggttccacgtttggtggatagctgctgccagcaccttgagaagcatggtctgcaaacggtggggattttccgggtaggctccagcaaaaagagagtgcgacagctccgggaggaattcgataggggtatcgatgtttccctggaggaggagcacagcgtgcacgatgttgccgcgctactgaaggaatttctacgtgacatgcctgatcccctacttactcgtgaactgtacacagccttcatcaacacactcctgcttgagccagaggagcagttagggactctgcagctccttatctacctgcttcctccgtgtaattgcgacaccctccaccgactcctgcagttcctgagcatagtcgctcggcatgccgatgataatatcagtaaagacggacaggaggttacaggcaacaagatgacctcactcaatctggctactatattcggtccgaatctgctccacaagcagaaatcttcggataaagagttcagtgttcaatctagcgcacgggccgaggaaagtactgccatcattgccgtggttcagaagatgatcgaaaactacgaagctttattcatggtaccccccgatctccagaatgaggtgctcattagtctgctggaaactgatccggatgttgttgattatctcttgaggcggaaggctagccaatcatctaccagtagcgtgttgcccgccgcagtgcaggcctgcccgcagtatccagccagcatgttcaccccgtag

SEQ ID NO: 162193 - DNA, 1404 bp, Artificial Sequence
  derived and/or modified sequence
atgtaccgaattttcggggacttcacatggaactccatgagcggcagaagtgtgaggcttagaagcgtacccatacagtctcttagcgagctggagcgcgccagactgcaggaggtggctttctatcaactgcagcaggactgtgatttgtcttgtcagatcacaatcccaaaggatggtcaaaagaggaaaaagagtctcaggaaaaaattggacagtttaggcaaggagaagaacaaggataaagagttcataccacaggcgttcgggatgcctcttagccaggtcatagctaacgatagggcctataaactgaaacaggacctgcagagggacgagcaaaaagacgcatctgactttgtggcttccctgctcccctttgggaacaagcgccaaaacaaggaattgagcagttctaatagtagcttatctagcaccagcgagacacccaatgaatctacttctcccaatactcccgaacctgctccacgtgccagaagacggggggcgatgtcagtagattccattacagatcttgacgataaccagagtcgtctgttggaggcactgcaattatctttaccagcagaagctcaatctaaaaaggaaaaggcaagagataaaaagctcagcctcaatccgatctatagacaggtgccgaggctggtggattcatgctgccaacacttggagaaacatggattacagaccgtcggaatttttcgcgtgggttcatcgaaaaagagagtaagacaactgcgggaggagtttgaccgcggaatcgacgtcagtctggaggaggagcacagtgtccatgatgtcgccgctcttctcaaagagtttctccgtgatatgcccgacccactcctcacccgtgaactgtacaccgctttcatcaacacccttcttttggagcctgaggaacagctaggcacactgcagctgcttatctacttactgccgccgtgtaattgtgataccctccatagactgttgcagttccttagcattgtcgccaggcacgctgacgataatatctctaaggacggccaggaagtgaccgggaataagatgaccagcctgaatcttgccaccatctttggccccaatttgttgcacaaacaaaaaagttctgacaaggaattttcagtgcagagctctgctagggctgaggaaagtacggccatcattgcagtcgtgcagaagatgattgaaaactatgaggccctatttatggttcctccggatttacagaacgaggtgttaattagcctgcttgagaccgaccctgatgtcgtagattacctgcttcgcaggaaagcttcacagtcaagtacgtcaagtgtgctgccagcagctgttcaggcctgtccccaatacccagccagcatgttcacaccctag

SEQ ID NO: 162194 - DNA, 1806 bp, Artificial Sequence
  derived and/or modified sequence
ctggagctgtatgacctgcagatcctgggcaccaagccacccatgaacagcgacacccacaggaactttgaccccacagccaccctgaggaaccagggcgacttcacctggaacagcatgagcggccgctctgtgcggctgcggtctgtgcccatccagagcctgtctgagctggagcgggcccggctgcaggaggtggccttctaccagctgcagcaggactgtgacctgagctgccagatcaccatccccaaggatggccagaagaggaagaagagcctgaggaagaagctggacagcctgggcaaggagaagaacaaggacaaggagttcatcccccaggccttcggcatgcccctgagccaggtgattgccaatgaccgggcctacaagctgaagcaggacctgcagagagatgagcagaaggatgccagtgactttgtggccagcctgctgcccttcggcaacaagaggcagaacaaggagctgagcagcagcaacagcagcctgagcagcaccagcgagaccccaaatgaaagcaccagccccaacaccccagagcccgccccccgggcccggcggcggggggccatgtctgtggacagcatcacagacctggatgacaaccagagccggctgctggaggccctgcagctgagcctgcctgctgaggcccagagcaagaaggagaaggcccgggacaagaagctgagcctgaaccccatctaccggcaggtgccccggctggtggacagctgctgccagcacctggagaagcacggcctgcagacagtgggcatcttccgggtgggcagcagcaagaagagggtgcggcagctgcgggaggagtttgaccggggcattgatgtgtccctggaggaggagcacagcgtgcatgatgtggccgccctgctgaaggagttcctgcgggacatgccagaccccctgctgacccgggagctgtacacagccttcatcaacaccctgctgctggagcctgaggagcagctgggcaccctgcagctgctgatctacctgctgcccccctgcaactgtgacaccctgcaccggctgctgcagttcctgagcatcgtggcccggcatgctgatgacaacatcagcaaggatggccaggaggtgactggaaacaagatgaccagcctgaacctggccaccatcttcggccccaacctgctgcacaagcagaagagcagtgacaaggagttctctgtgcagagcagcgcccgggcagaggagagcacagccatcatcgctgtggtgcagaagatgattgagaactatgaggccctcttcatggtgcccccagacctgcagaatgaggtgctgatcagcctgctggagacagatcctgatgtggtggactacctgctgcggaggaaggccagccagagcagcagcccagacatgctgcagagcgaggtgtccttctctgtgggcggccgccacagcagcacagacagcaacaaggccagcagcggggacatcagcccctatgacaacaacagccctgtgctgtctgagaggagcctgctggccatgcaggaggatgctgcccctgggggcagcgagaagctgtacagagtgcccggccagttcatgctggtgggccacctgagcagcagcaagagccgggagagcagccctggcccccggctgggcaaaggaaactggagcctggccagccgccgctggcccaagcaggccaccctgctgctgctgcacgtggcctggtgtggggccctgcggaccttcagcagcagcctgccctacctgatgttcctgtag

SEQ ID NO: 162195 - DNA, 2298 bp, Artificial Sequence
  derived and/or modified sequence
atgtctgcccagagcctgctgcacagcgtcttcagctgcagcagccctgccagcagcagcgctgccagcgccaagggcttcagcaagaggaagctgcggcagaccaggagcctggaccctgccctgattggaggctgcggcagtgatgaagctggagctgagggcagcgcccggggggccacagctggccgcctgtacagccccagcctgcctgctgagagcctgggcccccggctggccagcagcagccggggccccccaccccgggccacccggctgcccccacctggccccctgtgcagcagcttcagcacccccagcaccccccaggagaagagccccagcggcagcttccactttgattatgaggtgcccctgggccggggcggcctgaagaagtccatggcctgggacctgcccagcgtgctggccggccctgccagcagccgcagcgccagcagcatcctgtgcagcagcggcggcggccccaacggcatctttgccagcccccggcgctggctgcagcagaggaagttccagagccccccagacagccggggccacccctacgtggtgtggaagtctgagggggacttcacctggaacagcatgagcggccgctctgtgcggctgcggtctgtgcccatccagagcctgtctgagctggagcgggcccggctgcaggaggtggccttctaccagctgcagcaggactgtgacctgagctgccagatcaccatccccaaggatggccagaagaggaagaagagcctgaggaagaagctggacagcctgggcaaggagaagaacaaggacaaggagttcatcccccaggccttcggcatgcccctgagccaggtgattgccaatgaccgggcctacaagctgaagcaggacctgcagagagatgagcagaaggatgccagtgactttgtggccagcctgctgcccttcggcaacaagaggcagaacaaggagctgagcagcagcaacagcagcctgagcagcaccagcgagaccccaaatgaaagcaccagccccaacaccccagagcccgccccccgggcccggcggcggggggccatgtctgtggacagcatcacagacctggatgacaaccagagccggctgctggaggccctgcagctgagcctgcctgctgaggcccagagcaagaaggagaaggcccgggacaagaagctgagcctgaaccccatctaccggcaggtgccccggctggtggacagctgctgccagcacctggagaagcacggcctgcagacagtgggcatcttccgggtgggcagcagcaagaagagggtgcggcagctgcgggaggagtttgaccggggcattgatgtgtccctggaggaggagcacagcgtgcatgatgtggccgccctgctgaaggagttcctgcgggacatgccagaccccctgctgacccgggagctgtacacagccttcatcaacaccctgctgctggagcctgaggagcagctgggcaccctgcagctgctgatctacctgctgcccccctgcaactgtgacaccctgcaccggctgctgcagttcctgagcatcgtggcccggcatgctgatgacaacatcagcaaggatggccaggaggtgactggaaacaagatgaccagcctgaacctggccaccatcttcggccccaacctgctgcacaagcagaagagcagtgacaaggagttctctgtgcagagcagcgcccgggcagaggagagcacagccatcatcgctgtggtgcagaagatgattgagaactatgaggccctcttcatggtgcccccagacctgcagaatgaggtgctgatcagcctgctggagacagatcctgatgtggtggactacctgctgcggaggaaggccagccagagcagcagcccagacatgctgcagagcgaggtgtccttctctgtgggcggccgccacagcagcacagacagcaacaaggccagcagcggggacatcagcccctatgacaacaacagccctgtgctgtctgagaggagcctgctggccatgcaggaggatgctgcccctgggggcagcgagaagctgtacagagtgcccggccagttcatgctggtgggccacctgagcagcagcaagagccgggagagcagccctggcccccggctgggcaaaggaaactggagcctggccagccgccgctggcccaagcaggccaccctgctgctgctgcacgtggcctggtgtggggccctgcggaccttcagcagcagcctgccctacctgatgttcctgtag

SEQ ID NO: 162196 - DNA, 2073 bp, Artificial Sequence
  derived and/or modified sequence
atgtctgcccagagcctgctgcacagcgtcttcagctgcagcagccctgccagcagcagcgctgccagcgccaagggcttcagcaagaggaagctgcggcagaccaggagcctggaccctgccctgattggaggctgcggcagtgatgaagctggagctgagggcagcgcccggggggccacagctggccgcctgtacagccccagcctgcctgctgagagcctgggcccccggctggccagcagcagccggggccccccaccccgggccacccggctgcccccacctggccccctgtgcagcagcttcagcacccccagcaccccccaggagaagagccccagcggcagcttccactttgattatgaggtgcccctgggccggggcggcctgaagaagtccatggcctgggacctgcccagcgtgctggccggccctgccagcagccgcagcgccagcagcatcctgtgcagcagcggcggcggccccaacggcatctttgccagcccccggcgctggctgcagcagaggaagttccagagccccccagacagccggggccacccctacgtggtgtggaagtctgagctggagctgtatgacctgcagatcctgggcaccaagccacccatgaacagcgacacccacaggaactttgaccccacagccaccctgaggaaccagggcgacttcacctggaacagcatgagcggccgctctgtgcggctgcggtctgtgcccatccagagcctgtctgagctggagcgggcccggctgcaggaggtggccttctaccagctgcagcaggactgtgacctgagctgccagatcaccatccccaaggatggccagaagaggaagaagagcctgaggaagaagctggacagcctgggcaaggagaagaacaaggacaaggagttcatcccccaggccttcggcatgcccctgagccaggtgattgccaatgaccgggcctacaagctgaagcaggacctgcagagagatgagcagaaggatgccagtgactttgtggccagcctgctgcccttcggcaacaagaggcagaacaaggagctgagcagcagcaacagcagcctgagcagcaccagcgagaccccaaatgaaagcaccagccccaacaccccagagcccgccccccgggcccggcggcggggggccatgtctgtggacagcatcacagacctggatgacaaccagagccggctgctggaggccctgcagctgagcctgcctgctgaggcccagagcaagaaggagaaggcccgggacaagaagctgagcctgaaccccatctaccggcaggtgccccggctggtggacagctgctgccagcacctggagaagcacggcctgcagacagtgggcatcttccgggtgggcagcagcaagaagagggtgcggcagctgcgggaggagtttgaccggggcattgatgtgtccctggaggaggagcacagcgtgcatgatgtggccgccctgctgaaggagttcctgcgggacatgccagaccccctgctgacccgggagctgtacacagccttcatcaacaccctgctgctggagcctgaggagcagctgggcaccctgcagctgctgatctacctgctgcccccctgcaactgtgacaccctgcaccggctgctgcagttcctgagcatcgtggcccggcatgctgatgacaacatcagcaaggatggccaggaggtgactggaaacaagatgaccagcctgaacctggccaccatcttcggccccaacctgctgcacaagcagaagagcagtgacaaggagttctctgtgcagagcagcgcccgggcagaggagagcacagccatcatcgctgtggtgcagaagatgattgagaactatgaggccctcttcatggtgcccccagacctgcagaatgaggtgctgatcagcctgctggagacagatcctgatgtggtggactacctgctgcggaggaaggccagccagagcagcaccagctctgtgctgcctgctgctgtgcaggcctgcccccagtacccagcctccatgttcaccccctag

SEQ ID NO: 162197 - DNA, 1404 bp, Artificial Sequence
  derived and/or modified sequence
atgtaccgcatctttggagacttcacctggaacagcatgagcggccgctctgtgcggctgcggtctgtgcccatccagagcctgtctgagctggagcgggcccggctgcaggaggtggccttctaccagctgcagcaggactgtgacctgagctgccagatcaccatccccaaggatggccagaagaggaagaagagcctgaggaagaagctggacagcctgggcaaggagaagaacaaggacaaggagttcatcccccaggccttcggcatgcccctgagccaggtgattgccaatgaccgggcctacaagctgaagcaggacctgcagagagatgagcagaaggatgccagtgactttgtggccagcctgctgccctttggaaacaagaggcagaacaaggagctgagcagcagcaacagcagcctgagcagcaccagcgagaccccaaatgaaagcaccagccccaacaccccagagcccgccccccgggccaggagaagaggagccatgtctgtggacagcatcacagacctggatgacaaccagagccggctgctggaggccctgcagctgagcctgcctgctgaggcccagagcaagaaggagaaggcccgggacaagaagctgagcctgaaccccatctaccggcaggtgccccggctggtggacagctgctgccagcacctggagaagcacggcctgcagacagtgggcatcttccgggtgggcagcagcaagaagagggtgcggcagctgcgggaggagtttgaccggggcattgatgtgtccctggaggaggagcacagcgtgcatgatgtggccgccctgctgaaggagttcctgcgggacatgccagaccccctgctgacccgggagctgtacacagccttcatcaacaccctgctgctggagcctgaggagcagctgggcaccctgcagctgctgatctacctgctgcccccctgcaactgtgacaccctgcaccggctgctgcagttcctgagcatcgtggcccggcatgctgatgacaacatcagcaaggatggccaggaggtgacaggcaacaagatgaccagcctgaacctggccaccatcttcggccccaacctgctgcacaagcagaagagcagtgacaaggagttctctgtgcagagcagcgcccgggcagaggagagcacagccatcatcgctgtggtgcagaagatgattgaaaattatgaggccctcttcatggtgcccccagacctgcagaatgaggtgctgatcagcctgctggagacagatcctgatgtggtggactacctgctgcggaggaaggccagccagagcagcaccagctctgtgctgcctgctgctgtgcaggcctgcccccagtacccagcctccatgttcaccccctag

SEQ ID NO: 162198 - DNA, 1806 bp, Artificial Sequence
  derived and/or modified sequence
ctggagctgtacgacctgcagatcctgggcaccaagccccccatgaacagcgatacgcacagaaacttcgaccctacagcaacactgcgtaatcagggggattttacatggaatagcatgtcgggtagatctgtgagactcaggtcagtgccaattcagtccctgtccgagctcgagcgagcaagactacaggaggtcgcgttctatcagctccagcaggactgcgacttatcgtgtcagataaccatccctaaggacggtcagaaacgaaaaaagtccctacgtaaaaagcttgacagtctgggcaaagagaaaaacaaggacaaggaattcatccctcaggctttcgggatgcccctgtcccaggtgatcgcgaatgaccgcgcctataagttgaaacaggatcttcagcgcgacgagcagaaggatgcttctgacttcgtggcatcactgttaccctttgggaacaagcggcagaacaaagagttatctagtagtaatagctctctgtctagcacttccgagacacccaatgagtcaacctcccccaatacacctgaaccagcacccagagcaagacggcggggggccatgtctgtggacagcattacagatctggacgacaaccaatcacgcctgttggaggccttgcagctgagcctgccggccgaagcccagtctaaaaaggagaaagcacgggacaagaaactatccctcaatccgatttatcgccaggtgcctcgcttggttgacagctgttgtcagcatctcgagaagcatgggctgcagacagtcggtatatttagggtgggtagttccaaaaaaagggtgcgccagctgagagaggagtttgatcgcggaatcgatgtgtccctcgaggaggagcatagtgtccacgacgtggccgccctgttaaaagagttcttgagagatatgccagaccctctccttacgagagagctctatacagctttcatcaacactctcttgctggagcctgaggaacagttgggcacactccaactcctgatatacctcctacctccttgcaattgtgacacactccacaggctgctgcaattcctcagcattgttgcacgacacgcggatgataacatctctaaagacggccaggaagtcaccggtaacaaaatgacatcgctcaacctagcgacaatattcggccccaacctgctgcacaagcagaagtcctccgacaaggaattctccgttcagtcttcggctagggccgaggaaagcacggccattattgctgtcgttcaaaagatgattgagaactatgaggccctctttatggtgccccccgacttgcaaaatgaagtgctcataagcctgctggagacagacccagatgtggtggattacctattgcgacggaaggcgagccagagcagctctcccgatatgctccagagcgaggtcagtttctccgtgggaggccgtcacagctctacagacagtaacaaagccagctccggcgatatctccccttacgacaacaacagtcccgtgttgtctgagcggagcctcctcgccatgcaggaggatgctgctcctggtgggtctgagaagttgtatagagtgccaggccagttcatgctagtggggcacttaagcagcagcaaatctcgggaatcaagccctggcccgcggttggggaaaggcaactggtccttggcaagccgacggtggcctaaacaagcaaccctcctcctgctccacgtggcttggtgcggcgctctcagaacgttttcgagcagtctcccatacctcatgttcctctag

SEQ ID NO: 162199 - DNA, 2298 bp, Artificial Sequence
  derived and/or modified sequence
atgagcgcccagagcctgctgcacagcgtgttcagctgcagcagccctgcctcatcctcagctgctagtgccaagggattctctaaaaggaagctccgccaaaccagatcccttgacccagccctcataggcggctgcggctccgatgaggccggggctgaaggatccgcccgaggcgcaacagccggacgcctttacagtcctagtctgcctgccgagagtctggggccacgcctggcatcttccagccgcgggcctcccccccgtgccaccagacttcccccccctggccccctttgctcgtccttcagcaccccttcgactccccaggagaaatccccttctggcagctttcattttgactatgaagtccctctgggaagaggcgggctcaaaaagtccatggcatgggacctgccatcagtcctggcgggcccagccagtagccgttctgcttcaagcatcctgtgttcatccggtggaggtccgaacggcattttcgcctcaccgcggaggtggctgcagcagcgcaagtttcagagcccgccagactcccgcgggcacccttatgtggtgtggaaaagcgaaggggacttcacatggaactctatgagcggcagatcagttaggctcagatccgtgcccatccagtccttgagcgaactggagagagcgaggctgcaggaggtcgctttttaccagctccaacaggactgcgacctatcttgccagattacaattccaaaggacgggcagaaaagaaaaaagagtctcagaaagaagctggactctttaggaaaggagaagaataaagataaagaattcattccccaggcatttggcatgcctctgtcgcaagtgatcgcgaatgaccgggcctacaagctcaaacaggaccttcagcgggatgagcagaaggacgccagcgactttgtagcgagtctcctgccatttgggaacaaacgccagaacaaagaactgagctcatcaaactcctctctgtcctctacctccgaaaccccgaatgagtcgacttcccccaatactccggagccagcacctcgcgcgaggcgcagaggcgctatgagcgtggatagtatcactgatctggacgacaaccagagccggctcctcgaggccttacaattatctctccccgctgaagcccagtcgaaaaaagaaaaggctagagataaaaagctctcattgaatcctatttatagacaagtgccccgtttagttgacagttgttgccaacacctcgagaagcacgggctgcagactgtgggaattttccgggtgggatcttcaaagaaacgggtgaggcaactgcgcgaagaattcgacaggggcattgatgtatcactggaagaagagcattccgtgcatgatgtcgccgccctgctgaaagaatttctcagggatatgccggatccattattgacgagagaactatacaccgcattcatcaatacacttctcctcgagcccgaggaacagcttgggacacttcagctgctgatttacctgttgcctccatgcaactgtgacactctgcaccgtctcctgcagttcctgagtattgtcgccaggcacgccgatgataacatctccaaggatggacaggaggtaacagggaacaagatgacctccctcaaccttgccactatctttggcccgaacctgttgcacaagcagaagtccagcgacaaagagttctctgtgcagtccagcgccagagccgaagaatccaccgccatcatagctgtggtgcagaagatgatagagaattacgaggcccttttcatggtccctcccgacttacaaaatgaagtgctcatttcacttctggagacagaccccgacgtggtggattatcttcttagacggaaagcttcccaatcttccagccctgacatgttgcagtccgaagtatcattctctgtggggggcagacactcatcaactgatagcaacaaggcttctagcggtgatatctcaccttacgataataacagtcctgtgttgtcagagcggagtttacttgcaatgcaggaggatgcagcacctggtggcagtgagaagctctaccgggtgccaggacaattcatgttagtgggacacctgtcatcaagcaagtctcgtgaaagctctccgggcccaaggcttggaaagggcaattggagtcttgcaagtagacgctggccgaagcaggccaccctgctgctgctgcatgttgcctggtgcggagcgttgcgcaccttctcctcatcattgccctatctgatgttcttatag

SEQ ID NO: 162200 - DNA, 2073 bp, Artificial Sequence
  derived and/or modified sequence
atgagcgcccagagcctgctgcacagcgtgttcagctgcagcagccctgcctcctcctccgccgccagcgccaaaggattctcaaagcgtaagctgcggcagacacgctccctggaccctgctcttatcggcgggtgtggctcggatgaagctggcgcagagggttcagcccgaggggctactgctggtagactatactctccgtcactgcccgcggaaagcctggggccaagacttgcttcctcttcaagaggtcccccccccagagccactcgactgccacccccgggaccgctatgctcctcattctccactccttccacaccccaagaaaagtctcctagtggatcctttcatttcgattacgaggtccccttaggaaggggaggcctgaagaagtctatggcgtgggatcttccatctgtgttagccggaccagcgagctctaggagcgccagctccatcctatgcagctccggcggaggccccaatggtattttcgcatctccccggcgctggctgcagcagaggaagtttcaatcccctcccgacagcagagggcatccttatgttgtttggaagagtgagctcgaattgtatgacctgcagatcttaggcactaagccacctatgaacagcgatactcacagaaattttgatccgactgcgacactccggaatcagggagatttcacttggaattcaatgtccggcaggtctgtcagacttcggagcgtcccaattcaaagtctcagcgagctggaaagggcccgcctccaggaagtggccttctatcaattgcagcaagactgtgacctgagttgccagatcacaatccctaaagacggtcagaaaagaaagaagtccttgcgcaaaaagctggactccctgggaaaggaaaaaaacaaagataaggagttcattccacaggctttcgggatgcctcttagccaggtcattgcgaatgatcgtgcctacaagctgaagcaggatctgcaaagggatgagcaaaaagacgcaagtgacttcgttgcgagcctcctgccatttggcaataagaggcaaaataaggagttaagcagcagtaactctagcctcagctcaaccagcgagaccccaaacgagtccaccagccctaatacacccgaacctgctcctagggcgcggaggagaggcgcgatgagtgtggattcaattaccgacctggacgacaaccagtcccggctgttggaggctttacaactttcgctccccgccgaggcccagtcaaaaaaggaaaaagcaagggataaaaaactgtctttgaaccctatctaccgccaggtgccacgactggttgactcgtgctgtcagcacttagagaagcatgggttgcagacagtaggaattttccgtgttggttcaagcaagaagcgggtcagacagcttagggaggagtttgatcgagggattgatgtgtctttggaggaagaacactctgtccacgacgtggctgcactcctgaaagaatttcttcgggatatgcctgaccccctgctgactagagaactctacacagccttcatcaatacgctgctcctggagcccgaagaacagcttggcacgctgcagttgctgatctatctgttgcctccatgcaattgcgacaccttgcatcggctgttgcaatttctctctatcgttgcccggcatgcagacgacaatatttcaaaagatggccaggaagttactggcaacaagatgacaagcctgaatctggccaccatcttcgggcccaacttgctgcacaaacaaaagtcaagtgataaggagttctctgtccagtccagtgccagagcagaggaaagtaccgccatcatagcagtagttcagaaaatgatcgaaaactacgaggccctgttcatggtcccacctgacctgcagaacgaggtccttatttcgcttcttgagactgatcctgatgttgttgactacttgcttcgccgcaaggcaagtcaatcttctacctcctccgtactccctgccgccgttcaggcctgtccccagtacccggccagtatgttcactccgtag

SEQ ID NO: 162201 - DNA, 1404 bp, Artificial Sequence
  derived and/or modified sequence
atgtaccggatcttcggcgacttcacctggaacagcatgagcggcagatccgtacgccttcgctccgtcccgatccagagcttgtcagagctggagagagcccggctccaggaggtggcattctaccagctgcagcaggactgtgacctgagctgccagatcaccatacctaaggatggtcaaaagaggaagaaatcactgcgcaagaagctagactctctcggcaaggaaaaaaacaaagacaaggaattcatcccacaggcttttggtatgccactgagtcaagtaatcgcgaacgatagagcctataaacttaagcaggacctgcagcgagacgaacagaaagatgcgagtgactttgtggcaagcttactcccctttggaaacaagaggcagaataaagagctttcatcttccaatagctccctcagttctacgtctgagaccccaaacgaaagcacctctcctaatacgccagagccagctccccgcgcccggcgccgcggggctatgtctgtcgacagtatcactgacttggacgacaatcaatccaggcttcttgaagccttgcagctcagtttgcccgccgaagctcagtccaagaaggaaaaagctcgcgacaagaaactgagcctgaacccaatatatcggcaggtgccccggcttgtggactcctgctgtcagcatttagagaagcatggactgcagacggtcggtatttttcgcgtcgggtcaagcaagaaaagggtgaggcaacttagagaggagtttgaccgggggatagatgtgagtcttgaggaggagcatagcgtgcatgatgttgccgcccttctcaaggagttcctgcgagatatgcctgatcccctgctgacaagagaattgtacaccgcatttataaatacactgttgttggaacctgaagaacagctcggcaccttgcagctgctaatctacctgcttccaccttgtaattgtgataccctgcataggctgctgcagtttttgagtatcgtggcgagacacgccgatgataatattagtaaggatggccaagaagtcaccggcaataagatgacaagtctgaacttggcaactatattcggccccaacttgttacacaaacagaagtcgtcggacaaggagttcagcgtgcagtcttcagcgcgggctgaagaaagcactgccatcatcgccgtcgtgcagaaaatgatcgagaactatgaggctttgtttatggtgccccctgacctccagaatgaggtgctgatatcacttcttgaaacagatccagatgtggtagactaccttctaaggagaaaggcgagccagtccagcactagttcagtcctgcctgctgcagtacaggcttgtccacagtaccccgcttccatgttcaccccatag

SEQ ID NO: 162202 - DNA, 1806 bp, Artificial Sequence
  derived and/or modified sequence
ctcgaattatatgacttgcagatactcgggactaaacccccaatgaactcagatacgcatagaaacttcgatcccacagctacactgcgaaatcagggcgatttcacctggaacagcatgtccggtagatctgtgcgactccgtagtgtgcctattcagtcgttgagtgaactcgaaagagcccgactgcaggaggttgccttctaccagttgcagcaggattgcgatctcagctgccaaataacaatccctaaggatgggcaaaagcggaagaaaagtctgcggaagaagcttgactccttggggaaggaaaaaaacaaggacaaagagttcatcccacaggccttcggaatgcccttgtctcaggtgatcgccaatgaccgcgcttataagcttaagcaagatcttcagagagatgaacaaaaagacgcctctgactttgtggcctctctgctcccatttggcaacaaacgccagaacaaggaactgtcatcttcgaattctagtctttcatccacatcagaaacgcccaacgagagtacctcgccgaacacaccagagccagcacctagggcgcgacgcaggggggcaatgtccgtggatagcatcactgacctggatgataaccagtcaaggcttctggaggcacttcagctctcactacccgcagaggcccagtctaagaaagagaaggcgagggacaaaaagttgtctcttaatcctatttaccggcaggtccctcgcctggtggattcttgttgtcagcatcttgaaaagcacggactgcagacggttgggatctttcgagtaggatcctctaagaaaagggttaggcagctgcgggaggagttcgacagagggatcgacgtcagtttggaagaggagcactctgtgcacgatgtcgctgcactcttaaaagaatttctgagagatatgcccgaccccctgctcacccgggagctgtacaccgcttttattaacaccttgttgctggaacctgaggagcagctgggaaccctccagctgctgatctatttgctccccccttgtaactgcgacactctgcacaggctgctgcaatttctttccatcgtagctagacatgctgacgacaacatctctaaggacgggcaggaagtgacaggtaacaaaatgacaagcctaaacttagccactatatttggacctaacctgctccacaagcagaaatcttctgacaaggaattcagtgtgcagagttccgccagagcagaggagtccacagccataattgccgtcgttcagaaaatgatcgagaactacgaggcgctttttatggtgccacccgatctgcaaaatgaggtgttgatatccctgctggaaacagatcctgatgtcgtcgactatcttctaagacgcaaggcttcccagagttcaagtccagacatgctccagtcagaggttagctttagtgtgggtgggaggcactcatcaacagactctaacaaggccagctccggagacatctcaccatacgacaacaattctcctgtgcttagcgaaaggtctctgttggctatgcaagaggatgctgccccaggcggttctgagaagctctaccgcgtgccaggccaattcatgctggtcggccatcttagctcctctaaatctagagaaagttcgccgggaccacgcctggggaagggaaattggtctcttgcatccagacggtggcccaaacaggctactctccttctgctccatgtggcatggtgcggagccctgcggaccttctcatcatctctgccatatttgatgttcctgtag

SEQ ID NO: 162203 - DNA, 2298 bp, Artificial Sequence
  derived and/or modified sequence
atgagtgcacaatcattgctgcactccgttttttcctgctcatcccccgcatcctcctccgcggctagcgccaagggtttcagtaagaggaaactgaggcaaaccaggagtctcgatccggcactgattgggggttgcggatccgacgaggctggcgctgaaggatcggccagaggcgctaccgcaggcagattgtactccccgagtcttccagcggagagtctgggcccacggctcgccagttccagccggggacctccacctcgcgctactaggctgccacccccaggacctctgtgctcgtcttttagcacgccttcaacccctcaggaaaagtccccatccgggagttttcatttcgattacgaggttcctctaggcagaggcggtttaaagaagtctatggcctgggacctgccctccgttctggctggcccagcaagttctagatccgcctcatccatcctgtgcagttcggggggtggtcctaatggcatctttgcttcgccacggaggtggttgcagcaacgtaagtttcagtcccctcccgattctagaggccatccatatgtcgtctggaaaagcgagggcgactttacttggaacagcatgagtggccgaagcgtgcggctccgatccgtgcctatacagagtctttccgagctggagcgcgcacgactgcaggaagttgcgttctatcagctgcagcaagattgtgacctctcgtgtcagatcaccattcctaaggatgggcagaaacgcaaaaagtcactgcgcaaaaagcttgacagtctgggcaaagaaaaaaataaggataaagaatttataccccaggcctttggcatgcccttatcccaggttattgcaaatgaccgcgcatataaactgaaacaggacctgcagcgtgatgaacagaaggacgctagtgactttgtcgccagcctgcttccattcggcaataaacgacagaataaagaattgtcttcgagtaactcttctctgtccagtacttctgagactcccaacgaatctaccagtcctaataccccggaaccagccccaagagccagaaggcggggtgctatgagtgtggactctatcaccgacttggacgataatcagtctcgcctgctagaggccctacagctgtctctcccggctgaggcacaaagcaaaaaagagaaagctcgcgacaagaagctgtccctgaaccctatctatcggcaggttccacgactcgtggatagctgctgtcagcatctggaaaaacacggcttacagacagtcgggatttttcgggtgggatcttcgaaaaagcgtgtgagacagctgcgcgaagaatttgaccggggtatcgacgtgtctctggaggaggaacactcagttcacgacgtggccgcattgctgaaagagttcttgcgcgatatgcctgatcccctgctgacgcgggagctctacaccgcctttattaatacactgttgttagagcccgaggagcagctgggcactttgcagctgctaatctacttgctaccaccgtgcaattgcgacaccctccacagactgctgcagttcctctccatcgtcgcaaggcacgcggatgacaatatttctaaggacggacaagaagtgaccggaaacaagatgacttctttaaatctggctaccatcttcgggccaaatctcctccataagcaaaagagcagtgataaggagttttctgtgcaatcctctgcacgggcagaggagagcacagcgattatagctgtcgtgcagaaaatgattgaaaattacgaagccctgtttatggtgccccctgatttgcagaacgaagtccttatttcgctgttggaaactgatcccgatgttgtggactatttgctccgtagaaaagcctcccaatcctcgagtcctgacatgcttcagtcggaggtctcctttagcgtaggcggtagacatagcagcaccgacagcaataaagcgtccagcggagacatctcaccatacgataataacagtcctgtgttgtccgagaggtctctgcttgcaatgcaggaagatgccgcacccggaggctctgagaaactttatcgcgtcccagggcagttcatgctcgttggtcacttatcctcctcaaagagccgcgagagtagcccaggacccaggttaggaaaaggaaactggagtctcgccagcaggaggtggccaaagcaggccaccctccttttactgcacgttgcctggtgtggcgcactaaggaccttcagtagctcccttccttatttgatgtttctgtag

SEQ ID NO: 162204 - DNA, 2073 bp, Artificial Sequence
  derived and/or modified sequence
atgtctgcccaaagtctgctacactctgtgttttcttgctccagcccagcatcgtcgtcagcggctagcgcgaaggggttctcaaagagaaagctgcgacagactcggtcactggaccctgcgcttattggcggttgtggttctgatgaagctggtgctgagggaagcgcccgaggcgctacagcaggccgactttacagcccctctctccccgcagagagtttgggcccaagacttgcgagttcaagccggggtccccctcctcgggctactaggctccctccccctggcccattgtgctcttccttttcgacaccctctacaccgcaggagaagagcccaagcggttccttccacttcgattatgaggttcctctcggcagaggcggactgaaaaagtccatggcatgggacctcccaagtgtgctcgcgggtcctgcctcttcccggtctgcatcctctatcctctgtagctctggaggaggacctaatggcatcttcgcatctccacggagatggctgcagcagaggaagtttcagtcacccccagattctagaggccatccctacgtggtttggaagtcggagctcgagttgtacgatttgcaaatactgggcacaaaaccacctatgaattcagatacccataggaactttgaccctactgctaccctgcgaaatcagggggatttcacttggaatagcatgagtggtagatcagttcggctcagatctgtgcccatccagtccctgagcgaactcgagagagctcgcttgcaggaggtggccttctatcagctccagcaagattgtgatctgagctgtcagatcaccattcccaaggacgggcagaagaggaaaaagtccttgcgcaaaaaactggactccctgggcaaggagaagaacaaagacaaagaattcatccctcaggctttcggcatgccactgagtcaggtcattgcaaatgacagggcctacaagctgaagcaggacctccagcgtgatgagcagaaagatgcctcagatttcgtagcttcactgctaccattcggtaacaagaggcagaataaggagctgtccagctcaaatagttctctgtcctctacctccgaaacccccaacgagtcaactagccctaacacacccgagcccgcacctcgggctaggagacgcggagccatgagtgtggatagcatcacagaccttgacgataaccaatctcgactgttggaagcactgcagctctccctgcccgcagaggcccagtccaagaaagagaaagctcgggacaagaagctttcgctcaacccgatctacagacaggtcccacgtttggtcgattcgtgctgtcagcatttggagaaacacgggcttcaaaccgtgggaattttccgggtgggctcatctaaaaagcgtgtgagacagctgagggaggaatttgataggggcattgacgtaagtctggaagaggaacactctgtacacgatgtggcagcgttactgaaggagttcttaagagatatgcctgatcctctgctgactcgcgaactgtacactgcgttcataaacacgttactactcgagccagaagaacagctgggtactctgcagctgttgatctatctgctgccgccttgtaattgcgacacccttcatcgcctgctccagttcctctctatcgtcgcgagacacgcagatgataatatctccaaagatggacaggaagtgaccgggaataagatgactagtttaaacctggcaacaatcttcggccctaatttgctgcataaacaaaaaagcagtgacaaggaatttagcgtgcagagctcggctagagccgaggagagcacagccatcatcgccgttgtccagaagatgattgagaactacgaggccctatttatggtccccccagacttgcaaaacgaggttctgatttctctcctcgaaacagatcccgacgttgtggactacctgctgaggcggaaagccagtcaatcttctacatcgtcagttcttcctgcggcagtccaggcctgcccacaatacccagcctcaatgtttaccccatag

SEQ ID NO: 162205 - DNA, 1404 bp, Artificial Sequence
  derived and/or modified sequence
atgtacagaatcttcggcgatttcacctggaactcaatgagtggacgctccgttaggctccgatctgtgcctattcagtccctgagcgagcttgaacgcgcaaggctccaggaggtggcgttctatcagcttcagcaggactgcgatctgagctgccaaattactatccctaaagatgggcagaaacgcaagaagagccttagaaaaaagttagacagcctgggaaaggagaagaataaagacaaagagttcattccgcaggcctttggcatgccgttgtcccaagtcatcgctaatgacagagcatacaagctgaaacaggacctgcaacgggatgagcaaaaagacgcctccgactttgttgcatctctgctaccattcggaaacaaaaggcagaataaggaactttcatcctccaacagctccttgtcttctactagcgaaaccccgaacgagagcacatcccctaacacgcccgaacccgcacctagggcaaggcgcagaggtgctatgtcagttgactcaatcaccgatttggacgataaccagtcccggttactcgaagctctacagctttccctccccgcagaggcccaatctaagaaggaaaaggcaagagataagaaactatctctaaaccctatttatcgccaggtgcctcgcctcgtcgactcctgctgtcagcacctcgaaaaacatggattacagaccgtagggatttttagggtaggctccagcaagaagagggttaggcagttacgagaggaattcgatcgcggtatcgatgtgtcattagaggaggaacactcagtgcatgacgtggccgctttgctcaaagaattcctgcgggatatgcccgacccactgcttactcgcgaactctatactgccttcatcaatacgctgctactcgagcccgaggaacagctgggtactctgcagctcctaatttacctcctgcctccctgtaactgtgacacgttacatcggttgcttcagtttctgtctattgtcgcacgtcatgccgacgataacatctctaaagacggccaggaagtgaccgggaacaaaatgacatctcttaacctggctacaatcttcggacctaacttgctgcacaagcagaagagctctgacaaggagttcagtgtgcaaagctctgctcgagccgaggaatcaacagcaattatagccgtggtacagaaaatgatcgagaattacgaggccctcttcatggtcccaccagatttgcagaatgaggtcttaatctctcttttggaaacagatcctgacgtggttgattatctgctgcggaggaaggcttctcaatcctcgacctcatccgttctccctgctgccgttcaagcatgtccccagtatccggcttctatgtttacgccatag

SEQ ID NO: 162206 - DNA, 2267 bp, Artificial Sequence
  derived and/or modified sequence
ttggagttgtatgatcttcagatcttaggcacaaaaccaccgatgaattccgatacacatcgtaactttgaccccaccgcaacccttagaaatcagggtgatttcacctggaacagcatgtcaggccgcagtgtacggctgaggtcagtccccatccagagtctctcagagctggagagggcccggctgcaggaagtggctttttatcagttgcaacaggactgtgacctgagctgtcagatcaccattcccaaagatggacaaaagagaaagaaatctttaagaaagaaactggattcactaggaaaggagaaaaacaaagacaaagaattcatcccacaggcatttggaatgcccttatcccaagtcattgcgaatgacagggcctataaactcaagcaggacttgcagagggacgagcagaaagatgcatctgactttgtggcttccctcctcccatttggaaataaaagacaaaacaaagaactctcaagcagtaactcatctctcagctcaacctcagaaacaccgaatgagtcaacgtccccaaacaccccggaaccggctcctcgggctaggaggaggggtgccatgtcagtggattctatcaccgatcttgatgacaatcagtctcgactactagaagctttacaactttccttgcctgctgaggctcaaagtaaaaaggaaaaagccagagataagaaactcagtctgaatcctatttacagacaggtccctaggctggtggacagctgctgtcagcacctagaaaaacatggcctccagacagtggggatattccgagttggaagctcaaaaaagagagtgagacaattacgtgaggaatttgaccgtgggattgatgtctctctggaggaggagcacagtgttcatgatgtggcagccttgctgaaagagttcctgagggacatgccagacccccttctcaccagggagctgtacacagctttcatcaacactctcttgttggagccggaggaacagctgggcaccttgcagctcctcatataccttctacctccctgcaactgcgacaccctccaccgcctgctacagttcctctccatcgtggccaggcatgccgatgacaacatcagcaaagatgggcaagaggtcactgggaataaaatgacatctctaaacttagccaccatatttggacccaacctgctgcacaagcagaagtcatcagacaaagaattctcagttcagagttcagcccgggctgaggagagcacggccatcatcgctgttgtgcaaaagatgattgaaaattatgaagccctgttcatggttcccccagatctccagaacgaagtgctgatcagcctgttagagaccgatcctgatgtcgtggactatttactcagaagaaaggcttcccaatcatcaagccctgacatgctgcagtcggaagtttccttttccgtgggagggaggcattcatctacagactccaacaaggcctccagcggagacatctccccttatgacaacaactccccagtgctgtctgagcgctccctgctggctatgcaagaggacgcggccccggggggctcggagaagctttacagagtgccagggcagtttatgctggtgggccacttgtcgtcgtcaaagtcaagggaaagttctcctggaccaaggcttgggaaaggtaactggagcctggccagcaggcgctggccaaaacaagcgaccctcctcttgttgcatgtggcatggtgtggggctcttcggaccttctcttcgtctctcccttatttgatgtttctgtaattcaacctgcatttaccgagtacctgctgaacgcctactctaggaagaggaaggtatggcgagcccagtcgttggctgggagggtccctgcaggccacactccaagtctcagatatctgggaaataaacgcatgcccagaggagccactcctattcccagctgattctttttccctccagcatcctaggaactttatgtatactggatttgggttgcatatttgctagtctgaggtgccacccaattactgctgttacatttctaaagaaaacaagctgaacctactatatgtatgaagacaaccttccagaaccaaatagtgttagtatccaatgacaagagagcactatactgggagtcacaaacctgctctgccactttcaacctgcaggatctccagtgagcgattgagcttcccagagtcccatttcctcctgctgtgaaaactcagaatgataac

SEQ ID NO: 162207 - DNA, 3632 bp, Artificial Sequence
  derived and/or modified sequence
ggctgggctgcgaatagcgtgttcctctccggcggaacacacacacccggccttggggctgtctcctgagctccctcctccacggagagcgctgagcgccgccgggaattccatcccaccgtgggcacgcagtctttggaggtcccgggcgcagcacgctcggtgtccccacactgcagcaagacagagaccccgcgggaaccttgagcttggaacaacccttgagcctctgcagtcggaagagtgggcgcagcagcccagcggaggccaggcgcgcaacctcgggcgccggggcaaggagagagtgcagggaggcgcagctcaggcgcccggctcaggagcgggaggaagttctcgcggcgccgggagcgcggtggacgcgccctgggcgcacgcccaggcagccttctccctggccctcgggactgtcctcgggccgcaaggaggagcttgctggagtcttagaggccatccagagccagcgagcaggagcgctgcgtctcccgcctcagctaggaagggggagtggcgctggcaggctggagctgggaacccagcgagcgcctgaccttcctcctcctcttcctgaccctcttcgcgtcttgggctccggaggaaggttctagcggctgcaggaggtccccagacccattttcctagaaggctggtgatggatctgctgctcctgccgccgccggggcacttggagcgcaccggcggcgcgtgagctgggctttgctctccactgccctgggcaaaccccgggccagccccgcctggcacctttgcctgagtccctttcggttcccgacccaaagccaccagcgtccagggagggaggaggaggtggtcctcaggtgcagccccgccgagatgtccgcgcagagcctgctccacagcgtcttctcctgttcctcgcccgcttcaagtagcgcggcctcggccaagggcttctccaagaggaagctgcgccagacccgcagcctggacccggccctgatcggcggctgcgggagcgacgaggcgggcgcggagggcagtgcgcggggagccacggcgggccgcctctactccccatcactcccagccgagagtctcggccctcgcttggcgtcctcttcccggggtccgccccccagggccaccaggctaccgcctcctggacctctttgctcgtccttctccacacccagcaccccgcaggagaagtcaccatccggcagctttcactttgactatgaggttcccctgggtcgcggcggcctcaagaagagcatggcctgggacctgccttctgtcctggccgggccagccagtagccgaagcgcttccagcatcctctgttcatccgggggaggccccaatggcatcttcgcttctcctaggaggtggctccagcagaggaagttccagtccccacccgacagtcgcgggcacccctacgtcgtgtggaaatccgagggtgatttcacctggaacagcatgtcaggccgcagtgtacggctgaggtcagtccccatccagagtctctcagagctggagagggcccggctgcaggaagtggctttttatcagttgcaacaggactgtgacctgagctgtcagatcaccattcccaaagatggacaaaagagaaagaaatctttaagaaagaaactggattcactaggaaaggagaaaaacaaagacaaagaattcatcccacaggcatttggaatgcccttatcccaagtcattgcgaatgacagggcctataaactcaagcaggacttgcagagggacgagcagaaagatgcatctgactttgtggcttccctcctcccatttggaaataaaagacaaaacaaagaactctcaagcagtaactcatctctcagctcaacctcagaaacaccgaatgagtcaacgtccccaaacaccccggaaccggctcctcgggctaggaggaggggtgccatgtcagtggattctatcaccgatcttgatgacaatcagtctcgactactagaagctttacaactttccttgcctgctgaggctcaaagtaaaaaggaaaaagccagagataagaaactcagtctgaatcctatttacagacaggtccctaggctggtggacagctgctgtcagcacctagaaaaacatggcctccagacagtggggatattccgagttggaagctcaaaaaagagagtgagacaattacgtgaggaatttgaccgtgggattgatgtctctctggaggaggagcacagtgttcatgatgtggcagccttgctgaaagagttcctgagggacatgccagacccccttctcaccagggagctgtacacagctttcatcaacactctcttgttggagccggaggaacagctgggcaccttgcagctcctcatataccttctacctccctgcaactgcgacaccctccaccgcctgctacagttcctctccatcgtggccaggcatgccgatgacaacatcagcaaagatgggcaagaggtcactgggaataaaatgacatctctaaacttagccaccatatttggacccaacctgctgcacaagcagaagtcatcagacaaagaattctcagttcagagttcagcccgggctgaggagagcacggccatcatcgctgttgtgcaaaagatgattgaaaattatgaagccctgttcatggttcccccagatctccagaacgaagtgctgatcagcctgttagagaccgatcctgatgtcgtggactatttactcagaagaaaggcttcccaatcatcaagccctgacatgctgcagtcggaagtttccttttccgtgggagggaggcattcatctacagactccaacaaggcctccagcggagacatctccccttatgacaacaactccccagtgctgtctgagcgctccctgctggctatgcaagaggacgcggccccggggggctcggagaagctttacagagtgccagggcagtttatgctggtgggccacttgtcgtcgtcaaagtcaagggaaagttctcctggaccaaggcttgggaaaggtaactggagcctggccagcaggcgctggccaaaacaagcgaccctcctcttgttgcatgtggcatggtgtggggctcttcggaccttctcttcgtctctcccttatttgatgtttctgtaattcaacctgcatttaccgagtacctgctgaacgcctactctaggaagaggaaggtatggcgagcccagtcgttggctgggagggtccctgcaggccacactccaagtctcagatatctgggaaataaacgcatgcccagaggagccactcctattcccagctgattctttttccctccagcatcctaggaactttatgtatactggatttgggttgcatatttgctagtctgaggtgccacccaattactgctgttacatttctaaagaaaacaagctgaacctactatatgtatgaagacaaccttccagaaccaaatagtgttagtatccaatgacaagagagcactatactgggagtcacaaacctgctctgccactttcaacctgcaggatctccagtgagcgattgagcttcccagagtcccatttcctcctgctgtgaaaactcagaatgataac

SEQ ID NO: 162208 - DNA, 2073 bp, Artificial Sequence
  derived and/or modified sequence
atgtccgcgcagagcctgctccacagcgtcttctcctgttcctcgcccgcttcaagtagcgcggcctcggccaagggcttctccaagaggaagctgcgccagacccgcagcctggacccggccctgatcggcggctgcgggagcgacgaggcgggcgcggagggcagtgcgcggggagccacggcgggccgcctctactccccatcactcccagccgagagtctcggccctcgcttggcgtcctcttcccggggtccgccccccagggccaccaggctaccgcctcctggacctctttgctcgtccttctccacacccagcaccccgcaggagaagtcaccatccggcagctttcactttgactatgaggttcccctgggtcgcggcggcctcaagaagagcatggcctgggacctgccttctgtcctggccgggccagccagtagccgaagcgcttccagcatcctctgttcatccgggggaggccccaatggcatcttcgcttctcctaggaggtggctccagcagaggaagttccagtccccacccgacagtcgcgggcacccctacgtcgtgtggaaatccgagttggagttgtatgatcttcagatcttaggcacaaaaccaccgatgaattccgatacacatcgtaactttgaccccaccgcaacccttagaaatcagggtgatttcacctggaacagcatgtcaggccgcagtgtacggctgaggtcagtccccatccagagtctctcagagctggagagggcccggctgcaggaagtggctttttatcagttgcaacaggactgtgacctgagctgtcagatcaccattcccaaagatggacaaaagagaaagaaatctttaagaaagaaactggattcactaggaaaggagaaaaacaaagacaaagaattcatcccacaggcatttggaatgcccttatcccaagtcattgcgaatgacagggcctataaactcaagcaggacttgcagagggacgagcagaaagatgcatctgactttgtggcttccctcctcccatttggaaataaaagacaaaacaaagaactctcaagcagtaactcatctctcagctcaacctcagaaacaccgaatgagtcaacgtccccaaacaccccggaaccggctcctcgggctaggaggaggggtgccatgtcagtggattctatcaccgatcttgatgacaatcagtctcgactactagaagctttacaactttccttgcctgctgaggctcaaagtaaaaaggaaaaagccagagataagaaactcagtctgaatcctatttacagacaggtccctaggctggtggacagctgctgtcagcacctagaaaaacatggcctccagacagtggggatattccgagttggaagctcaaaaaagagagtgagacaattacgtgaggaatttgaccgtgggattgatgtctctctggaggaggagcacagtgttcatgatgtggcagccttgctgaaagagttcctgagggacatgccagacccccttctcaccagggagctgtacacagctttcatcaacactctcttgttggagccggaggaacagctgggcaccttgcagctcctcatataccttctacctccctgcaactgcgacaccctccaccgcctgctacagttcctctccatcgtggccaggcatgccgatgacaacatcagcaaagatgggcaagaggtcactgggaataaaatgacatctctaaacttagccaccatatttggacccaacctgctgcacaagcagaagtcatcagacaaagaattctcagttcagagttcagcccgggctgaggagagcacggccatcatcgctgttgtgcaaaagatgattgaaaattatgaagccctgttcatggttcccccagatctccagaacgaagtgctgatcagcctgttagagaccgatcctgatgtcgtggactatttactcagaagaaaggcttcccaatcatcaacaagttctgtgcttccggctgcagtgcaggcctgcccacagtaccctgccagcatgtttacgccctga

SEQ ID NO: 162209 - DNA, 1795 bp, Artificial Sequence
  derived and/or modified sequence
ctactctaatcacttccaacgccactatccagcaggacgagatggaggggaatcctagaggaatccttctctagccttcaagtctggggagagcctgccctgttcctggcctggctcacttgggtcgactgttctcatgtacaggatatttggtgatttcacctggaacagcatgtcaggccgcagtgtacggctgaggtcagtccccatccagagtctctcagagctggagagggcccggctgcaggaagtggctttttatcagttgcaacaggactgtgacctgagctgtcagatcaccattcccaaagatggacaaaagagaaagaaatctttaagaaagaaactggattcactaggaaaggagaaaaacaaagacaaagaattcatcccacaggcatttggaatgcccttatcccaagtcattgcgaatgacagggcctataaactcaagcaggacttgcagagggacgagcagaaagatgcatctgactttgtggcttccctcctcccatttggaaataaaagacaaaacaaagaactctcaagcagtaactcatctctcagctcaacctcagaaacaccgaatgagtcaacgtccccaaacaccccggaaccggctcctcgggctaggaggaggggtgccatgtcagtggattctatcaccgatcttgatgacaatcagtctcgactactagaagctttacaactttccttgcctgctgaggctcaaagtaaaaaggaaaaagccagagataagaaactcagtctgaatcctatttacagacaggtccctaggctggtggacagctgctgtcagcacctagaaaaacatggcctccagacagtggggatattccgagttggaagctcaaaaaagagagtgagacaattacgtgaggaatttgaccgtgggattgatgtctctctggaggaggagcacagtgttcatgatgtggcagccttgctgaaagagttcctgagggacatgccagacccccttctcaccagggagctgtacacagctttcatcaacactctcttgttggagccggaggaacagctgggcaccttgcagctcctcatataccttctacctccctgcaactgcgacaccctccaccgcctgctacagttcctctccatcgtggccaggcatgccgatgacaacatcagcaaagatgggcaagaggtcactgggaataaaatgacatctctaaacttagccaccatatttggacccaacctgctgcacaagcagaagtcatcagacaaagaattctcagttcagagttcagcccgggctgaggagagcacggccatcatcgctgttgtgcaaaagatgattgaaaattatgaagccctgttcatggttcccccagatctccagaacgaagtgctgatcagcctgttagagaccgatcctgatgtcgtggactatttactcagaagaaaggcttcccaatcatcaacaagttctgtgcttccggctgcagtgcaggcctgcccacagtaccctgccagcatgtttacgccctgacctggagggaccagctaaggaagccctgacatgctgcagtcggaagtttccttttccgtgggagggaggcattcatctacagactccaacaaggcctccagcggagacatctccccttatgacaacaactccccagtgctgtctgagcgctccctgctggctatgcaagaggacgcggccccggggggctcggagaagctttacagagtgccagggcagtttatgctggtgggccacttgtcgtcgtcaaagtca

SEQ ID NO: 162210 - DNA, 1806 bp, Artificial Sequence
  derived and/or modified sequence
ctggagctgtacgacctgcagatcctgggcaccaagccccccatgaacagcgacacccacagaaacttcgaccccaccgccaccctgagaaaccagggcgacttcacctggaacagcatgagcggcagaagcgtgagactgagaagcgtgcccatccagagcctgagcgagctggagagagccagactgcaggaggtggccttctaccagctgcagcaggactgcgacctgagctgccagatcaccatccccaaggacggccagaagagaaagaagagcctgagaaagaagctggacagcctgggcaaggagaagaacaaggacaaggagttcatcccccaggccttcggcatgcccctgagccaggtgatcgccaacgacagagcctacaagctgaagcaggacctgcagagagacgagcagaaggacgccagcgacttcgtggccagcctgctgcccttcggcaacaagagacagaacaaggagctgagcagcagcaacagcagcctgagcagcaccagcgagacccccaacgagagcaccagccccaacacccccgagcccgcccccagagccagaagaagaggcgccatgagcgtggacagcatcaccgacctggacgacaaccagagcagactgctggaggccctgcagctgagcctgcccgccgaggcccagagcaagaaggagaaggccagagacaagaagctgagcctgaaccccatctacagacaggtgcccagactggtggacagctgctgccagcacctggagaagcacggcctgcagaccgtgggcatcttcagagtgggcagcagcaagaagagagtgagacagctgagagaggagttcgacagaggcatcgacgtgagcctggaggaggagcacagcgtgcacgacgtggccgccctgctgaaggagttcctgagagacatgcccgaccccctgctgaccagagagctgtacaccgccttcatcaacaccctgctgctggagcccgaggagcagctgggcaccctgcagctgctgatctacctgctgcccccctgcaactgcgacaccctgcacagactgctgcagttcctgagcatcgtggccagacacgccgacgacaacatcagcaaggacggccaggaggtgaccggcaacaagatgaccagcctgaacctggccaccatcttcggccccaacctgctgcacaagcagaagagcagcgacaaggagttcagcgtgcagagcagcgccagagccgaggagagcaccgccatcatcgccgtggtgcagaagatgatcgagaactacgaggccctgttcatggtgccccccgacctgcagaacgaggtgctgatcagcctgctggagaccgaccccgacgtggtggactacctgctgagaagaaaggccagccagagcagcagccccgacatgctgcagagcgaggtgagcttcagcgtgggcggcagacacagcagcaccgacagcaacaaggccagcagcggcgacatcagcccctacgacaacaacagccccgtgctgagcgagagaagcctgctggccatgcaggaggacgccgcccccggcggcagcgagaagctgtacagagtgcccggccagttcatgctggtgggccacctgagcagcagcaagagcagagagagcagccccggccccagactgggcaagggcaactggagcctggccagcagaagatggcccaagcaggccaccctgctgctgctgcacgtggcctggtgcggcgccctgagaaccttcagcagcagcctgccctacctgatgttcctgtag

SEQ ID NO: 162211 - DNA, 2298 bp, Artificial Sequence
  derived and/or modified sequence
atgagcgcccagagcctgctgcacagcgtgttcagctgcagcagccccgccagcagcagcgccgccagcgccaagggcttcagcaagagaaagctgagacagaccagaagcctggaccccgccctgatcggcggctgcggcagcgacgaggccggcgccgagggcagcgccagaggcgccaccgccggcagactgtacagccccagcctgcccgccgagagcctgggccccagactggccagcagcagcagaggccccccccccagagccaccagactgcccccccccggccccctgtgcagcagcttcagcacccccagcaccccccaggagaagagccccagcggcagcttccacttcgactacgaggtgcccctgggcagaggcggcctgaagaagagcatggcctgggacctgcccagcgtgctggccggccccgccagcagcagaagcgccagcagcatcctgtgcagcagcggcggcggccccaacggcatcttcgccagccccagaagatggctgcagcagagaaagttccagagcccccccgacagcagaggccacccctacgtggtgtggaagagcgagggcgacttcacctggaacagcatgagcggcagaagcgtgagactgagaagcgtgcccatccagagcctgagcgagctggagagagccagactgcaggaggtggccttctaccagctgcagcaggactgcgacctgagctgccagatcaccatccccaaggacggccagaagagaaagaagagcctgagaaagaagctggacagcctgggcaaggagaagaacaaggacaaggagttcatcccccaggccttcggcatgcccctgagccaggtgatcgccaacgacagagcctacaagctgaagcaggacctgcagagagacgagcagaaggacgccagcgacttcgtggccagcctgctgcccttcggcaacaagagacagaacaaggagctgagcagcagcaacagcagcctgagcagcaccagcgagacccccaacgagagcaccagccccaacacccccgagcccgcccccagagccagaagaagaggcgccatgagcgtggacagcatcaccgacctggacgacaaccagagcagactgctggaggccctgcagctgagcctgcccgccgaggcccagagcaagaaggagaaggccagagacaagaagctgagcctgaaccccatctacagacaggtgcccagactggtggacagctgctgccagcacctggagaagcacggcctgcagaccgtgggcatcttcagagtgggcagcagcaagaagagagtgagacagctgagagaggagttcgacagaggcatcgacgtgagcctggaggaggagcacagcgtgcacgacgtggccgccctgctgaaggagttcctgagagacatgcccgaccccctgctgaccagagagctgtacaccgccttcatcaacaccctgctgctggagcccgaggagcagctgggcaccctgcagctgctgatctacctgctgcccccctgcaactgcgacaccctgcacagactgctgcagttcctgagcatcgtggccagacacgccgacgacaacatcagcaaggacggccaggaggtgaccggcaacaagatgaccagcctgaacctggccaccatcttcggccccaacctgctgcacaagcagaagagcagcgacaaggagttcagcgtgcagagcagcgccagagccgaggagagcaccgccatcatcgccgtggtgcagaagatgatcgagaactacgaggccctgttcatggtgccccccgacctgcagaacgaggtgctgatcagcctgctggagaccgaccccgacgtggtggactacctgctgagaagaaaggccagccagagcagcagccccgacatgctgcagagcgaggtgagcttcagcgtgggcggcagacacagcagcaccgacagcaacaaggccagcagcggcgacatcagcccctacgacaacaacagccccgtgctgagcgagagaagcctgctggccatgcaggaggacgccgcccccggcggcagcgagaagctgtacagagtgcccggccagttcatgctggtgggccacctgagcagcagcaagagcagagagagcagccccggccccagactgggcaagggcaactggagcctggccagcagaagatggcccaagcaggccaccctgctgctgctgcacgtggcctggtgcggcgccctgagaaccttcagcagcagcctgccctacctgatgttcctgtag

SEQ ID NO: 162212 - DNA, 2073 bp, Artificial Sequence
  derived and/or modified sequence
atgagcgcccagagcctgctgcacagcgtgttcagctgcagcagccccgccagcagcagcgccgccagcgccaagggcttcagcaagagaaagctgagacagaccagaagcctggaccccgccctgatcggcggctgcggcagcgacgaggccggcgccgagggcagcgccagaggcgccaccgccggcagactgtacagccccagcctgcccgccgagagcctgggccccagactggccagcagcagcagaggccccccccccagagccaccagactgcccccccccggccccctgtgcagcagcttcagcacccccagcaccccccaggagaagagccccagcggcagcttccacttcgactacgaggtgcccctgggcagaggcggcctgaagaagagcatggcctgggacctgcccagcgtgctggccggccccgccagcagcagaagcgccagcagcatcctgtgcagcagcggcggcggccccaacggcatcttcgccagccccagaagatggctgcagcagagaaagttccagagcccccccgacagcagaggccacccctacgtggtgtggaagagcgagctggagctgtacgacctgcagatcctgggcaccaagccccccatgaacagcgacacccacagaaacttcgaccccaccgccaccctgagaaaccagggcgacttcacctggaacagcatgagcggcagaagcgtgagactgagaagcgtgcccatccagagcctgagcgagctggagagagccagactgcaggaggtggccttctaccagctgcagcaggactgcgacctgagctgccagatcaccatccccaaggacggccagaagagaaagaagagcctgagaaagaagctggacagcctgggcaaggagaagaacaaggacaaggagttcatcccccaggccttcggcatgcccctgagccaggtgatcgccaacgacagagcctacaagctgaagcaggacctgcagagagacgagcagaaggacgccagcgacttcgtggccagcctgctgcccttcggcaacaagagacagaacaaggagctgagcagcagcaacagcagcctgagcagcaccagcgagacccccaacgagagcaccagccccaacacccccgagcccgcccccagagccagaagaagaggcgccatgagcgtggacagcatcaccgacctggacgacaaccagagcagactgctggaggccctgcagctgagcctgcccgccgaggcccagagcaagaaggagaaggccagagacaagaagctgagcctgaaccccatctacagacaggtgcccagactggtggacagctgctgccagcacctggagaagcacggcctgcagaccgtgggcatcttcagagtgggcagcagcaagaagagagtgagacagctgagagaggagttcgacagaggcatcgacgtgagcctggaggaggagcacagcgtgcacgacgtggccgccctgctgaaggagttcctgagagacatgcccgaccccctgctgaccagagagctgtacaccgccttcatcaacaccctgctgctggagcccgaggagcagctgggcaccctgcagctgctgatctacctgctgcccccctgcaactgcgacaccctgcacagactgctgcagttcctgagcatcgtggccagacacgccgacgacaacatcagcaaggacggccaggaggtgaccggcaacaagatgaccagcctgaacctggccaccatcttcggccccaacctgctgcacaagcagaagagcagcgacaaggagttcagcgtgcagagcagcgccagagccgaggagagcaccgccatcatcgccgtggtgcagaagatgatcgagaactacgaggccctgttcatggtgccccccgacctgcagaacgaggtgctgatcagcctgctggagaccgaccccgacgtggtggactacctgctgagaagaaaggccagccagagcagcaccagcagcgtgctgcccgccgccgtgcaggcctgcccccagtaccccgccagcatgttcaccccctag

SEQ ID NO: 162213 - DNA, 1404 bp, Artificial Sequence
  derived and/or modified sequence
atgtacagaatcttcggcgacttcacctggaacagcatgagcggcagaagcgtgagactgagaagcgtgcccatccagagcctgagcgagctggagagagccagactgcaggaggtggccttctaccagctgcagcaggactgcgacctgagctgccagatcaccatccccaaggacggccagaagagaaagaagagcctgagaaagaagctggacagcctgggcaaggagaagaacaaggacaaggagttcatcccccaggccttcggcatgcccctgagccaggtgatcgccaacgacagagcctacaagctgaagcaggacctgcagagagacgagcagaaggacgccagcgacttcgtggccagcctgctgcccttcggcaacaagagacagaacaaggagctgagcagcagcaacagcagcctgagcagcaccagcgagacccccaacgagagcaccagccccaacacccccgagcccgcccccagagccagaagaagaggcgccatgagcgtggacagcatcaccgacctggacgacaaccagagcagactgctggaggccctgcagctgagcctgcccgccgaggcccagagcaagaaggagaaggccagagacaagaagctgagcctgaaccccatctacagacaggtgcccagactggtggacagctgctgccagcacctggagaagcacggcctgcagaccgtgggcatcttcagagtgggcagcagcaagaagagagtgagacagctgagagaggagttcgacagaggcatcgacgtgagcctggaggaggagcacagcgtgcacgacgtggccgccctgctgaaggagttcctgagagacatgcccgaccccctgctgaccagagagctgtacaccgccttcatcaacaccctgctgctggagcccgaggagcagctgggcaccctgcagctgctgatctacctgctgcccccctgcaactgcgacaccctgcacagactgctgcagttcctgagcatcgtggccagacacgccgacgacaacatcagcaaggacggccaggaggtgaccggcaacaagatgaccagcctgaacctggccaccatcttcggccccaacctgctgcacaagcagaagagcagcgacaaggagttcagcgtgcagagcagcgccagagccgaggagagcaccgccatcatcgccgtggtgcagaagatgatcgagaactacgaggccctgttcatggtgccccccgacctgcagaacgaggtgctgatcagcctgctggagaccgaccccgacgtggtggactacctgctgagaagaaaggccagccagagcagcaccagcagcgtgctgcccgccgccgtgcaggcctgcccccagtaccccgccagcatgttcaccccctag

SEQ ID NO: 162214 - protein, 986 aa, Artificial Sequence
  derived and/or modified sequence
MPGVARLPLLLGLLLLPRPGRPLDLADYTYDLAEEDDSEPLNYKDPCKAAAFLGDIALDEEDLRAFQVQQAVDLRRHTARKSSIKAAVPGNTSTPSCQSTNGQPQRGACGRWRGRSRSRRAATSRPERVWPDGVIPFVIGGNFTGSQRAVFRQAMRHWEKHTCVTFLERTDEDSYIVFTYRPCGCCSYVGRRGGGPQAISIGKNCDKFGIVVHELGHVVGFWHEHTRPDRDRHVSIVRENIQPGQEYNFLKMEPQEVESLGETYDFDSIMHYARNTFSRGIFLDTIVPKYEVNGVKPPIGQRTRLSKGDIAQARKLYKCPACGETLQDSTGNFSSPEYPNGYSAHMHCVWRISVTPGEKIILNFTSLDLYRSRLCWYDYVEVRDGFWRKAPLRGRFCGSKLPEPIVSTDSRLWVEFRSSSNWVGKGFFAVYEAICGGDVKKDYGHIQSPNYPDDYRPSKVCIWRIQVSEGFHVGLTFQSFEIERHDSCAYDYLEVRDGHSESSTLIGRYCGYEKPDDIKSTSSRLWLKFVSDGSINKAGFAVNFFKEVDECSRPNRGGCEQRCLNTLGSYKCSCDPGYELAPDKRRCEAACGGFLTKLNGSITSPGWPKEYPPNKNCIWQLVAPTQYRISLQFDFFETEGNDVCKYDFVEVRSGLTADSKLHGKFCGSEKPEVITSQYNNMRVEFKSDNTVSKKGFKAHFFSDKDECSKDNGGCQQDCVNTFGSYECQCRSGFVLHDNKHDCKEAGCDHKVTSTSGTITSPNWPDKYPSKKECTWAISSTPGHRVKLTFMEMDIESQPECAYDHLEVFDGRDAKAPVLGRFCGSKKPEPVLATGSRMFLRFYSDNSVQRKGFQASHATECGGQVRADVKTKDLYSHAQFGDNNYPGGVDCEWVIVAEEGYGVELVFQTFEVEEETDCGYDYMELFDGYDSTAPRLGRYCGSGPPEEVYSAGDSVLVKFHSDDTITKKGFHLRYTSTKFQDTLHSRK

SEQ ID NO: 162215 - protein, 302 aa, Artificial Sequence
  derived and/or modified sequence
MPGVARLPLLLGLLLLPRPGRPLDLADYTYDLAEEDDSEPLNYKDPCKAAAFLGDIALDEEDLRAFQVQQAVDLRRHTARKSSIKAAVPGNTSTPSCQSTNGQPQRGACGRWRGRSRSRRAATSRPERVWPDGVIPFVIGGNFTGSQRAVFRQAMRHWEKHTCVTFLERTDEDSYIVFTYRPCGCCSYVGRRGGGPQAISIGKNCDKFGIVVHELGHVVGFWHEHTRPDRDRHVSIVRENIQPGVLHSSLLLLSCGSRNGASFPCSLESSIHQALCWTGLFLRPSPFPRLPLAAPRTLRAGV

SEQ ID NO: 162216 - protein, 823 aa, Artificial Sequence
  derived and/or modified sequence
MPGVARLPLLLGLLLLPRPGRPLDLADYTYDLAEEDDSEPLNYKDPCKAAAFLGDIALDEEDLRAFQVQQAVDLRRHTARKSSIKAAVPGNTSTPSCQSTNGQPQRGACGRWRGRSRSRRAATSRPERVWPDGVIPFVIGGNFTGSQRAVFRQAMRHWEKHTCVTFLERTDEDSYIVFTYRPCGCCSYVGRRGGGPQAISIGKNCDKFGIVVHELGHVVGFWHEHTRPDRDRHVSIVRENIQPGQEYNFLKMEPQEVESLGETYDFDSIMHYARNTFSRGIFLDTIVPKYEVNGVKPPIGQRTRLSKGDIAQARKLYKCPACGETLQDSTGNFSSPEYPNGYSAHMHCVWRISVTPGEKIILNFTSLDLYRSRLCWYDYVEVRDGFWRKAPLRGRFCGSKLPEPIVSTDSRLWVEFRSSSNWVGKGFFAVYEAICGGDVKKDYGHIQSPNYPDDYRPSKVCIWRIQVSEGFHVGLTFQSFEIERHDSCAYDYLEVRDGHSESSTLIGRYCGYEKPDDIKSTSSRLWLKFVSDGSINKAGFAVNFFKEVDECSRPNRGGCEQRCLNTLGSYKCSCDPGYELAPDKRRCEAACGGFLTKLNGSITSPGWPKEYPPNKNCIWQLVAPTQYRISLQFDFFETEGNDVCKYDFVEVRSGLTADSKLHGKFCGSEKPEVITSQYNNMRVEFKSDNTVSKKGFKAHFFSVLEGAGDRHSHLSGLELLLCPHALVDTVPAPPSALHGDTHAHTHTHVHTHCPIAQETCRGPPLGASRLSPQGPGHLTLAPQEGSYLDFWDTHRGDPKPRRRRKSLKTFSLTPATFRGIWAL

SEQ ID NO: 162217 - DNA, 3835 bp, Artificial Sequence
  derived and/or modified sequence
gtcggagggagggagggagggagagaaagaaagagagaaaaagaaggaaagggagagggagacggctggagcccgaggacgagcgcggagccgcggaccgagcggggggcgggagacaggaaggagggaggcgagcagagggaaggggaagaggtcggggagcgagggcgggagcggtcgcggtcgcgatcgagcaagcaagcgggcgagaggacgccctcccctggcctccagtgcgccgcttccctcgccgccgccccgccagcatgcccggcgtggcccgcctgccgctgctgctcgggctgctgctgctcccgcgtcccggccggccgctggacttggccgactacacctatgacctggcggaggaggacgactcggagcccctcaactacaaagacccctgcaaggcggctgcctttcttggggacattgccctggacgaagaggacctgagggccttccaggtacagcaggctgtggatctcagacggcacacagctcgtaagtcctccatcaaagctgcagttccaggaaacacttctacccccagctgccagagcaccaacgggcagcctcagaggggagcctgtgggagatggagaggtagatcccgtagccggcgggcggcgacgtcccgaccagagcgtgtgtggcccgatggggtcatcccctttgtcattgggggaaacttcactggtagccagagggcagtcttccggcaggccatgaggcactgggagaagcacacctgtgtcaccttcctggagcgcactgacgaggacagctatattgtgttcacctatcgaccttgcgggtgctgctcctacgtgggtcgccgcggcgggggcccccaggccatctccatcggcaagaactgtgacaagttcggcattgtggtccacgagctgggccacgtcgtcggcttctggcacgaacacactcggccagaccgggaccgccacgtttccatcgttcgtgagaacatccagccagggcaggagtataacttcctgaagatggagcctcaggaggtggagtccctgggggagacctatgacttcgacagcatcatgcattacgctcggaacacattctccaggggcatcttcctggataccattgtccccaagtatgaggtgaacggggtgaaacctcccattggccaaaggacacggctcagcaagggggacattgcccaagcccgcaagctttacaagtgcccagcctgtggagagaccctgcaagacagcacaggcaacttctcctcccctgaataccccaatggctactctgctcacatgcactgcgtgtggcgcatctctgtcacacccggggagaagatcatcctgaacttcacgtccctggacctgtaccgcagccgcctgtgctggtacgactatgtggaggtccgagatggcttctggaggaaggcgcccctccgaggccgcttctgcgggtccaaactccctgagcctatcgtctccactgacagccgcctctgggttgaattccgcagcagcagcaattgggttggaaagggcttctttgcagtctacgaagccatctgcgggggtgatgtgaaaaaggactatggccacattcaatcgcccaactacccagacgattaccggcccagcaaagtctgcatctggcggatccaggtgtctgagggcttccacgtgggcctcacattccagtcctttgagattgagcgccacgacagctgtgcctacgactatctggaggtgcgcgacgggcacagtgagagcagcaccctcatcgggcgctactgtggctatgagaagcctgatgacatcaagagcacgtccagccgcctctggctcaagttcgtctctgacgggtccattaacaaagcgggctttgccgtcaactttttcaaagaggtggacgagtgctctcggcccaaccgcgggggctgtgagcagcggtgcctcaacaccctgggcagctacaagtgcagctgtgaccccgggtacgagctggccccagacaagcgccgctgtgaggctgcttgtggcggattcctcaccaagctcaacggctccatcaccagcccgggctggcccaaggagtacccccccaacaagaactgcatctggcagctggtggcccccacccagtaccgcatctccctgcagtttgacttctttgagacagagggcaatgatgtgtgcaagtacgacttcgtggaggtgcgcagtggactcacagctgactccaagctgcatggcaagttctgtggttctgagaagcccgaggtcatcacctcccagtacaacaacatgcgcgtggagttcaagtccgacaacaccgtgtccaaaaagggcttcaaggcccacttcttctcagacaaggacgagtgctccaaggataacggcggctgccagcaggactgcgtcaacacgttcggcagttatgagtgccaatgccgcagtggcttcgtcctccatgacaacaagcacgactgcaaagaagccggctgtgaccacaaggtgacatccaccagtggtaccatcaccagccccaactggcctgacaagtatcccagcaagaaggagtgcacgtgggccatctccagcacccccgggcaccgggtcaagctgaccttcatggagatggacatcgagtcccagcctgagtgtgcctacgaccacctagaggtgttcgacgggcgagacgccaaggcccccgtcctcggccgcttctgtgggagcaagaagcccgagcccgtcctggccacaggcagccgcatgttcctgcgcttctactcagataactcggtccagcgaaagggcttccaggcctcccacgccacagagtgcgggggccaggtacgggcagacgtgaagaccaaggacctttactcccacgcccagtttggcgacaacaactaccctgggggtgtggactgtgagtgggtcattgtggccgaggaaggctacggcgtggagctcgtgttccagacctttgaggtggaggaggagaccgactgcggctatgactacatggagctcttcgacggctacgacagcacagcccccaggctggggcgctactgtggctcagggcctcctgaggaggtgtactcggcgggagattctgtcctggtgaagttccactcggatgacaccatcaccaaaaaaggtttccacctgcgatacaccagcaccaagttccaggacacactccacagcaggaagtgaccactgcctgagcaggggcggggactggagcctgctgcccttggtcgcctagactggatagtgggggtgggcggaaggcaacgcaccatccctctcccccaggccccaggacctgcagggccaatggcctggtgagactgtccataggaggtgggggaactggactccggcataagccacttccccacaaacccccaccagcaaggggctggggccagggagcagagcttccacaagacatttcgaagtcatcattcctctcttagggggccctgcctggtggcaagagggaatgtcagcaggaccccatcgccatccctgtgtctctacacgctgtattgtgtatcaccgggggcattattttcattgtaatgttcatttcccacccctgctccagcctcgatttggttttattttgagcccccattccaccaccccagtttcctggggcacaagtgtctgtgcatgtcccccaggagccaccgtggggagccgatggggaggggatggagaaacaagacagggcttctctcaggcccagtggccggtcagccacaccagggcaccgcagccaataaaccgaaagtgttacagccaaaaaaaaaaaa

SEQ ID NO: 162218 - DNA, 2961 bp, Artificial Sequence
  derived and/or modified sequence
atgccaggcgttgccagattacctcttctactcgggctgctgctgttgcctagacctggccgtccattggacctggctgactatacttatgacctggctgaggaggatgattccgagcccctgaactacaaggacccttgcaaagccgcagcttttctaggcgacatcgccctagacgaggaggatctgcgggcgtttcaggttcaacaggctgtagacttgagaaggcataccgcacgaaagtcttccataaaggcagcggtgccgggcaacacgtccaccccttcttgtcagtccactaatggccagccgcaacgtggagcttgtggtaggtggcgcggtcgcagtcggtctcgccgcgccgcaacttctcggccggaacgcgtgtggcccgacggggtgataccgtttgtgatcggaggtaactttacagggtcccaacgagccgtgtttcggcaggcaatgaggcattgggagaagcatacttgcgtaacctttctggaacgcaccgacgaagattcttatatcgtcttcacctacaggccctgtggatgctgctcatatgtgggcaggagaggcggagggccccaggcaattagtatcggaaagaattgtgacaaattcgggattgtggtacatgagcttggccatgtagtgggattttggcacgaacacaccaggcccgatcgggatcgacacgtgtcgatcgtacgggaaaacattcaaccaggtcaggaatacaacttcttgaagatggaaccgcaggaagtagaaagccttggggagacttacgacttcgactccatcatgcactacgcaagaaacaccttctctagaggaatcttcctggataccattgtccctaagtatgaggtcaatggcgtgaagcctcccattggtcagagaacccggctctccaaaggcgatatcgcccaggcccgcaaactgtacaaatgtccagcttgcggcgaaacgctgcaggattcaacaggcaatttcagctctccggaatatccaaatggatactctgcccacatgcactgcgtttggcgcattagtgtgacccctggtgaaaagataatcctgaactttacatctctagacctgtacagaagtagactgtgctggtacgactatgtcgaggttcgcgacggtttctggcggaaggcacccctaaggggccgtttctgtggttccaagctacctgaacctatcgtcagcaccgactccaggttgtgggtggaattccgtagcagtagcaattgggtggggaaaggattctttgccgtatatgaggccatttgcggcggggatgtcaagaaagactacggccacatccaatcccccaactatcccgacgactatcgcccctcaaaagtctgcatctggcgaattcaggtgagtgagggttttcacgtaggtctgacattccaatcatttgaaatcgagcgccacgacagttgtgcttatgactacctggaggtgcgggatggccactctgaaagctcaacgctgatcggccgctattgtggctacgaaaagccagacgacattaaatccaccagctctaggctgtggctgaaatttgtgagcgacggttcgattaataaagctggatttgctgtgaattttttcaaggaggtcgacgagtgctctagacctaacaggggcggctgtgagcagcgctgcctcaatactctggggagttataagtgctcatgtgaccccggatatgaactggcacccgacaagcgccgctgtgaagccgcgtgcggaggattcctgaccaaactgaacgggagtattacttctcctggctggccaaaagagtacccacctaacaagaactgcatctggcagctggtggcccctacgcagtacaggatatctctgcaattcgattttttcgagacagaggggaatgacgtatgcaagtacgacttcgttgaggtgcgttcaggcctgaccgcagattcgaaacttcacggcaaattttgtggaagtgaaaaacccgaggtgataactagccagtataacaatatgagagtagagtttaaatcagataatactgtgtctaaaaaaggcttcaaagcccattttttttctgacaaggatgaatgcagcaaggataacggaggctgtcagcaagattgcgtcaacactttcgggtcatatgaatgccagtgcagatccgggttcgtgctccacgacaacaaacatgattgcaaggaggccgggtgcgaccacaaagttaccagcaccagtggaaccattaccagtcccaactggcccgataaatacccttctaagaaggagtgcacatgggcaataagctctaccccggggcacagagtgaaactcacttttatggagatggacatcgagagccaaccggagtgcgcttacgatcatctggaagtcttcgacgggagggacgctaaggctcctgtgcttggtagattctgcggctctaagaagcctgagccagtactcgctaccgggtcgcggatgtttctgcgcttctactctgacaactcggtccagagaaaaggattccaggcgagccacgcaaccgaatgtggaggccaggtgcgcgctgatgtcaagacaaaggatctgtactcacacgcccaattcggggataacaattaccccggaggcgtagattgtgagtgggtgatcgtggctgaagaaggatacggggttgagctggtgttccaaaccttcgaagtagaagaggaaactgattgcggatacgactatatggagctttttgacggctacgattctactgcgcctagacttggccgctattgcggtagtgggcctccagaggaagtgtactctgctggggattctgtgctggtaaaattccacagcgatgacaccatcactaagaaaggtttccacttgagatacacatctaccaagttccaggacacacttcatagccggaagtag

SEQ ID NO: 162219 - DNA, 2961 bp, Artificial Sequence
  derived and/or modified sequence
atgcctggggtggcccggctgcccctgctgctgggcctgctgctgctgcccaggcctggccggcccctggacctggccgactacacctatgacctggccgaggaggatgacagcgagcccctgaactacaaggacccctgcaaggccgccgccttcctgggggacatcgccctggatgaggaggacctgcgggccttccaggtgcagcaggccgtggacctgcggcggcacacagccaggaagagcagcatcaaggctgctgtgcccggcaacaccagcacccccagctgccagagcaccaacggccagccccagagaggagcctgtggccgctggaggggccgcagccgcagcagaagagctgccaccagcaggcctgagcgggtgtggccagatggagtcatcccctttgtgattggaggcaacttcaccggcagccagagagctgtgttccggcaggccatgaggcactgggagaagcacacctgtgtgaccttcctggagaggacagatgaggacagctacatcgtgttcacctaccggccctgtggctgctgcagctatgtgggcagaagaggaggcggcccccaggccatcagcatcggcaagaactgtgacaagtttggcatcgtggtgcatgagctgggccacgtggtgggcttctggcatgagcacaccaggccagaccgggacagacatgtgtccatcgtgcgggagaacatccagcccggccaggagtacaacttcctgaagatggagccccaggaggtggagagcctgggggagacctatgactttgacagcatcatgcactacgccaggaacaccttcagccggggcatcttcctggacaccatcgtgcccaagtatgaggtgaatggagtgaagccacccatcggccagaggacccggctgagcaaaggagacatcgcccaggccaggaagctgtacaagtgcccagcctgtggggagaccctgcaggacagcacaggcaacttcagcagccctgagtaccccaacggctacagcgcccacatgcactgtgtgtggaggatctctgtgaccccaggagagaagatcatcctgaacttcaccagcctggacctgtaccgcagccggctgtgctggtatgactatgtggaggtgagagatggcttctggaggaaggcccccctgcggggccgcttctgtggcagcaagctgcctgagcccatcgtgtccacagacagccggctgtgggtggagttccgcagcagcagcaactgggtgggcaagggcttctttgctgtgtatgaggccatctgtggaggagatgtgaagaaggactatggccacatccagagccccaactacccagatgactaccggcccagcaaggtgtgcatctggaggatccaggtgtctgagggcttccacgtgggcctgaccttccagagctttgaaattgaaagacatgacagctgtgcctatgactacctggaggtgagagatggccacagcgagagcagcaccctcatcggccgctactgcggctatgagaagccagatgacatcaagagcaccagcagccggctgtggctgaagtttgtgtctgatggcagcatcaacaaggccggctttgctgtgaacttcttcaaggaggtggatgagtgcagccggcccaacagaggaggctgtgagcagcgctgcctgaacaccctgggcagctacaagtgcagctgtgaccccggctatgagctggccccagacaagagaagatgtgaggccgcctgtggcggcttcctgaccaagctgaatggcagcatcaccagccctggctggcccaaggagtacccacccaacaagaactgcatctggcagctggtggcccccacccagtaccgcatcagcctgcagtttgacttctttgaaacagagggcaatgatgtgtgcaagtatgactttgtggaggtgcgcagcggcctgacagctgacagcaagctgcacggcaagttctgtggcagcgagaagccagaggtgatcaccagccagtacaacaacatgagggtggagttcaagagtgacaacacagtgtccaagaagggcttcaaggcccacttcttcagtgacaaggatgagtgcagcaaggacaatggaggctgccagcaggactgtgtgaacaccttcggcagctatgagtgccagtgccgcagcggctttgtgctgcatgacaacaagcatgactgcaaggaggccggctgtgaccacaaggtgaccagcaccagcggcaccatcaccagccccaactggccagacaagtaccccagcaagaaggagtgcacctgggccatcagcagcaccccaggccaccgggtgaagctgaccttcatggagatggacatcgagagccagccagaatgtgcctatgaccacctggaggtgtttgatggaagagatgccaaggcccctgtgctgggccgcttctgtggcagcaagaagccagagcctgtgctggccaccggcagcaggatgttcctgcgcttctacagcgacaacagcgtgcagaggaagggcttccaggccagccacgccacagaatgtggcggccaggtgcgggcagatgtgaagaccaaggacctgtacagccacgcccagtttggagacaacaactacccaggaggagtggactgtgagtgggtgattgtggccgaggagggctacggcgtggagctggtgttccagacctttgaggtggaggaggagacagactgtggctatgactacatggagctgtttgatggctatgacagcacagccccccggctgggccgctactgcggcagcggccccccagaggaggtgtacagcgctggggacagcgtgctggtgaagttccacagtgatgacaccatcaccaagaagggcttccacctgcgctacaccagcaccaagttccaggacaccctgcacagcaggaagtag

SEQ ID NO: 162220 - DNA, 2961 bp, Artificial Sequence
  derived and/or modified sequence
atgcccggcgtggcccggctgcccctgctgctgggcctgctgctgttgcccaggccaggccgacctctggacctcgccgattatacctatgacctggccgaagaagacgactccgagccacttaattacaaggatccttgtaaggcagcggcattcttgggtgatatcgctctggacgaggaagacctgcgggcattccaggtgcaacaggctgtggacctccgacggcacactgcccgaaagagcagcattaaagccgctgtgccgggaaacacgtccacaccttcctgccagagcacgaacggccagcctcagagaggtgcctgcggcagatggaggggacggtcccgaagccggcgggccgctacatctcggccagagcgagtgtggccagatggagtgatcccgttcgtcattggagggaatttcacaggctctcagcgcgctgtgttcagacaagctatgagacattgggagaagcacacgtgtgtgactttcctcgagagaacggacgaagacagttatatcgtcttcacttacagaccgtgcggctgctgtagctacgtcggacgccggggaggtggaccacaggcaatttctattgggaagaactgcgataaattcggcatagtcgtgcacgagctgggacacgtagtgggcttctggcatgagcatacccggccggatagagaccggcacgtgtcaattgtgcgggaaaacatccagcccggtcaggaatacaactttctgaagatggaaccacaggaggtcgagtcactgggcgaaacctacgactttgacagtatcatgcattacgcccgcaataccttcagtcgaggcatatttctggataccattgtgcccaagtatgaggtcaatggtgtaaagcctcccatcgggcagcgaacgcggctgtccaagggagatattgcccaagcaaggaagctctacaaatgtcctgcatgcggcgaaaccctccaggactctactggtaacttctctagccctgagtacccaaatgggtactctgctcatatgcactgtgtttggcggatctccgtgacccccggtgagaaaatcatattgaacttcacctcgctggacctttaccgttcccgcctgtgctggtatgattacgttgaggtgcgcgatggcttctggcgaaaagctccgctaaggggacgcttctgcggtagcaagttgcctgaaccaattgtgtcaaccgattcccgactatgggtggagttcagatctagctcgaactgggtgggcaagggattcttcgccgtatacgaggctatttgcgggggggacgtgaaaaaagattacggccacattcagagtccaaactaccctgatgactaccgaccatctaaggtttgcatttggcggatacaggtgagcgagggcttccacgtcggactgaccttccagtccttcgagattgagcgtcacgattcatgcgcatacgactacctcgaggttcgagatggtcactccgagtcctccacactgattgggcgctattgtgggtacgaaaaacccgacgacatcaaaagtacatccagccgcctgtggctcaagtttgtgagcgacggttcaatcaataaagccggatttgctgtaaacttcttcaaggaggtggatgagtgttctcgcccaaatagaggtgggtgtgaacagagatgtctgaacaccctcggttcgtataagtgtagttgtgaccctgggtacgaattagcaccagacaaacgacgctgcgaggccgcctgtggcgggtttttgaccaaactgaacggctcaattactagcccaggctggcctaaagaataccctccaaataagaactgtatctggcagctggttgcaccaacccagtacagaatatcactacagttcgatttctttgaaacagagggcaatgatgtgtgcaaatacgacttcgtggaggtacgtagcgggctcaccgctgattctaaactgcacggcaaattctgcggctctgaaaagcccgaagtgatcactagtcaatataataacatgcgggttgagtttaagagtgataacaccgtgagcaaaaaaggctttaaagctcattttttctctgacaaggacgaatgcagtaaggacaatggtgggtgccagcaggactgtgttaatacgtttggctcatacgagtgccagtgtcgttccggattcgttcttcatgataataagcatgattgtaaggaagcgggttgtgatcacaaagtaaccagcacctccggcaccattacctctccaaattggcccgataagtatcccagtaaaaaagaatgtacctgggctattagttcgacacctgggcacagagtcaagctgactttcatggagatggacatagagagtcagcccgagtgtgcctacgatcatctagaggtttttgacggccgcgacgccaaggcgccagtgcttgggagattttgcgggtccaaaaagccggagcctgtcctagcaactggtagccgaatgttcctgagattctactctgataactctgtccagagaaaggggttccaggctagccacgctacagagtgtggcgggcaagtgagggccgatgtgaagaccaaggatctatacagtcatgcccagttcggcgacaacaattaccctggtggggtggattgcgaatgggtaatcgtagccgaggaaggctatggcgtggagctggtctttcagaccttcgaagttgaggaggagactgactgcggctatgattacatggaactgttcgacggatatgatagcaccgcaccgagattggggcggtactgtggtagtggtcctcctgaggaggtgtatagtgcaggggattcagtgctggtaaaattccattccgatgataccattactaaaaaagggtttcaccttcgctatacatccacaaaatttcaagataccctccacagtcgcaaatag

SEQ ID NO: 162221 - DNA, 2961 bp, Artificial Sequence
  derived and/or modified sequence
atgccgggtgtggccaggctccccctattactcggcctgctgctgcttcctagacctggtcgccctttagatctggccgattatacttatgatctcgccgaagaggacgacagcgagccactgaattataaggatccctgcaaggccgcagctttcctcggagacatcgcactcgatgaagaagacctgagagcctttcaggtgcaacaagccgtcgatctccggaggcataccgccagaaagtcaagcatcaaagcagccgtccctggcaatacgtcaacccccagttgtcagagcacgaacggtcagccgcagcggggagcatgcggtcgatggcgcggacggtcccgatctcggagggctgctaccagcagaccagagagggtctggccagatggggtcatacctttcgttatcggcggtaacttcaccggttcgcagagagccgtgttccggcaagcaatgcggcactgggaaaagcacacgtgcgtgacatttctcgaacggactgacgaggactcctatattgtgttcacttaccgcccttgtggttgttgcagctacgtcggacgccgaggcggaggccctcaggctataagtatcggaaaaaactgcgataaatttggcatagttgtgcatgaactgggacacgtggttgggttttggcacgaacacacccgcccagacagagatcgccatgtgtctatcgtccgtgaaaatattcagccagggcaagagtataatttccttaagatggagcctcaggaggtggagagtctgggcgagacatacgatttcgatagcattatgcattatgctcggaatacctttagtcgaggtatattccttgacactattgtacctaagtatgaagttaacggagtgaagccaccaatcggacagagaacgcggttaagtaagggggacatcgcacaggcccgaaaactatacaagtgccccgcttgcggagagactctgcaggattctaccggcaatttctccagtccagagtacccgaacggttattcagcccatatgcattgtgtttggcgtatctcagtcacacccggtgagaagatcatcctgaacttcaccagcctggacctgtaccgctccagactgtgctggtatgactatgttgaggttcgagacggattctggcgcaaggcaccactgcggggtaggttttgcggttccaagctcccagagcccattgtgtctaccgacagcaggttgtgggtcgaatttcgttcaagctccaactgggtcgggaaaggctttttcgcggtgtacgaagcgatctgcggcggagatgttaaaaaggactacgggcacattcaatcccccaactatcccgatgattacagaccgtctaaagtctgcatctggagaatccaggtgtccgaagggtttcacgtcggcctgacattccagagcttcgagatcgagcgacacgatagttgcgcgtatgactaccttgaagtgcgggacggccactcagaatcaagcaccttgatcggtcgctactgcggatatgagaaacctgatgatattaagtctacatcaagccggctgtggctcaagtttgtaagtgatggttctatcaataaagccggatttgccgtcaatttcttcaaggaagtcgacgaatgtagcaggccaaaccggggtggctgtgagcagcggtgccttaatacattaggtagctacaagtgctcgtgcgatccagggtatgagctcgcccctgacaagcgtagatgtgaagccgcttgcggtgggttccttacgaaactgaacgggagcatcacgtccccaggttggccaaaagagtatcctcccaataaaaattgcatttggcagctcgttgctccaacccagtatagaatcagtctgcagttcgattttttcgagacagaaggaaacgacgtatgcaaatatgatttcgtagaagtgcggtccggactcacggccgacagtaagctgcacgggaaattctgcgggagtgagaaaccagaagttatcacctcccagtacaacaatatgcgggtcgaatttaaaagcgataataccgtctcaaagaagggattcaaggcgcattttttctccgacaaagacgaatgcagtaaggataacggaggctgtcagcaagattgcgtgaacacatttgggtcatacgagtgccagtgtcgctccggcttcgttctgcacgataacaagcacgactgtaaagaggctggttgcgatcacaaggtgactagtacatctggaaccatcacaagtcccaattggcccgataagtatccttctaagaaggaatgtacttgggctatatctagtacaccaggacacagggtaaagcttaccttcatggaaatggacatcgaatcacagcctgagtgtgcatacgatcacctggaggtgttcgacggtagggacgctaaggccccagttcttggcagattctgtggatccaagaagccggagcccgtgctcgcaaccgggtcccgcatgtttttgaggttttattccgacaactccgtccagcgcaagggttttcaggctagccacgcaacagagtgcggaggccaggtgcgggctgatgtaaagaccaaggacctgtattctcatgcacaattcggtgacaacaactatccaggcggagtggactgcgagtgggtgatcgtggccgaagagggctacggggtggaactggtgtttcagacattcgaggtggaagaagagacagattgcggctacgattacatggaactgttcgatgggtacgattccacagctcctcgcttgggacgatattgcggatccgggccacctgaagaggtgtacagcgcaggcgactccgttttggtgaagttccatagtgatgatacaatcacaaagaagggattccatctaaggtacacatcgactaaattccaggataccctgcactcgcgcaaatag

SEQ ID NO: 162222 - DNA, 4229 bp, Artificial Sequence
  derived and/or modified sequence
cgagagagcgagggtccaagaaggggagatagggagacgcgggcggagagaccgacccgaggcgggggcgcggggcaggggcggcgcgaggacctgacagcgtgtcccgcggcggggcgggggctcggccgcgcgcccgcgggggaggccgccgctagagggcacttcaggagggacagccctcccggcaccccggggcccgagctccagccccggcctcgcggcccgcggcccgcggcccgggcggcccgagccccctccccgggcgcgcggctctccgccttccccgccccggctggcgcgcggcccggcccggccgagcactgtcccggccccgaggggggcagagctcgggcgaaaacccgccctccagcgagctcatttccctaaaaaggggggggggagtcggagggagggagggagggagagaaagaaagagagaaaaagaaggaaagggagagggagacggctggagcccgaggacgagcgcggagccgcggaccgagcggggggcgggagacaggaaggagggaggcgagcagagggaaggggaagaggtcggggagcgagggcgggagcggtcgcggtcgcgatcgagcaagcaagcgggcgagaggacgccctcccctggcctccagtgcgccgcttccctcgccgccgccccgccagcatgcccggcgtggcccgcctgccgctgctgctcgggctgctgctgctcccgcgtcccggccggccgctggacttggccgactacacctatgacctggcggaggaggacgactcggagcccctcaactacaaagacccctgcaaggcggctgcctttcttggggacattgccctggacgaagaggacctgagggccttccaggtacagcaggctgtggatctcagacggcacacagctcgtaagtcctccatcaaagctgcagttccaggaaacacttctacccccagctgccagagcaccaacgggcagcctcagaggggagcctgtgggagatggagaggtagatcccgtagccggcgggcggcgacgtcccgaccagagcgtgtgtggcccgatggggtcatcccctttgtcattgggggaaacttcactggtagccagagggcagtcttccggcaggccatgaggcactgggagaagcacacctgtgtcaccttcctggagcgcactgacgaggacagctatattgtgttcacctatcgaccttgcgggtgctgctcctacgtgggtcgccgcggcgggggcccccaggccatctccatcggcaagaactgtgacaagttcggcattgtggtccacgagctgggccacgtcgtcggcttctggcacgaacacactcggccagaccgggaccgccacgtttccatcgttcgtgagaacatccagccagggcaggagtataacttcctgaagatggagcctcaggaggtggagtccctgggggagacctatgacttcgacagcatcatgcattacgctcggaacacattctccaggggcatcttcctggataccattgtccccaagtatgaggtgaacggggtgaaacctcccattggccaaaggacacggctcagcaagggggacattgcccaagcccgcaagctttacaagtgcccagcctgtggagagaccctgcaagacagcacaggcaacttctcctcccctgaataccccaatggctactctgctcacatgcactgcgtgtggcgcatctctgtcacacccggggagaagatcatcctgaacttcacgtccctggacctgtaccgcagccgcctgtgctggtacgactatgtggaggtccgagatggcttctggaggaaggcgcccctccgaggccgcttctgcgggtccaaactccctgagcctatcgtctccactgacagccgcctctgggttgaattccgcagcagcagcaattgggttggaaagggcttctttgcagtctacgaagccatctgcgggggtgatgtgaaaaaggactatggccacattcaatcgcccaactacccagacgattaccggcccagcaaagtctgcatctggcggatccaggtgtctgagggcttccacgtgggcctcacattccagtcctttgagattgagcgccacgacagctgtgcctacgactatctggaggtgcgcgacgggcacagtgagagcagcaccctcatcgggcgctactgtggctatgagaagcctgatgacatcaagagcacgtccagccgcctctggctcaagttcgtctctgacgggtccattaacaaagcgggctttgccgtcaactttttcaaagaggtggacgagtgctctcggcccaaccgcgggggctgtgagcagcggtgcctcaacaccctgggcagctacaagtgcagctgtgaccccgggtacgagctggccccagacaagcgccgctgtgaggctgcttgtggcggattcctcaccaagctcaacggctccatcaccagcccgggctggcccaaggagtacccccccaacaagaactgcatctggcagctggtggcccccacccagtaccgcatctccctgcagtttgacttctttgagacagagggcaatgatgtgtgcaagtacgacttcgtggaggtgcgcagtggactcacagctgactccaagctgcatggcaagttctgtggttctgagaagcccgaggtcatcacctcccagtacaacaacatgcgcgtggagttcaagtccgacaacaccgtgtccaaaaagggcttcaaggcccacttcttctcagacaaggacgagtgctccaaggataacggcggctgccagcaggactgcgtcaacacgttcggcagttatgagtgccaatgccgcagtggcttcgtcctccatgacaacaagcacgactgcaaagaagccggctgtgaccacaaggtgacatccaccagtggtaccatcaccagccccaactggcctgacaagtatcccagcaagaaggagtgcacgtgggccatctccagcacccccgggcaccgggtcaagctgaccttcatggagatggacatcgagtcccagcctgagtgtgcctacgaccacctagaggtgttcgacgggcgagacgccaaggcccccgtcctcggccgcttctgtgggagcaagaagcccgagcccgtcctggccacaggcagccgcatgttcctgcgcttctactcagataactcggtccagcgaaagggcttccaggcctcccacgccacagagtgcgggggccaggtacgggcagacgtgaagaccaaggacctttactcccacgcccagtttggcgacaacaactaccctgggggtgtggactgtgagtgggtcattgtggccgaggaaggctacggcgtggagctcgtgttccagacctttgaggtggaggaggagaccgactgcggctatgactacatggagctcttcgacggctacgacagcacagcccccaggctggggcgctactgtggctcagggcctcctgaggaggtgtactcggcgggagattctgtcctggtgaagttccactcggatgacaccatcaccaaaaaaggtttccacctgcgatacaccagcaccaagttccaggacacactccacagcaggaagtgaccactgcctgagcaggggcggggactggagcctgctgcccttggtcgcctagactggatagtgggggtgggcggaaggcaacgcaccatccctctcccccaggccccaggacctgcagggccaatggcctggtgagactgtccataggaggtgggggaactggactccggcataagccacttccccacaaacccccaccagcaaggggctggggccagggagcagagcttccacaagacatttcgaagtcatcattcctctcttagggggccctgcctggtggcaagagggaatgtcagcaggaccccatcgccatccctgtgtctctacacgctgtattgtgtatcaccgggggcattattttcattgtaatgttcatttcccacccctgctccagcctcgatttggttttattttgagcccccattccaccaccccagtttcctggggcacaagtgtctgtgcatgtcccccaggagccaccgtggggagccgatggggaggggatggagaaacaagacagggcttctctcaggcccagtggccggtcagccacaccagggcaccgcagccaataaaccgaaagtgttacagccaa

SEQ ID NO: 162223 - DNA, 3989 bp, Artificial Sequence
  derived and/or modified sequence
gtcggagggagggagggagggagagaaagaaagagagaaaaagaaggaaagggagagggagacggctggagcccgaggacgagcgcggagccgcggaccgagcggggggcgggagacaggaaggagggaggcgagcagagggaaggggaagaggtcggggagcgagggcgggagcggtcgcggtcgcgatcgagcaagcaagcgggcgagaggacgccctcccctggcctccagtgcgccgcttccctcgccgccgccccgccagcatgcccggcgtggcccgcctgccgctgctgctcgggctgctgctgctcccgcgtcccggccggccgctggacttggccgactacacctatgacctggcggaggaggacgactcggagcccctcaactacaaagacccctgcaaggcggctgcctttcttggggacattgccctggacgaagaggacctgagggccttccaggtacagcaggctgtggatctcagacggcacacagctcgtaagtcctccatcaaagctgcagttccaggaaacacttctacccccagctgccagagcaccaacgggcagcctcagaggggagcctgtgggagatggagaggtagatcccgtagccggcgggcggcgacgtcccgaccagagcgtgtgtggcccgatggggtcatcccctttgtcattgggggaaacttcactggtagccagagggcagtcttccggcaggccatgaggcactgggagaagcacacctgtgtcaccttcctggagcgcactgacgaggacagctatattgtgttcacctatcgaccttgcgggtgctgctcctacgtgggtcgccgcggcgggggcccccaggccatctccatcggcaagaactgtgacaagttcggcattgtggtccacgagctgggccacgtcgtcggcttctggcacgaacacactcggccagaccgggaccgccacgtttccatcgttcgtgagaacatccagccaggcgttctccactcttcactgctccttctcagctgtggctctagaaatggtgcttccttcccatgttcccttgagtcctccattcaccaggccctctgctggacaggactcttcctgagaccctccccattccccaggctccccttggctgctccccggaccctcagggcaggagtataacttcctgaagatggagcctcaggaggtggagtccctgggggagacctatgacttcgacagcatcatgcattacgctcggaacacattctccaggggcatcttcctggataccattgtccccaagtatgaggtgaacggggtgaaacctcccattggccaaaggacacggctcagcaagggggacattgcccaagcccgcaagctttacaagtgcccagcctgtggagagaccctgcaagacagcacaggcaacttctcctcccctgaataccccaatggctactctgctcacatgcactgcgtgtggcgcatctctgtcacacccggggagaagatcatcctgaacttcacgtccctggacctgtaccgcagccgcctgtgctggtacgactatgtggaggtccgagatggcttctggaggaaggcgcccctccgaggccgcttctgcgggtccaaactccctgagcctatcgtctccactgacagccgcctctgggttgaattccgcagcagcagcaattgggttggaaagggcttctttgcagtctacgaagccatctgcgggggtgatgtgaaaaaggactatggccacattcaatcgcccaactacccagacgattaccggcccagcaaagtctgcatctggcggatccaggtgtctgagggcttccacgtgggcctcacattccagtcctttgagattgagcgccacgacagctgtgcctacgactatctggaggtgcgcgacgggcacagtgagagcagcaccctcatcgggcgctactgtggctatgagaagcctgatgacatcaagagcacgtccagccgcctctggctcaagttcgtctctgacgggtccattaacaaagcgggctttgccgtcaactttttcaaagaggtggacgagtgctctcggcccaaccgcgggggctgtgagcagcggtgcctcaacaccctgggcagctacaagtgcagctgtgaccccgggtacgagctggccccagacaagcgccgctgtgaggctgcttgtggcggattcctcaccaagctcaacggctccatcaccagcccgggctggcccaaggagtacccccccaacaagaactgcatctggcagctggtggcccccacccagtaccgcatctccctgcagtttgacttctttgagacagagggcaatgatgtgtgcaagtacgacttcgtggaggtgcgcagtggactcacagctgactccaagctgcatggcaagttctgtggttctgagaagcccgaggtcatcacctcccagtacaacaacatgcgcgtggagttcaagtccgacaacaccgtgtccaaaaagggcttcaaggcccacttcttctcagacaaggacgagtgctccaaggataacggcggctgccagcaggactgcgtcaacacgttcggcagttatgagtgccaatgccgcagtggcttcgtcctccatgacaacaagcacgactgcaaagaagccggctgtgaccacaaggtgacatccaccagtggtaccatcaccagccccaactggcctgacaagtatcccagcaagaaggagtgcacgtgggccatctccagcacccccgggcaccgggtcaagctgaccttcatggagatggacatcgagtcccagcctgagtgtgcctacgaccacctagaggtgttcgacgggcgagacgccaaggcccccgtcctcggccgcttctgtgggagcaagaagcccgagcccgtcctggccacaggcagccgcatgttcctgcgcttctactcagataactcggtccagcgaaagggcttccaggcctcccacgccacagagtgcgggggccaggtacgggcagacgtgaagaccaaggacctttactcccacgcccagtttggcgacaacaactaccctgggggtgtggactgtgagtgggtcattgtggccgaggaaggctacggcgtggagctcgtgttccagacctttgaggtggaggaggagaccgactgcggctatgactacatggagctcttcgacggctacgacagcacagcccccaggctggggcgctactgtggctcagggcctcctgaggaggtgtactcggcgggagattctgtcctggtgaagttccactcggatgacaccatcaccaaaaaaggtttccacctgcgatacaccagcaccaagttccaggacacactccacagcaggaagtgaccactgcctgagcaggggcggggactggagcctgctgcccttggtcgcctagactggatagtgggggtgggcggaaggcaacgcaccatccctctcccccaggccccaggacctgcagggccaatggcctggtgagactgtccataggaggtgggggaactggactccggcataagccacttccccacaaacccccaccagcaaggggctggggccagggagcagagcttccacaagacatttcgaagtcatcattcctctcttagggggccctgcctggtggcaagagggaatgtcagcaggaccccatcgccatccctgtgtctctacacgctgtattgtgtatcaccgggggcattattttcattgtaatgttcatttcccacccctgctccagcctcgatttggttttattttgagcccccattccaccaccccagtttcctggggcacaagtgtctgtgcatgtcccccaggagccaccgtggggagccgatggggaggggatggagaaacaagacagggcttctctcaggcccagtggccggtcagccacaccagggcaccgcagccaataaaccgaaagtgttacagcc

SEQ ID NO: 162224 - DNA, 2961 bp, Artificial Sequence
  derived and/or modified sequence
atgcccggcgtggccagactgcccctgctgctgggcctgctgctgctgcccagacccggcagacccctggacctggccgactacacctacgacctggccgaggaggacgacagcgagcccctgaactacaaggacccctgcaaggccgccgccttcctgggcgacatcgccctggacgaggaggacctgagagccttccaggtgcagcaggccgtggacctgagaagacacaccgccagaaagagcagcatcaaggccgccgtgcccggcaacaccagcacccccagctgccagagcaccaacggccagccccagagaggcgcctgcggcagatggagaggcagaagcagaagcagaagagccgccaccagcagacccgagagagtgtggcccgacggcgtgatccccttcgtgatcggcggcaacttcaccggcagccagagagccgtgttcagacaggccatgagacactgggagaagcacacctgcgtgaccttcctggagagaaccgacgaggacagctacatcgtgttcacctacagaccctgcggctgctgcagctacgtgggcagaagaggcggcggcccccaggccatcagcatcggcaagaactgcgacaagttcggcatcgtggtgcacgagctgggccacgtggtgggcttctggcacgagcacaccagacccgacagagacagacacgtgagcatcgtgagagagaacatccagcccggccaggagtacaacttcctgaagatggagccccaggaggtggagagcctgggcgagacctacgacttcgacagcatcatgcactacgccagaaacaccttcagcagaggcatcttcctggacaccatcgtgcccaagtacgaggtgaacggcgtgaagccccccatcggccagagaaccagactgagcaagggcgacatcgcccaggccagaaagctgtacaagtgccccgcctgcggcgagaccctgcaggacagcaccggcaacttcagcagccccgagtaccccaacggctacagcgcccacatgcactgcgtgtggagaatcagcgtgacccccggcgagaagatcatcctgaacttcaccagcctggacctgtacagaagcagactgtgctggtacgactacgtggaggtgagagacggcttctggagaaaggcccccctgagaggcagattctgcggcagcaagctgcccgagcccatcgtgagcaccgacagcagactgtgggtggagttcagaagcagcagcaactgggtgggcaagggcttcttcgccgtgtacgaggccatctgcggcggcgacgtgaagaaggactacggccacatccagagccccaactaccccgacgactacagacccagcaaggtgtgcatctggagaatccaggtgagcgagggcttccacgtgggcctgaccttccagagcttcgagatcgagagacacgacagctgcgcctacgactacctggaggtgagagacggccacagcgagagcagcaccctgatcggcagatactgcggctacgagaagcccgacgacatcaagagcaccagcagcagactgtggctgaagttcgtgagcgacggcagcatcaacaaggccggcttcgccgtgaacttcttcaaggaggtggacgagtgcagcagacccaacagaggcggctgcgagcagagatgcctgaacaccctgggcagctacaagtgcagctgcgaccccggctacgagctggcccccgacaagagaagatgcgaggccgcctgcggcggcttcctgaccaagctgaacggcagcatcaccagccccggctggcccaaggagtacccccccaacaagaactgcatctggcagctggtggcccccacccagtacagaatcagcctgcagttcgacttcttcgagaccgagggcaacgacgtgtgcaagtacgacttcgtggaggtgagaagcggcctgaccgccgacagcaagctgcacggcaagttctgcggcagcgagaagcccgaggtgatcaccagccagtacaacaacatgagagtggagttcaagagcgacaacaccgtgagcaagaagggcttcaaggcccacttcttcagcgacaaggacgagtgcagcaaggacaacggcggctgccagcaggactgcgtgaacaccttcggcagctacgagtgccagtgcagaagcggcttcgtgctgcacgacaacaagcacgactgcaaggaggccggctgcgaccacaaggtgaccagcaccagcggcaccatcaccagccccaactggcccgacaagtaccccagcaagaaggagtgcacctgggccatcagcagcacccccggccacagagtgaagctgaccttcatggagatggacatcgagagccagcccgagtgcgcctacgaccacctggaggtgttcgacggcagagacgccaaggcccccgtgctgggcagattctgcggcagcaagaagcccgagcccgtgctggccaccggcagcagaatgttcctgagattctacagcgacaacagcgtgcagagaaagggcttccaggccagccacgccaccgagtgcggcggccaggtgagagccgacgtgaagaccaaggacctgtacagccacgcccagttcggcgacaacaactaccccggcggcgtggactgcgagtgggtgatcgtggccgaggagggctacggcgtggagctggtgttccagaccttcgaggtggaggaggagaccgactgcggctacgactacatggagctgttcgacggctacgacagcaccgcccccagactgggcagatactgcggcagcggcccccccgaggaggtgtacagcgccggcgacagcgtgctggtgaagttccacagcgacgacaccatcaccaagaagggcttccacctgagatacaccagcaccaagttccaggacaccctgcacagcagaaagtag

SEQ ID NO: 162225 - protein, 158 aa, Artificial Sequence
  derived and/or modified sequence
MAGFLDNFRWPECECIDWSERRNAVASVVAGILFFTGWWIMIDAAVVYPKPEQLNHAFHTCGVFSTLAFFMINAVSNAQVRGDSYESGCLGRTGARVWLFIGFMLMFGSLIASMWILFGAYVTQNTDVYPGLAVFFQNALIFFSTLIYKFGRTEELWT

SEQ ID NO: 162226 - protein, 81 aa, Artificial Sequence
  derived and/or modified sequence
MAGFLDNFRWPECECIDWSERRNAVASVVAGILFFTGWWIMIDAAVVYPKPEQLNHAFHTCGVFSTLAFFMINAVSNAQVR

SEQ ID NO: 162227 - protein, 62 aa, Artificial Sequence
  derived and/or modified sequence
MAGFLDNFRWPECECIDWSERRNAVASVVAGILFFTGWWIMIDAAVVYPKPEQLNHAFHTCG

SEQ ID NO: 162228 - protein, 126 aa, Artificial Sequence
  derived and/or modified sequence
MAGFLDNFRWPECECIDWSERRNAVASVVAGILFFTGWWIMIDAAVVYPKPEQLNHAFHTCGVFSTLAFFMINAVSNAQVRGDSYESGCLGRTGARVWLFIGFMLMFGSLIASMWILFGAYVTQNL

SEQ ID NO: 162229 - DNA, 477 bp, Artificial Sequence
  derived and/or modified sequence
atggccggcttcctggacaacttcagatggcccgagtgcgagtgcatcgactggagcgagagaagaaacgccgtggccagcgtggtggccggcatcctgttcttcaccggctggtggatcatgatcgacgccgccgtggtgtaccccaagcccgagcagctgaaccacgccttccacacctgcggcgtgttcagcaccctggccttcttcatgatcaacgccgtgagcaacgcccaggtgagaggcgacagctacgagagcggctgcctgggcagaaccggcgccagagtgtggctgttcatcggcttcatgctgatgttcggcagcctgatcgccagcatgtggatcctgttcggcgcctacgtgacccagaacaccgacgtgtaccccggcctggccgtgttcttccagaacgccctgatcttcttcagcaccctgatctacaagttcggcagaaccgaggagctgtggacctag

SEQ ID NO: 162230 - DNA, 246 bp, Artificial Sequence
  derived and/or modified sequence
atggccggcttcctggacaacttcagatggcccgagtgcgagtgcatcgactggagcgagagaagaaacgccgtggccagcgtggtggccggcatcctgttcttcaccggctggtggatcatgatcgacgccgccgtggtgtaccccaagcccgagcagctgaaccacgccttccacacctgcggcgtgttcagcaccctggccttcttcatgatcaacgccgtgagcaacgcccaggtgagatag

SEQ ID NO: 162231 - DNA, 189 bp, Artificial Sequence
  derived and/or modified sequence
atggccggcttcctggacaacttcagatggcccgagtgcgagtgcatcgactggagcgagagaagaaacgccgtggccagcgtggtggccggcatcctgttcttcaccggctggtggatcatgatcgacgccgccgtggtgtaccccaagcccgagcagctgaaccacgccttccacacctgcggctag

SEQ ID NO: 162232 - DNA, 381 bp, Artificial Sequence
  derived and/or modified sequence
atggccggcttcctggacaacttcagatggcccgagtgcgagtgcatcgactggagcgagagaagaaacgccgtggccagcgtggtggccggcatcctgttcttcaccggctggtggatcatgatcgacgccgccgtggtgtaccccaagcccgagcagctgaaccacgccttccacacctgcggcgtgttcagcaccctggccttcttcatgatcaacgccgtgagcaacgcccaggtgagaggcgacagctacgagagcggctgcctgggcagaaccggcgccagagtgtggctgttcatcggcttcatgctgatgttcggcagcctgatcgccagcatgtggatcctgttcggcgcctacgtgacccagaacctgtag

SEQ ID NO: 162233 - DNA, 477 bp, Artificial Sequence
  derived and/or modified sequence
atggctggctttctcgacaattttagatggccagaatgcgagtgtatagattggtccgagaggaggaatgctgttgcttcagtcgttgccggtattttgttcttcactggatggtggattatgattgacgctgccgtggtgtaccctaagcccgaacagttgaaccacgcgttccacacttgcggagtgtttagcacgctggccttcttcatgatcaatgctgtcagcaacgctcaagtgcgcggggatagttatgagagcgggtgtttgggacgcactggggccagggtctggctgttcatcgggttcatgcttatgttcggctccttgatcgcaagcatgtggattttatttggggcatatgtcacacagaacaccgatgtttatcctggccttgcagtcttctttcaaaacgctctgatctttttttccaccttgatctacaaattcggtaggactgaggaactctggacatag

SEQ ID NO: 162234 - DNA, 246 bp, Artificial Sequence
  derived and/or modified sequence
atggccggcttcttggataactttcgctggcctgaatgcgaatgcatcgactggagtgagagaaggaacgcagtggcaagcgttgtggcaggaattctgttttttactggctggtggattatgatagacgcagcagtcgtctatcctaaacctgaacagttgaatcatgcgttccacacctgtggagtcttctccaccttggcctttttcatgataaacgccgtgtccaacgctcaggtgaggtag

SEQ ID NO: 162235 - DNA, 189 bp, Artificial Sequence
  derived and/or modified sequence
atggcagggttcctggacaattttaggtggccggagtgtgaatgcatcgattggagtgaaagaagaaatgccgtggcatccgttgtggccggcatcctctttttcacaggttggtggattatgattgacgctgcggttgtgtatcctaagcccgagcagctgaaccacgccttccacacctgtggctag

SEQ ID NO: 162236 - DNA, 381 bp, Artificial Sequence
  derived and/or modified sequence
atggctgggtttttagataattttaggtggcctgagtgtgagtgcatcgattggagcgagaggagaaacgctgtcgcttcagtagttgcaggcatccttttctttacaggatggtggataatgattgacgctgccgtagtgtatccgaagccagaacagctcaaccacgcattccacacttgtggggtgttttctacgcttgccttcttcatgatcaacgctgtaagcaacgcacaggtccggggagactcctatgagtcaggctgtctaggacggacgggcgccagagtgtggctctttataggcttcatgctcatgtttgggtccctaattgccagcatgtggatcctttttggtgcatacgtaacccagaacttgtag

SEQ ID NO: 162237 - DNA, 477 bp, Artificial Sequence
  derived and/or modified sequence
atggcagggttcttggataattttagatggcctgaatgcgaatgcattgactggtctgaacgccgcaacgctgtggcctccgtggttgccggaatcctgttcttcaccggatggtggattatgatcgacgcggctgtggtttatcctaaacccgagcagctcaatcatgcttttcacacatgcggggtgtttagtaccctggcattttttatgatcaatgcagtctccaatgcacaggtccgaggagatagttatgagtcggggtgcctcggtcgaaccggggctagagtctggctctttatcggtttcatgctgatgttcggtagtctcatagcaagcatgtggatcttgtttggcgcttacgtgacacaaaatactgacgtctaccctgggctggccgttttttttcaaaatgcattgattttcttttctacactcatttacaagtttggccggactgaggaactttggacctag

SEQ ID NO: 162238 - DNA, 477 bp, Artificial Sequence
  derived and/or modified sequence
atggccggcttcctggacaacttccgctggccagaatgtgagtgcatcgactggagcgagaggagaaatgctgtggcctctgtggtggccggcatcctcttcttcaccggctggtggatcatgattgatgctgctgtggtgtaccccaagccagagcagctgaaccacgccttccacacctgtggggtcttcagcaccctggccttcttcatgatcaatgctgtgtccaatgcccaggtgcggggggacagctatgaaagtggctgcctgggccgcactggagcccgggtgtggctgttcatcggcttcatgctgatgtttggcagcctgattgcctccatgtggatcctgtttggagcctacgtgacccagaacacagatgtgtacccaggcctggccgtgttcttccagaatgccctgatcttcttcagcaccctcatctacaagtttggccgcacagaggagctgtggacctag

SEQ ID NO: 162239 - DNA, 246 bp, Artificial Sequence
  derived and/or modified sequence
atggccggcttcctggacaacttccgctggccagaatgtgagtgcatcgactggagcgagaggagaaatgctgtggcctctgtggtggccggcatcctcttcttcaccggctggtggatcatgattgatgctgctgtggtgtaccccaagccagagcagctgaaccacgccttccacacctgtggggtcttcagcaccctggccttcttcatgatcaatgctgtgtccaatgcccaggtgaggtag

SEQ ID NO: 162240 - DNA, 189 bp, Artificial Sequence
  derived and/or modified sequence
atggccggcttcctggacaacttccgctggccagaatgtgagtgcatcgactggagcgagaggagaaatgctgtggcctctgtggtggccggcatcctcttcttcaccggctggtggatcatgattgatgctgctgtggtgtaccccaagccagagcagctgaaccacgccttccacacctgtggctag

SEQ ID NO: 162241 - DNA, 381 bp, Artificial Sequence
  derived and/or modified sequence
atggccggcttcctggacaacttccgctggccagaatgtgagtgcatcgactggagcgagaggagaaatgctgtggcctctgtggtggccggcatcctcttcttcaccggctggtggatcatgattgatgctgctgtggtgtaccccaagccagagcagctgaaccacgccttccacacctgtggggtcttcagcaccctggccttcttcatgatcaatgctgtgtccaatgcccaggtgcggggggacagctatgaaagtggctgcctgggccgcactggagcccgggtgtggctgttcatcggcttcatgctgatgtttggcagcctgattgcctccatgtggatcctgtttggagcctacgtgacccagaacctgtag

SEQ ID NO: 162242 - DNA, 477 bp, Artificial Sequence
  derived and/or modified sequence
atggccggcttcctggacaacttccggtggcccgagtgcgagtgcatcgactggtccgagcgcagaaacgccgtggcctccgtggtagcgggcattctcttcttcaccggttggtggataatgattgatgcggccgtggtgtatcccaagcctgagcagctcaatcacgcatttcacacatgcggagtttttagcacacttgccttctttatgatcaatgcagtgagtaacgctcaggtgcggggagatagctatgaatccggatgcttgggtcgaaccggggcccgggtgtggttatttatcggattcatgcttatgtttggcagtcttatagccagtatgtggatcctttttggggcgtacgttacccagaatactgatgtgtatcccggccttgctgtgtttttccagaatgctctaatttttttttcaacattgatctataagtttggccgaaccgaagagctgtggacatag

SEQ ID NO: 162243 - DNA, 246 bp, Artificial Sequence
  derived and/or modified sequence
atggccggcttcctggacaacttccggtggcccgagtgcgagtgcatcgactggagtgagaggcggaatgcagtggcttccgttgtagcagggattctttttttcaccgggtggtggattatgattgacgccgccgtcgtctatcctaagcctgagcaactgaaccacgcatttcatacttgcggcgtattttccaccttagcgttttttatgataaatgcagtatctaacgcgcaggttagatag

SEQ ID NO: 162244 - DNA, 189 bp, Artificial Sequence
  derived and/or modified sequence
atggccggcttcctggacaacttccggtggcccgagtgcgagtgcatagattggtccgagagacggaatgccgtggcatctgtggtggctggaatactctttttcactgggtggtggatcatgatcgatgcggcagtggtctatcctaaaccagagcagctcaaccatgctttccacacctgtgggtag

SEQ ID NO: 162245 - DNA, 381 bp, Artificial Sequence
  derived and/or modified sequence
atggccggcttcctggacaacttccggtggcccgagtgcgagtgcatcgactggagcgagaggagaaatgcggttgcgagtgttgtagcaggaattctgttctttactggctggtggataatgatcgatgctgctgtcgtttatcccaagccggagcaacttaaccacgccttccatacttgtggagtgttctccactctcgcgttttttatgattaatgccgttagtaatgcacaggttcgcggggacagttatgagtctggctgtttaggccgcactggcgccagggtttggctgtttattggcttcatgttgatgttcggctctttgattgctagcatgtggattctgtttggtgcctatgtaacccagaacctctag

SEQ ID NO: 162246 - DNA, 477 bp, Artificial Sequence
  derived and/or modified sequence
atggccggcttcctggacaacttccggtggcccgagtgcgagtgcatcgactggtcggagcggcggaatgcagtagccagtgtcgtggctggtatcctcttctttactggctggtggatcatgatcgacgccgccgtcgtctaccccaagcccgaacaactgaatcatgcttttcacacatgtggagtgttttccaccctggccttcttcatgataaacgccgtctctaatgctcaggtgagaggggattcatacgagagtggctgtcttggtcggaccggggctagggtgtggctgttcatcgggtttatgctgatgtttggcagcctaattgctagtatgtggatcttattcggtgcttatgtaacacagaataccgacgtgtacccggggctcgccgtttttttccagaatgccttgatctttttctcaacactgatttacaagttcggaagaaccgaggaattatggacatag

SEQ ID NO: 162247 - DNA, 477 bp, Artificial Sequence
  derived and/or modified sequence
atggccggatttctcgataatttccgctggccagagtgcgaatgcattgactggagcgagcgcaggaatgcagtagcttccgtggtggctggaatactgtttttcactggatggtggatcatgattgacgccgctgtggtataccctaaaccagagcaactgaatcatgcttttcacacgtgtggagtgtttagcaccctggcgttttttatgatcaacgctgtttcaaatgcccaggtgcgcggtgatagttacgaatctggatgcctaggcaggacaggcgctagggtctggctttttatcggattcatgctcatgtttggctcactgattgcatcgatgtggatactttttggcgcttatgtaacgcagaataccgatgtttaccccggacttgcggtctttttccaaaatgcactgatatttttcagcaccctgatctacaagttcggtcggacggaagagctttggacgtag

SEQ ID NO: 162248 - DNA, 246 bp, Artificial Sequence
  derived and/or modified sequence
atggccggatttctggataatttccgctggcccgaatgtgagtgcatcgactggagtgagaggcggaatgcagtggcctccgtcgtggcaggaatcctgttttttaccggctggtggatcatgatagatgccgcagtcgtctaccctaagcctgaacagctgaaccatgctttccatacatgtggtgtgttctctacacttgctttctttatgatcaatgctgtttcaaatgcgcaggttagatag

SEQ ID NO: 162249 - DNA, 189 bp, Artificial Sequence
  derived and/or modified sequence
atggcaggtttcctggacaatttcaggtggcccgaatgcgaatgcatcgattggtccgaacgacgcaacgcagtggctagtgttgtcgctggtattctcttcttcaccggttggtggataatgattgacgcagcggtggtctacccgaagccagagcagctgaatcatgctttccacacttgcgggtag

SEQ ID NO: 162250 - DNA, 381 bp, Artificial Sequence
  derived and/or modified sequence
atggccggtttcttagataacttcagatggcccgagtgcgaatgcattgactggtctgaacgccgtaatgccgtcgccagtgtggttgccggaatactttttttcacggggtggtggataatgattgacgcagcagttgtttacccaaaacctgaacagttgaaccatgcttttcacacatgcggcgtgttctcgactctggccttttttatgatcaacgctgtcagcaacgctcaggtaaggggggactcttatgagtcaggctgtctcggacggaccggagcaagggtgtggctgttcattggatttatgctgatgttcgggtcgctcattgcttccatgtggatcctttttggtgcttatgtgacacagaacctgtag

SEQ ID NO: 162251 - DNA, 477 bp, Artificial Sequence
  derived and/or modified sequence
atggctggttttctcgacaatttccgttggccggaatgcgagtgtatagattggagcgagagaagaaatgctgttgcatctgtcgtcgccggtattcttttcttcaccggctggtggataatgatcgatgccgcagtggtgtatcccaaaccagaacagctgaatcacgcctttcacacgtgtggggtgttcagtaccttagctttcttcatgatcaacgctgtctccaacgctcaggtgaggggagactcctacgaaagcggctgtctgggtagaacaggggcacgtgtgtggttgtttattggttttatgttgatgttcggcagcttgatcgcttccatgtggatcttatttggtgcgtacgtaacacagaacacagacgtgtatcccggactggcagttttttttcagaatgcactcatcttcttttctacattgatttacaaatttggtcggacagaggagttatggacatag

SEQ ID NO: 162252 - DNA, 3062 bp, Artificial Sequence
  derived and/or modified sequence
gctcccggggctgaggtggagccgcgggacgccggcagggttgtggcgcagcagtctccttcctgcgcgcgcgcctgaagtcggcgtgggcgtttgaggaagctgggatacagcatttaatgaaaaatttatgcttaagaagtaaaaatggcaggcttcctagataattttcgttggccagaatgtgaatgtattgactggagtgagagaagaaatgctgtggcatctgttgtcgcaggtatattgttttttacaggctggtggataatgattgatgcagctgtggtgtatcctaagccagaacagttgaaccatgcctttcacacatgtggtgtattttccacattggctttcttcatgataaatgctgtatccaatgctcaggtgagaggtgatagctatgaaagcggctgtttaggaagaacaggtgctcgagtttggcttttcattggtttcatgttgatgtttgggtcacttattgcttccatgtggattctttttggtgcatatgttacccaaaatactgatgtttatccgggactagctgtgttttttcaaaatgcacttatattttttagcactctgatctacaaatttggaagaaccgaagagctatggacctgagatcacttcttaagtcacattttccttttgttatattctgtttgtagataggttttttatctctcagtacacattgccaaatggagtagattgtacattaaatgttttgtttctttacatttttatgttctgagttttgaaatagttttatgaaatttctttatttttcattgcatagactgttaatatgtatataatacaagactatatgaattggataatgagtatcagttttttattcctgagatttagaacttgatctactccctgagccagggttacatcatcttgtcattttagaagtaaccactcttgtctctctggctgggcacggtggctcatgcctgtaatcccagcactttgggaggccgaggcgggccgattgcttgaggtcaagtgtttgagaccagcctggccaacatggcgaaaccccatctactaaaaatacaaaaattagccaggcatggtggtgggtgcctgtaatcccaactacctaggaggctgaggcaggagaatcgcttgaacccggggggcagaggttgtagtgagctgagtttgcgccactgcactctagcctgggggagaaagtgaaactccctctcaaaaaaaagaaggaccactctcagtatctgatttctgaagatgtacaaaaaaatatagcttcatatatctagaatgagcactgagccataaaaggttttcagcaagttgtaacttattttggcctaaaaatgaggtttttttggtaaagaaaaaatatttgttcttatgtattgaagaagtgtacttttatataatgattttttaaatgcccaaaggactagtttgaaagcttcttttaaaaagaattcctctaatatgactttatgtgagaagggataatacatgatcaaataaactcagttttttatggttactgtaaaaagactgtgtaaggcagctcagcaccatgcttctcgtaaaagcagcttcaaatatccactggggttatcttttgacaacttgccattatctgatgttacacaattcaatagcaagcaagtttgagacaatcgcagtttaaaagcatgaaccatttaacaaaaagtggaataattaaagataaagcacttcttcccaaagggaattatcacctagtgaaaaattatgcatttcatctactcagttaccgactgcaagtctctcctcgctctagctctcaagctttgggtgaatattcctgtgaaatatatcttcaacttgaaagttcatactccaatcaaaaactccttttactgagtttgcagtactgtatttgcactgtttgtattcctctgggcccttattgctacttttgctttcctttgttacacagattttgtgttgcactttttctccagaggggtgttgtagagccttggttgtatgaataataccagtggtagtgtccacggctctaatgtaagcccatttggcatcactcctctcctctctcttgagaggatttcttgtgcacagagtatgaagcagttgtggagcgctgtgcctttgtcaagataccatcttgtttgatgacttctttctttgctgttttttcttcaaaatgttagtaagctctgtcatgcttctagcaaattgtaagactaattatttgtttccacctcataacctgttgcaataaatattacttctcatacagtttaatattgttgtttgttggagaaaatgaaccataaaaattgatttgctgttcagttttcaattattcaagtatacccaattaaagatgcagttatgtttataaaataagaagaaatagacttgtaaaatgcttatgtgagggttattgaaggtttccctgaagactgactggaaatggtggctgtttttttctatttctgactctgccatgaatttttttttttttttttaaagacaatatctcactctgttgcctaggctggagtgcagtggtgcaaccacagctcactgcaccttcaaatgctggagctcaggcaatcctcttacctccgctttccaagcagctgggaccacagatgtatcctccactcctcgctggccaccatcctgctgcccaacagaagaagctcttctgtctccgatttcctgaacggtctaaggaccaggaagaaacaggctcctgccagcaccgacagcaacgaaaatgttcccacggagatcaggatgacttgctgaagctcagtggaggctaaaaagaggacacgaaagtgaacagaatgatcttcctacgcacaacacaaacatcagttaatgttccatccatgctgcttaaagagcattcctgtcctagtaaaatgggcaagtccctctaccccccaccctcacctggtatgcttacattaatagctaaagtcaatcctgtaatgaaataaagcaagtggtagctgtctggtagcctccactactgcaaatctcag

SEQ ID NO: 162253 - DNA, 619 bp, Artificial Sequence
  derived and/or modified sequence
ggaaagggaaggggaacaacattctttcgagaattataaaccttgagctccgttaaataagtagcagcagagcattgtcactggagcagtggtagtcgcgggtaggaccgtttcggtttttagccaataggctggttaaaggtacttaaaacagtaagttggaaggtgctgaaattctaagcatggtagcccaagcattagtgttccagagaaccaggcagatgctccattgccttctgtgacctgatcttggaagtggcatggagaagttacatagcatcacttcctctactctactggtctactagtctttattgttgacccaaattcaaaggatacagcatttaatgaaaaatttatgcttaagaagtaaaaatggcaggcttcctagataattttcgttggccagaatgtgaatgtattgactggagtgagagaagaaatgctgtggcatctgttgtcgcaggtatattgttttttacaggctggtggataatgattgatgcagctgtggtgtatcctaagccagaacagttgaaccatgcctttcacacatgtggtgtattttccacattggctttcttcatgataaatgctgtatccaatgctcaggtgagag

SEQ ID NO: 162254 - DNA, 287 bp, Artificial Sequence
  derived and/or modified sequence
ggatggcatttttggtgataattccatgatacaaaaccttttacttcattatgcctcaagatacagcatttaatgaaaaatttatgcttaagaagtaaaaatggcaggcttcctagataattttcgttggccagaatgtgaatgtattgactggagtgagagaagaaatgctgtggcatctgttgtcgcaggtatattgttttttacaggctggtggataatgattgatgcagctgtggtgtatcctaagccagaacagttgaaccatgcctttcacacatgtggtg

SEQ ID NO: 162255 - DNA, 508 bp, Artificial Sequence
  derived and/or modified sequence
ggagccgcgggacgccggcagggttgtggcgcagcagtctccttcctgcgcgcgcgcctgaagtcggcgtgggcgtttgaggaagctgggatacagcatttaatgaaaaatttatgcttaagaagtaaaaatggcaggcttcctagataattttcgttggccagaatgtgaatgtattgactggagtgagagaagaaatgctgtggcatctgttgtcgcaggtatattgttttttacaggctggtggataatgattgatgcagctgtggtgtatcctaagccagaacagttgaaccatgcctttcacacatgtggtgtattttccacattggctttcttcatgataaatgctgtatccaatgctcaggtgagaggtgatagctatgaaagcggctgtttaggaagaacaggtgctcgagtttggcttttcattggtttcatgttgatgtttgggtcacttattgcttccatgtggattctttttggtgcatatgttacccaaaatttg

SEQ ID NO: 162256 - DNA, 2375 bp, Artificial Sequence
  derived and/or modified sequence
ctgcggtgcacacggcgcctcgccccgcctcaccggcgctctatcctcgcgtctgctcccagctccgggctcccggggctgaggtggagccgcgggacgccggcagggttgtggcgcagcagtctccttcctgcgcgcgcgcctgaagtcggcgtgggcgtttgaggaagctgggatacagcatttaatgaaaaatttatgcttaagaagtaaaaatggcaggcttcctagataattttcgttggccagaatgtgaatgtattgactggagtgagagaagaaatgctgtggcatctgttgtcgcaggtatattgttttttacaggctggtggataatgattgatgcagctgtggtgtatcctaagccagaacagttgaaccatgcctttcacacatgtggtgtattttccacattggctttcttcatgataaatgctgtatccaatgctcaggtgagaggtgatagctatgaaagcggctgtttaggaagaacaggtgctcgagtttggcttttcattggtttcatgttgatgtttgggtcacttattgcttccatgtggattctttttggtgcatatgttacccaaaatactgatgtttatccgggactagctgtgttttttcaaaatgcacttatattttttagcactctgatctacaaatttggaagaaccgaagagctatggacctgagatcacttcttaagtcacattttccttttgttatattctgtttgtagataggttttttatctctcagtacacattgccaaatggagtagattgtacattaaatgttttgtttctttacatttttatgttctgagttttgaaatagttttatgaaatttctttatttttcattgcatagactgttaatatgtatataatacaagactatatgaattggataatgagtatcagttttttattcctgagatttagaacttgatctactccctgagccagggttacatcatcttgtcattttagaagtaaccactcttgtctctctggctgggcacggtggctcatgcctgtaatcccagcactttgggaggccgaggcgggccgattgcttgaggtcaagtgtttgagaccagcctggccaacatggcgaaaccccatctactaaaaatacaaaaattagccaggcatggtggtgggtgcctgtaatcccaactacctaggaggctgaggcaggagaatcgcttgaacccggggggcagaggttgtagtgagctgagtttgcgccactgcactctagcctgggggagaaagtgaaactccctctcaaaaaaaagaaggaccactctcagtatctgatttctgaagatgtacaaaaaaatatagcttcatatatctagaatgagcactgagccataaaaggttttcagcaagttgtaacttattttggcctaaaaatgaggtttttttggtaaagaaaaaatatttgttcttatgtattgaagaagtgtacttttatataatgattttttaaatgcccaaaggactagtttgaaagcttcttttaaaaagaattcctctaatatgactttatgtgagaagggataatacatgatcaaataaactcagttttttatggttactgtaaaaagactgtgtaaggcagctcagcaccatgcttctcgtaaaagcagcttcaaatatccactggggttatcttttgacaacttgccattatctgatgttacacaattcaatagcaagcaagtttgagacaatcgcagtttaaaagcatgaaccatttaacaaaaagtggaataattaaagataaagcacttcttcccaaagggaattatcacctagtgaaaaattatgcatttcatctactcagttaccgactgcaagtctctcctcgctctagctctcaagctttgggtgaatattcctgtgaaatatatcttcaacttgaaagttcatactccaatcaaaaactccttttactgagtttgcagtactgtatttgcactgtttgtattcctctgggcccttattgctacttttgctttcctttgttacacagattttgtgttgcactttttctccagaggggtgttgtagagccttggttgtatgaataataccagtggtagtgtccacggctctaatgtaagcccatttggcatcactcctctcctctctcttgagaggatttcttgtgcacagagtatgaagcagttgtggagcgctgtgcctttgtcaagataccatcttgtttgatgacttctttctttgctgttttttcttcaaaatgttagtaagctctgtcatgcttctagcaaattgtaagactaattatttgtttccacctcataacctgttgcaataaatattacttctcatacagtttaa

SEQ ID NO: 162257 - DNA, 477 bp, Artificial Sequence
  derived and/or modified sequence
atggcagggttcctggacaacttcagatggccggagtgcgagtgtatcgattggtccgaaagacggaacgcggtggccagtgtggtggccggaattctattttttacgggatggtggatcatgatcgatgctgctgtcgtctatccaaagccagaacagctgaaccacgcgttccacacgtgcggagtcttcagtaccttagcctttttcatgatcaacgccgtgagcaacgcgcaggtcaggggggacagttacgaatccggatgtttgggcaggacaggggctagagtctggttgttcattgggttcatgttaatgtttggaagcctaatcgccagtatgtggatcctgttcggtgcttacgtgacacagaacacagatgtataccctggcctggccgttttttttcaaaatgcattgattttcttcagtacattaatctacaagtttggccggaccgaagagctgtggacctag

SEQ ID NO: 162258 - DNA, 477 bp, Artificial Sequence
  derived and/or modified sequence
atggccggcttcctggacaacttccggtggcccgagtgcgagtgcattgactggtccgagcgtcgtaatgcagtagctagcgtggtggcaggaatcctgttttttaccggctggtggatcatgatcgacgctgctgtcgtgtatcctaaaccagaacaactgaaccatgctttccatacatgcggagtcttttccacactcgcattctttatgattaacgcggtcagtaacgcccaggtgaggggagatagttacgagagcggttgcctaggcaggactggggcacgggtatggctgttcattggttttatgctcatgtttggatcgcttatcgcaagcatgtggattctattcggcgcatacgtcacacagaataccgacgtttatccaggactggccgtttttttccaaaacgcactgattttcttttccacactgatttacaaatttggccgaacagaagaattatggacatag

SEQ ID NO: 162259 - DNA, 477 bp, Artificial Sequence
  derived and/or modified sequence
atggcaggatttttggataactttcggtggcccgagtgcgaatgcatcgactggagtgagcgtcgcaacgcggtagcctcggtggtggccggaatactattctttacaggttggtggatcatgatcgatgctgcagtagtgtacccaaaacccgagcagctcaaccatgcgttccatacttgcggtgtgttctctacccttgccttcttcatgataaatgccgtcagcaacgctcaggtgagaggtgattcatacgagtccggttgtctgggaagaaccggggctagagtttggctgttcattggcttcatgctgatgttcggatccctcattgcaagcatgtggatcctattcggggcttacgtgacacagaacactgacgtgtaccctgggcttgccgttttctttcagaatgcactgatatttttctctactctgatttataaatttgggagaacagaagaactctggacctag

SEQ ID NO: 162260 - protein, 286 aa, Artificial Sequence
  derived and/or modified sequence
MADLEEQLSDEEKVRIAAKFIIHAPPGEFNEVFNDVRLLLNNDNLLREGAAHAFAQYNLDQFTPVKIEGYEDQVLITEHGDLGNGKFLDPKNRICFKFDHLRKEATDPRPCEVENAVESWRTSVETALRAYVKEHYPNGVCTVYGKKIDGQQTIIACIESHQFQAKNFWNGRWRSEWKFTITPSTTQVVGILKIQVHYYEDGNVQLVSHKDIQDSLTVSNEVQTAKEFIKIVEAAENEYQTAISENYQTMSDTTFKALRRQLPVTRTKIDWNKILSYKIGKEMQNA

SEQ ID NO: 162261 - protein, 172 aa, Artificial Sequence
  derived and/or modified sequence
MADLEEQLSDEEKVRIAAKFIIHAPPGEFNEVFNDVRLLLNNDNLLREGAAHAFAQYNLDQFTPVKIEGYEDQVLITEHGDLGNGKFLDPKNRICFKFDHLRKEATDPRPCEVENAVESWRTSVETALRAYVKEHYPNGVCTEWSLEVRMEVYNHSFNHSSGWHLENSGSLL

SEQ ID NO: 162262 - DNA, 861 bp, Artificial Sequence
  derived and/or modified sequence
atggctgatcttgaggaacaactgtcggatgaggaaaaagtccggatagcagcaaagtttatcattcacgctcctcctggagaattcaatgaagtgtttaacgacgtgcgactgctgcttaataatgacaatctgttgcgggagggggcagctcacgcctttgcgcagtacaatttggatcagttcaccccagtgaaaatcgaaggctatgaggaccaggtcctgattaccgaacacggagatctaggtaacgggaagttccttgatccaaaaaatcggatctgtttcaagttcgaccatctccgcaaagaagcaaccgatccacgtccatgcgaagtagagaacgccgtggaatcatggcgcaccagtgtggagactgctttgcgggcatacgtgaaagagcattaccctaacggagtctgcacagtttacggaaaaaagatcgacggccagcaaactattatagcttgcatagaatcccatcagttccaggcaaagaatttctggaatggaagatggcgtagcgaatggaagtttactattaccccatccacgactcaggtcgtgggcatactgaaaatacaggtccattactatgaagatggaaacgttcagctggtttcccataaagatattcaggacagcctgacagtatccaacgaagtgcagaccgccaaggaatttatcaaaatcgttgaagccgctgagaacgaataccagactgctatcagcgaaaactaccagacaatgtctgatacaactttcaaagcactgagaaggcaactgccagtgacaaggactaaaatagattggaacaaaattctgtcttacaagatcgggaaggagatgcagaatgcctag

SEQ ID NO: 162263 - DNA, 519 bp, Artificial Sequence
  derived and/or modified sequence
atggccgatttggaggagcagctctccgatgaggaaaaagtgaggattgccgccaagttcatcatccacgcaccacctggtgaattcaatgaggtgtttaacgatgtccgtctactgctgaataatgataacctattgcgcgagggggcagcccatgcctttgcccaatacaatctagaccagtttacgccagtgaaaattgaagggtacgaggaccaagtgttgatcacagaacacggggacttgggaaatgggaaattcctcgaccctaagaaccgcatatgctttaaattcgatcatctacgcaaagaggccactgatcctagaccatgtgaagtcgagaacgcggtagaaagctggcgaacttccgtggagaccgccctccgcgcgtatgtgaaggaacattatccaaatggcgtctgcactgagtggagtctggaggtgcgtatggaggtctacaaccatagttttaaccacagctctggttggcacctggagaactctggctccctgctgtag

SEQ ID NO: 162264 - DNA, 861 bp, Artificial Sequence
  derived and/or modified sequence
atggctgacctggaggagcagctgagtgatgaggagaaggtgagaattgctgccaagttcatcatccacgcccctcctggagagttcaatgaggtgttcaatgatgtgcggctgctgctgaacaatgacaacctgctgcgggagggcgccgcccacgcctttgcccagtacaacctggaccagttcacccctgtgaagattgagggctatgaggaccaggtgctgatcacagaacatggagacctgggcaatggcaagttcctggaccccaagaaccgcatctgcttcaagtttgaccacctgaggaaggaggccacagacccccggccctgtgaggtggagaatgctgtggagagctggaggacctctgtggagacagccctgcgggcctacgtgaaggagcactaccccaacggggtgtgcaccgtgtatggcaagaagattgatggccagcagaccatcatcgcctgcatcgagagccaccagttccaggccaagaacttctggaatggccgctggaggtctgagtggaagttcaccatcacccccagcaccacccaggtggtgggcatcctgaagatccaggtgcactactatgaagatggaaatgtgcagctggtgagccacaaggacatccaggacagcctgactgtgtccaatgaggtgcagacagccaaggagttcatcaagatcgtggaggccgcagaaaatgagtaccagacagccatcagcgagaactaccagaccatgtctgacaccaccttcaaggccctgcggcggcagctgcctgtgaccaggaccaagattgactggaacaagatcctgagctacaagattggcaaggagatgcagaatgcctag

SEQ ID NO: 162265 - DNA, 519 bp, Artificial Sequence
  derived and/or modified sequence
atggctgacctggaggagcagctgagtgatgaggagaaggtgagaattgctgccaagttcatcatccacgcccctcctggagagttcaatgaggtgttcaatgatgtgcggctgctgctgaacaatgacaacctgctgcgggagggcgccgcccacgcctttgcccagtacaacctggaccagttcacccctgtgaagattgagggctatgaggaccaggtgctgatcacagaacatggagacctgggcaatggcaagttcctggaccccaagaaccgcatctgcttcaagtttgaccacctgaggaaggaggccacagacccccggccctgtgaggtggagaatgctgtggagagctggaggacctctgtggagacagccctgcgggcctacgtgaaggagcactaccccaacggggtgtgcacagagtggagcctggaggtgaggatggaggtgtacaaccacagcttcaaccacagcagcggctggcacctggagaacagcggcagcctgctgtag

SEQ ID NO: 162266 - DNA, 861 bp, Artificial Sequence
  derived and/or modified sequence
atggccgacctggaggagcagctgagcgacgaggagaaggtgcggatcgctgccaaattcattattcatgcccctccaggcgagttcaatgaggtgttcaatgacgtgcgcttgctgctaaacaacgataatctgctcagagagggcgccgcccatgcctttgcacagtacaatctagaccagtttacccctgtgaagatcgaagggtacgaggaccaggtgctgattactgaacatggcgacctgggcaatgggaagttcctggacccaaagaaccgtatctgttttaagtttgatcacctgcggaaggaagcgaccgatccaaggccctgtgaggtcgaaaacgctgtggagagctggcggacttcagtggagacggctctgcgcgcttatgtcaaagaacattacccgaatggcgtctgcacggtgtacgggaagaaaatcgacggacaacagacaataatagcgtgcattgagagtcaccagttccaggccaagaatttttggaatggccggtggcgcagtgaatggaaatttaccatcaccccgtcgactacccaagtggtgggaatcctgaagatacaggtgcactactatgaagatggtaacgtgcagctagtctcccacaaggacattcaggatagccttactgtcagcaacgaggtccagaccgcgaaggagtttatcaagattgttgaagcagcagaaaatgagtaccagaccgctatttcagaaaactaccagacgatgtccgatacaacttttaaggctctaagaaggcagctgccagtaacgaggacaaagattgactggaacaaaatcctttcttataaaatcggcaaagagatgcagaacgcgtag

SEQ ID NO: 162267 - DNA, 519 bp, Artificial Sequence
  derived and/or modified sequence
atggccgacctggaggagcagctgagcgacgaggagaaggtgcggatcgcagccaagttcatcatccatgcaccaccgggcgaatttaatgaggtgttcaacgatgtgcgtttgttgctgaacaacgataacttgttgcgggagggcgccgcccatgcctttgcacaatataacctggatcagttcacccccgtgaaaatagagggatatgaggatcaagtgcttataacagagcacggcgatctcggcaacggcaagtttctggaccccaagaacagaatctgcttcaagtttgaccacctgcggaaagaagcaacggatccccgtccatgtgaagtagaaaatgctgtggaaagctggcggacctccgtggagactgcactgcgtgcttatgtcaaagagcactatcccaacggcgtgtgcaccgaatggtcccttgaagtgagaatggaggtgtataaccacagcttcaaccattcatccgggtggcacctcgaaaacagtgggtcactcctgtag

SEQ ID NO: 162268 - DNA, 861 bp, Artificial Sequence
  derived and/or modified sequence
atggctgatctggaggaacagctcagcgatgaagagaaagtgcgtattgcggcaaaatttattattcatgcacctcctggagagttcaacgaagtgtttaacgacgttcggttactgctcaataatgataatctgctgagagaaggtgccgcacatgcctttgcccaatataacctggatcagtttacgccagtgaagatcgagggatatgaggaccaggtcttaataacagagcacggagatctgggaaacggcaagtttctcgaccctaaaaatcgtatctgcttcaaatttgaccacctgagaaaagaggccactgaccctagaccgtgcgaggttgagaatgctgttgaaagctggaggacatctgtggagactgccctaagagcctatgtcaaggagcactatccgaacggggtttgtaccgtatacggcaaaaagattgacggacagcagaccattatcgcttgtattgaatcacaccaattccaggccaagaatttttggaacgggagatggcgcagcgagtggaagttcacaatcaccccgtccacgacgcaagtggtgggtatcctgaaaattcaggtgcactactatgaggatgggaacgtgcagctggtgtcgcataaggacattcaggacagcctcaccgtctccaacgaagtgcagaccgccaaagaattcattaaaattgtggaagccgcagagaatgaatatcaaaccgccattagcgagaactatcagacaatgtcagataccacctttaaggccctccgcaggcagctgcctgtgacaagaacaaaaatcgactggaataagattctgagctacaaaatcgggaaagaaatgcagaatgcctag

SEQ ID NO: 162269 - DNA, 519 bp, Artificial Sequence
  derived and/or modified sequence
atggccgacctggaggagcagctgtcggatgaagaaaaggtgaggattgccgctaagtttataatacatgcccctcccggtgagttcaacgaggttttcaacgatgtgagattgctgctcaacaatgacaacctgctgagggagggagctgcacacgcctttgctcagtacaacctggaccagttcactccagtcaaaatcgaggggtatgaggatcaggtcctaattaccgaacacggtgacttgggaaatggtaagtttttggatccaaagaatcggatatgtttcaaattcgaccatctgcgaaaggaagctactgaccccagaccctgcgaagtcgagaatgccgttgaatcttggcggaccagtgtggagactgccctgcgggcttacgtcaaagaacactatcctaacggagtgtgtaccgagtggagtctcgaggtgcgcatggaagtttacaaccactcttttaaccattcatcagggtggcacctcgagaatagcggcagcctcttgtag

SEQ ID NO: 162270 - DNA, 2394 bp, Artificial Sequence
  derived and/or modified sequence
cccggggtgcgcgtgcgcggcggcctgagcggcgggcccctcccttagcgggggcgcgcggcgctgaggaccgcacggaaacggggaagtcaggtggccgctgccgccgccgccgccgcggtttgtcgccagaaggaagatggcggatctggaggagcagttgtctgatgaagagaaggtgcgtatagcagcaaaattcatcattcatgcccctcctggagaatttaatgaggttttcaatgatgttcggttactgcttaataatgacaatcttctcagggaaggagcagcccatgcatttgcacagtataacttggaccagtttactccagtaaaaattgaaggttatgaagatcaggtattgataacagaacatggcgacttgggaaatggaaagtttttggatccaaagaacagaatctgttttaaatttgatcacttaaggaaggaggcaactgatccaagaccctgtgaagtagaaaatgcagttgaatcatggagaacttcagtagaaactgctctgagagcttacgtaaaagaacattacccgaatggagtctgcactgtgtatggcaaaaaaatagatggacagcaaaccattattgcatgcatagaaagccatcagttccaagcaaaaaatttttggaatggtcgttggaggtcagaatggaagtttacaatcactccttcaaccactcaagtggttggcatcttgaaaattcaggttcattattatgaagatggtaatgttcagctagtgagtcataaagatatacaagattccctaacagtgtctaatgaagtgcaaacagcaaaagaatttataaagattgtagaagctgcagaaaatgaataccagactgccatcagtgagaattatcagacaatgtcggacactactttcaaagccttacgtcgacagttgccagttacacgcactaagattgattggaacaagatccttagctacaagattggcaaagagatgcagaatgcataagatgaacattgcatgaccggatcattttagtgtctttgcgttaaaaaatcattgcaaaagtattctgaactgtcaagctgcccagtcagatgggctgttgccatttaaaatcactgtaattaattagtttgattagagcacaaagcttagctaatcaaccattatttttcattttgtttgttctaagaggattgaaaatcagtttagtttaaatgtctttctgttaggcctttctttcttacaatgaagagatgattcttctagtttatggttaaaagtttttgaagtgtctcaaaaatattttactaactgtaaccctaaaattgatgtcttttggtttatgaaatcagtaatttttgatatttccccagttctttttaatggggtcaataatggacattctagtttaaggtggttgatggatttagccatatatgctgctaaagaaattgtctaccttttcttcctcacctgttccatttatgtaaagttgagattagagggaaagcattttctatatcaattgtgtttaaacctttcaagaaggttatttagctagcttagtgttgaactaaattttttttaaacaaggcaaggtctaatgctgttttgagattctgaaattaatgaaaatacttatttcagaaatgcatttaatgctttttttcttgtgacagttacgcaaatcagcttgaattccatatgtccctgagttatttttatcataaagccacaaatgtattataacaaggcaaattgtaatatatataatcctgaactcatgaccatgtctcggtttattttttttttcttggattgaaaagtactgaaattcaatgtgacattaaaatgcaaattttcctatttatttgagtagaaaatcacttaccagtgagcatatatattttaaaatactttctttggatattgtaattcttaactggttgtaaattagaaaagctgggattacatatggtgtgcggttacagtctaaattttttcatcctcctatgcatcataagcatgtttgtaatattttcaaaaatagttctactgatgctacaggaatttcaagcctgtggtgaatgttagtatttaccatagggagtgaagtggagttatggtttcattcaatagagtattgctgattatacttgagtggaatcctttcctcacgtactcccacagacgtctgggcctggaaattttttttttattttattttattgtttttttttttagaaaaacaccacttttattatgtacaataaaatatttcattagcttgaattgtatagatttttaaaaattcaatgaaagcatgttgtttaatttctttttaaaatcactgttgggctttgaaagcattgagaatataatatgaaattatgaca

SEQ ID NO: 162271 - DNA, 1423 bp, Artificial Sequence
  derived and/or modified sequence
aagtcaggtggccgctgccgccgccgccgccgcggtttgtcgccagaaggaagatggcggatctggaggagcagttgtctgatgaagagaaggtgcgtatagcagcaaaattcatcattcatgcccctcctggagaatttaatgaggttttcaatgatgttcggttactgcttaataatgacaatcttctcagggaaggagcagcccatgcatttgcacagtataacttggaccagtttactccagtaaaaattgaaggttatgaagatcaggtattgataacagaacatggcgacttgggaaatggaaagtttttggatccaaagaacagaatctgttttaaatttgatcacttaaggaaggaggcaactgatccaagaccctgtgaagtagaaaatgcagttgaatcatggagaacttcagtagaaactgctctgagagcttacgtaaaagaacattacccgaatggagtctgcactgaatggtcgttggaggtcagaatggaagtttacaatcactccttcaaccactcaagtggttggcatcttgaaaattcaggttcattattatgaagatggtaatgttcagctagtgagtcataaagatatacaagattccctaacagtgtctaatgaagtgcaaacagcaaaagaatttataaagattgtagaagctgcagaaaatgaataccagactgccatcagtgagaattatcagacaatgtcggacactactttcaaagccttacgtcgacagttgccagttacacgcactaagattgattggaacaagatccttagctacaagattggcaaagagatgcagaatgcataagatgaacattgcatgaccggatcattttagtgtctttgcgttaaaaaatcattgcaaaagtattctgaactgtcaagctgcccagtcagatgggctgttgccatttaaaatcactgtaattaattagtttgattagagcacaaagcttagctaatcaaccattatttttcattttgtttgttctaagaggattgaaaatcagtttagtttaaatgtctttctgttaggcctttctttcttacaatgaagagatgattcttctagtttatggttaaaagtttttgaagtgtctcaaaaatattttactaactgtaaccctaaaattgatgtcttttggtttatgaaatcagtaatttttgatatttccccagttctttttaatggggtcaataatggacattctagtttaaggtggttgatggatttagccatatatgctgctaaagaaattgtctaccttttcttcctcacctgttccatttatgtaaagttgagattagagggaaagcattttctatatcaattgtgtttaaacctttcaagaaggttatttagctagcttagtgttgaactaaattttttttaaaca

SEQ ID NO: 162272 - DNA, 861 bp, Artificial Sequence
  derived and/or modified sequence
atggccgacctggaggagcagctgagcgacgaggagaaggtgagaatcgccgccaagttcatcatccacgccccccccggcgagttcaacgaggtgttcaacgacgtgagactgctgctgaacaacgacaacctgctgagagagggcgccgcccacgccttcgcccagtacaacctggaccagttcacccccgtgaagatcgagggctacgaggaccaggtgctgatcaccgagcacggcgacctgggcaacggcaagttcctggaccccaagaacagaatctgcttcaagttcgaccacctgagaaaggaggccaccgaccccagaccctgcgaggtggagaacgccgtggagagctggagaaccagcgtggagaccgccctgagagcctacgtgaaggagcactaccccaacggcgtgtgcaccgtgtacggcaagaagatcgacggccagcagaccatcatcgcctgcatcgagagccaccagttccaggccaagaacttctggaacggcagatggagaagcgagtggaagttcaccatcacccccagcaccacccaggtggtgggcatcctgaagatccaggtgcactactacgaggacggcaacgtgcagctggtgagccacaaggacatccaggacagcctgaccgtgagcaacgaggtgcagaccgccaaggagttcatcaagatcgtggaggccgccgagaacgagtaccagaccgccatcagcgagaactaccagaccatgagcgacaccaccttcaaggccctgagaagacagctgcccgtgaccagaaccaagatcgactggaacaagatcctgagctacaagatcggcaaggagatgcagaacgcctag

SEQ ID NO: 162273 - DNA, 519 bp, Artificial Sequence
  derived and/or modified sequence
atggccgacctggaggagcagctgagcgacgaggagaaggtgagaatcgccgccaagttcatcatccacgccccccccggcgagttcaacgaggtgttcaacgacgtgagactgctgctgaacaacgacaacctgctgagagagggcgccgcccacgccttcgcccagtacaacctggaccagttcacccccgtgaagatcgagggctacgaggaccaggtgctgatcaccgagcacggcgacctgggcaacggcaagttcctggaccccaagaacagaatctgcttcaagttcgaccacctgagaaaggaggccaccgaccccagaccctgcgaggtggagaacgccgtggagagctggagaaccagcgtggagaccgccctgagagcctacgtgaaggagcactaccccaacggcgtgtgcaccgagtggagcctggaggtgagaatggaggtgtacaaccacagcttcaaccacagcagcggctggcacctggagaacagcggcagcctgctgtag

SEQ ID NO: 162274 - protein, 240 aa, Artificial Sequence
  derived and/or modified sequence
MAGPPRLLLLPLLLALARGLPGALAAQEVQQSPHCTTVPVGASVNITCSTSGGLRGIYLRQLGPQPQDIIYYEDGVVPTTDRRFRGRIDFSGSQDNLTITMHRLQLSDTGTYTCQAITEVNVYGSGTLVLVTEEQSQGWHRCSDAPPRASALPAPPTGSALPDPQTASALPDPPAASALPAALAVISFLLGLGLGVACVLARTQIKKLCSWRDKNSAACVVYEDMSHSRCNTLSSPNQYQ

SEQ ID NO: 162275 - DNA, 723 bp, Artificial Sequence
  derived and/or modified sequence
atggccgggcctcctcggctgctcctgttacctctccttctggccctcgctagaggtttaccaggcgccctggcggcccaggaagtccagcagtcaccacattgtaccaccgttccagttggagcctctgtcaacatcacgtgcagtaccagcggtgggctacgcgggatttatctaagacagcttggacctcagccgcaagacatcatctattatgaggatggagtggtccctacaaccgatcgtaggttcagagggcggatcgatttttccggtagtcaggataacctcaccatcactatgcacaggttacaattatcagataccggtacttacacatgccaggccattacagaagtgaacgtgtacggcagtggaacactcgtgctggtcacggaagaacagtcgcagggctggcatcggtgctccgacgctcctccccgcgcctccgcattacctgccccgcctacgggctctgcactccccgacccacagactgcctccgccctgccagaccctccagccgccagcgcactccctgccgctctggccgtcatctcttttctcctggggttaggcctgggtgtggcttgcgttttagccaggacccagatcaagaagctctgtagctggagggacaagaactccgctgcttgcgtcgtctacgaggatatgagtcattcccggtgcaatacattatcatcgcctaaccagtatcagtag

SEQ ID NO: 162276 - DNA, 723 bp, Artificial Sequence
  derived and/or modified sequence
atggccggccccccccggctgctgctgctgcccctgctgctggccctggcccggggcctgcccggggccctggccgcccaggaggtgcagcagagcccccactgcaccaccgtgcctgtgggcgcctctgtgaacatcacctgcagcaccagcggcggcctgcggggcatctacctgcggcagctgggcccccagccccaggacatcatctactatgaagatggagtggtgcccaccacagaccggcgcttccggggcagaattgacttcagcggcagccaggacaacctgaccatcaccatgcaccggctgcagctgagtgacaccggcacctacacctgccaggccatcacagaggtgaatgtgtatggcagcggcaccctggtgctggtgacagaggagcagagccagggctggcaccgctgcagtgatgccccaccccgggccagcgccctgcctgcccccccaactggaagtgccctgcctgacccccagacagccagcgccctgcctgaccccccagctgccagcgccctgcctgctgccctggccgtcatctccttcctgctgggcctgggcctgggcgtggcctgtgtgctggcccggacccagatcaagaagctgtgctcctggagggacaagaacagcgctgcctgtgtggtgtatgaggacatgagccacagccgctgcaacaccctgagcagccccaaccagtaccagtag

SEQ ID NO: 162277 - DNA, 723 bp, Artificial Sequence
  derived and/or modified sequence
atggccggccccccccggctgctgctgctgcccctgctgctggccctggcccgcggattaccaggagcactcgcagctcaggaagttcaacaatcacctcactgtaccacagtccccgtaggggccagcgttaacatcacttgttctacgtccggtggcctcagaggaatttatttacggcagcttggacctcaaccccaggatattatttattatgaggacggcgtagtgcctaccacggaccgccgattcagagggcgcattgactttagcggcagccaggataacctaaccattaccatgcataggcttcagctgtccgatacgggaacttacacgtgtcaggccataaccgaagtgaatgtttacgggtccggaaccttggtgctggtcaccgaggagcagtcacagggatggcatcgctgctccgatgcaccgccacgagcctctgctctcccggctccacccactggcagtgcccttcccgacccccagaccgccagtgcgctgccggacccccctgcagcttccgctcttcctgccgctctggctgtcatttcattcctattgggcctgggtctgggcgtagcgtgtgtgctggcacgtacacagattaaaaagctgtgttcttggcgggacaaaaattctgcggcttgcgtggtgtatgaggatatgtctcatagccgttgtaatacactgtcttctcccaaccaatatcagtag

SEQ ID NO: 162278 - DNA, 723 bp, Artificial Sequence
  derived and/or modified sequence
atggccggaccaccccgtttgttactgctgccattactgctcgccctcgcgagagggctccctggagctttagcagcccaggaggtgcaacagtcaccccactgcaccactgtcccagttggggctagcgtgaatatcacgtgctccacctccggcggactgagggggatttatctgagacaactgggacctcagccccaggatataatatattatgaagatggagtggttcccactacggacaggaggtttcgaggacggattgatttctccggcagccaggacaatctcaccattacaatgcatcggctgcagttgtccgatacagggacctacacctgccaggcaatcacagaagtgaatgtctacggtagtgggactctggtcttagtgactgaggaacagtcccagggttggcaccggtgcagcgatgctccacctcgcgcttctgctctcccagccccacctactggtagcgccctgcccgaccctcaaactgcttctgctcttccagatccaccagccgcttctgctctgcctgccgcacttgccgtaatctccttcctgttaggacttggactgggcgtcgcttgtgtgctggctagaactcagattaagaaactttgctcctggagggacaagaactccgctgcgtgcgtggtctacgaggacatgagccactcaagatgtaatacgctgtcttctccaaaccagtaccagtag

SEQ ID NO: 162279 - DNA, 1283 bp, Artificial Sequence
  derived and/or modified sequence
ctgagctctgagcgcctgcggtctcctgtgtgctgctctctgtggggtcctgtagacccagagaggctcagctgcactcgcccggctgggagagctgggtgtggggaacatggccgggcctccgaggctcctgctgctgcccctgcttctggcgctggctcgcggcctgcctggggccctggctgcccaagaggtgcagcagtctccccactgcacgactgtccccgtgggagcctccgtcaacatcacctgctccaccagcgggggcctgcgtgggatctacctgaggcagctcgggccacagccccaagacatcatttactacgaggacggggtggtgcccactacggacagacggttccggggccgcatcgacttctcagggtcccaggacaacctgactatcaccatgcaccgcctgcagctgtcggacactggcacctacacctgccaggccatcacggaggtcaatgtctacggctccggcaccctggtcctggtgacagaggaacagtcccaaggatggcacagatgctcggacgccccaccaagggcctctgccctccctgccccaccgacaggctccgccctccctgacccgcagacagcctctgccctccctgacccgccagcagcctctgccctccctgcggccctggcggtgatctccttcctcctcgggctgggcctgggggtggcgtgtgtgctggcgaggacacagataaagaaactgtgctcgtggcgggataagaattcggcggcatgtgtggtgtacgaggacatgtcgcacagccgctgcaacacgctgtcctcccccaaccagtaccagtgacccagtgggcccctgcacgtcccgcctgtggtccccccagcaccttccctgccccaccatgccccccaccctgccacacccctcaccctgctgtcctcccacggctgcagcagagtttgaagggcccagccgtgcccagctccaagcagacacacaggcagtggccaggccccacggtgcttctcagtggacaatgatgcctcctccgggaagccttccctgcccagcccacgccgccaccgggaggaagcctgactgtcctttggctgcatctcccgaccatggccaaggagggcttttctgtgggatgggcctgggcacgcggccctctcctgtcagtgccggcccacccaccagcaggcccccaacccccaggcagcccggcagaggacgggaggagaccagtcccccacccagccgtaccagaaataaaggcttctgtgcttccttt

SEQ ID NO: 162280 - DNA, 723 bp, Artificial Sequence
  derived and/or modified sequence
atggccggcccccccagactgctgctgctgcccctgctgctggccctggccagaggcctgcccggcgccctggccgcccaggaggtgcagcagagcccccactgcaccaccgtgcccgtgggcgccagcgtgaacatcacctgcagcaccagcggcggcctgagaggcatctacctgagacagctgggcccccagccccaggacatcatctactacgaggacggcgtggtgcccaccaccgacagaagattcagaggcagaatcgacttcagcggcagccaggacaacctgaccatcaccatgcacagactgcagctgagcgacaccggcacctacacctgccaggccatcaccgaggtgaacgtgtacggcagcggcaccctggtgctggtgaccgaggagcagagccagggctggcacagatgcagcgacgccccccccagagccagcgccctgcccgccccccccaccggcagcgccctgcccgacccccagaccgccagcgccctgcccgacccccccgccgccagcgccctgcccgccgccctggccgtgatcagcttcctgctgggcctgggcctgggcgtggcctgcgtgctggccagaacccagatcaagaagctgtgcagctggagagacaagaacagcgccgcctgcgtggtgtacgaggacatgagccacagcagatgcaacaccctgagcagccccaaccagtaccagtag

SEQ ID NO: 162281 - protein, 214 aa, Artificial Sequence
  derived and/or modified sequence
MASHEVDNAELGSASAHGTPGSEAGPEELNTSVYQPIDGSPDYQKAKLQVLGAIQILNAAMILALGVFLGSLQYPYHFQKHFFFFTFYTGYPIWGAVFFCSSGTLSVVAGIKPTRTWIQNSFGMNIASATIALVGTAFLSLNIAVNIQSLRSCHSSSESPDLCNYMGSISNGMVSLLLILTLLELCVTISTIAMWCNANCCNSREEISSPPNSV

SEQ ID NO: 162282 - protein, 91 aa, Artificial Sequence
  derived and/or modified sequence
MNIASATIALVGTAFLSLNIAVNIQSLRSCHSSSESPDLCNYMGSISNGMVSLLLILTLLELCVTISTIAMWCNANCCNSREEISSPPNSV

SEQ ID NO: 162283 - DNA, 645 bp, Artificial Sequence
  derived and/or modified sequence
atggctagtcatgaggtggacaacgctgaactcgggagcgcgtctgcccacggaacacctggctccgaagcggggccagaagaactaaacacaagcgtttatcagccaatcgacggaagtcccgattatcagaaggcaaagctgcaagtcctgggcgccattcagatcttgaatgccgcgatgatactggccctgggcgtctttctggggtctctccagtatccctatcattttcagaagcacttttttttctttactttctatacgggctaccccatttggggagcagtgtttttctgctcgtccggtactctgagcgttgtggcgggtatcaaaccgacgagaacgtggatccagaacagttttggcatgaacatcgcgagtgccactatcgcactggtcgggaccgctttcttgagtctgaatatagctgtcaatatccagagcctccgtagctgccattcatcttccgagtcccctgatttgtgtaactatatggggtcaatcagcaatgggatggtgtccttgctgctcatcttaaccctactggagctgtgcgtgactatctctacaattgctatgtggtgcaatgccaattgctgcaattcccgcgaagagatttcctctccccccaatagcgtctag

SEQ ID NO: 162284 - DNA, 645 bp, Artificial Sequence
  derived and/or modified sequence
atggccagccatgaggtggacaatgctgagctgggcagcgccagcgcccacggcaccccaggcagcgaggccggccctgaggagctgaacacctctgtgtaccagcccattgatggcagcccagactaccagaaggccaagctgcaggtgctgggcgccatccagatcctgaatgctgccatgatcctggccctgggcgtcttcctgggcagcctgcagtacccctaccacttccagaagcacttcttcttcttcaccttctacacaggctaccccatctggggcgctgtgttcttctgcagcagcggcaccctgtctgtggtggccggcatcaagcccaccaggacctggatccagaacagctttggcatgaacatcgccagcgccaccatcgccctggtgggcacagccttcctgagcctgaacattgctgtgaacatccagagcctgcggagctgccacagcagcagcgagagcccagacctgtgcaactacatgggcagcatcagcaatggcatggtgtccctgctgctgatcctgaccctgctggagctgtgtgtgaccatcagcaccatcgccatgtggtgcaatgccaactgctgcaacagccgggaggagatcagcagcccccccaacagcgtgtag

SEQ ID NO: 162285 - DNA, 1613 bp, Artificial Sequence
  derived and/or modified sequence
acttgcgacaaggtggacttgggaggaaagccgtctgccaaagcctgaagcctccaagccataaacaaccccaatggcctcccacgaagttgataatgcagagctggggtcagcctctgcccatggtaccccaggcagtgaggcgggaccagaagagctgaatacttctgtctaccagcccatagatggatcaccagattatcagaaagcaaaattacaagttcttggggccatccagatcctgaatgcagcaatgattctggctttgggtgtctttctgggttccttgcaatacccataccacttccaaaagcacttctttttcttcaccttctacacaggctacccgatttggggtgctgtgtttttctgtagttcaggaaccttgtctgttgtagcagggataaaacccacaagaacatggatacagaacagttttggaatgaacattgccagtgctacaattgcactagtggggactgcttttctctcactaaatatagcagttaatatccagtcattaaggagttgtcactcttcatcagagtcaccggacctatgcaattacatgggctccatatcaaatggcatggtgtctctactgctgattctcaccttgctggaattatgcgtaaccatctctaccatagccatgtggtgcaatgcaaactgctgtaattcaagagaggaaatttcctcacctcccaattctgtgtaatcaagaatacctccttaattctgagagcatgaatatttgaccttaaatctccagtgactcagagcttcacccacaaactcaggagaacataagcctgctcgtaaagctcaatccttctatcatggcaccaatcacaagaaccttggacgtttgactgactctatcctttctctcctaactataaatcctatttgtgtgtcgtgggtatggaaggacagatatatttctttaggcattcttggatatctgtaacttctatgatcattactccaaagttgtttccagaaattggttctatttcttcttatccacctactccattgctttatgaggtttaaggaaggaaggcggtataatccctattcaatatattttttctaaaatccaacttctgaccgcccagtaggaagaaaaatgagacattttttccattacagagaaatgcttcttgactttaacatcagcattataaaaagtgtcaaataaaaaattaccatcattatcattaaaataaattttcactgtatttgagatgggagggttaaggctcagggattttatttcagtgaactgctggaactcacacatgccctgatatgtaaatgatgatttatgttggcgagtctgagagcaagcccaaatgtgttcttcaaaggacaatgggaaactgtaaagtagagaactaaagaataaggcctttagaatctgacacatctgggttcaaattctgaaactgtcacttattacctgtatgaacatgggcaaattatctaatctctctgatctatttttcctcatctgtaaaataggtgtaataataacaactactttgtcggttgctctgagggttaaatgaaaataaaaagaaaatgtgaaacagcaccacaggtacttg

SEQ ID NO: 162286 - DNA, 645 bp, Artificial Sequence
  derived and/or modified sequence
atggccagccacgaggtggacaacgccgagctgggcagcgccagcgcacacggaacccccggaagtgaagcgggccccgaggaactgaatactagcgtgtatcagccaattgatggcagtcccgactaccagaaggccaaattgcaggtactaggggcaatccaaattctaaacgccgctatgattctggccctaggcgtcttcctcggttccctgcagtacccataccactttcagaaacacttctttttttttacgttttacactgggtaccccatctggggcgcagtgtttttctgttcctctggaaccttatccgtggtagctggaattaagccaacccgcacatggattcagaacagtttcgggatgaatatcgcttccgcaactatagccctggtggggacagctttcctgagcctgaatatcgcagtgaacatccaatccctgagatcctgtcattcctccagcgaaagccccgatctgtgcaattatatgggcagtatctcaaacggcatggtgtcgctgttactgattctcaccctgctggaactctgcgtcaccattagtaccattgctatgtggtgcaacgcaaactgttgcaactctcgtgaggaaatttcatccccacctaatagtgtctag

SEQ ID NO: 162287 - DNA, 645 bp, Artificial Sequence
  derived and/or modified sequence
atggcatctcacgaggttgataacgccgaactgggtagcgctagcgctcacggtactccgggttcagaggctggcccagaggaactcaatacatcagtttaccagcctatcgacgggagtccagattatcaaaaggccaaactgcaggtgttaggagctattcagattctcaacgcagctatgatcctcgccctgggcgtattcttgggatctctgcaatacccctaccacttccagaagcatttcttcttttttaccttttacacaggataccctatttggggagcggtgtttttttgcagctcagggaccttaagcgttgtggctggaataaagcctactcgcacctggattcagaatagcttcggcatgaacatcgcgtcagctacgatagctttggtgggcaccgcctttctgtcactgaacattgcagtcaatattcagagtcttaggtcatgccactcgtcctcagagagccctgacttgtgtaactacatgggctcaatttccaatggcatggtatccctgctgttaattcttacgcttttggaactatgcgtgacaatctcgacgatagcaatgtggtgcaatgccaactgttgtaattctcgggaagagatctcaagtcctccaaattcagtttag

SEQ ID NO: 162288 - DNA, 645 bp, Artificial Sequence
  derived and/or modified sequence
atggccagccacgaggtggacaacgccgagctgggcagcgccagcgcccacggcacccccggcagcgaggccggccccgaggagctgaacaccagcgtgtaccagcccatcgacggcagccccgactaccagaaggccaagctgcaggtgctgggcgccatccagatcctgaacgccgccatgatcctggccctgggcgtgttcctgggcagcctgcagtacccctaccacttccagaagcacttcttcttcttcaccttctacaccggctaccccatctggggcgccgtgttcttctgcagcagcggcaccctgagcgtggtggccggcatcaagcccaccagaacctggatccagaacagcttcggcatgaacatcgccagcgccaccatcgccctggtgggcaccgccttcctgagcctgaacatcgccgtgaacatccagagcctgagaagctgccacagcagcagcgagagccccgacctgtgcaactacatgggcagcatcagcaacggcatggtgagcctgctgctgatcctgaccctgctggagctgtgcgtgaccatcagcaccatcgccatgtggtgcaacgccaactgctgcaacagcagagaggagatcagcagcccccccaacagcgtgtag

SEQ ID NO: 162289 - protein, 220 aa, Artificial Sequence
  derived and/or modified sequence
MLRLLLALNLFPSIQVTGNKILVKQSPMLVAYDNAVNLSCKYSYNLFSREFRASLHKGLDSAVEVCVVYGNYSQQLQVYSKTGFNCDGKLGNESVTFYLQNLYVNQTDIYFCKIEVMYPPPYLDNEKSNGTIIHVKGKHLCPSPLFPGPSKPFWVLVVVGGVLACYSLLVTVAFIIFWVRSKRSRLLHSDYMNMTPRRPGPTRKHYQPYAPPRDFAAYRS

SEQ ID NO: 162290 - DNA, 663 bp, Artificial Sequence
  derived and/or modified sequence
atgttgcggctgttgcttgccctcaacctgttcccttcaattcaggtgaccggaaacaagattttagtgaaacagtccccaatgttggtcgcttatgataatgctgtgaacctgtcttgtaagtatagctacaatctgttctcacgagagtttagggcgagcctgcataagggactcgactcagctgtggaagtatgtgtagtgtacggaaactatagtcagcagttacaagtgtactcgaaaacaggctttaactgcgacggtaagctgggcaacgaatctgtgacgttctatctccagaacctgtacgttaaccagacagatatttacttttgtaagatcgaggttatgtaccccccgccctatctggataatgaaaaatccaatggcaccatcatccatgtcaagggaaagcacctctgccctagccctctttttcctggccccagcaagcctttctgggttctggtcgtagtgggcggagtgctggcttgttactccctcctagtgactgtggcattcatcatcttttgggtcaggtcaaaaaggagccgtctgctgcatagcgactatatgaatatgactccaaggcgccccgggcctaccagaaaacactaccagccttatgctcctccgcgtgactttgccgcctatcggagctag

SEQ ID NO: 162291 - DNA, 663 bp, Artificial Sequence
  derived and/or modified sequence
atgctgcggctgctgctggccctgaacctcttccccagcatccaggtgactggaaacaagatcctggtgaagcagagccccatgctggtggcctatgacaatgctgtgaacctgagctgcaagtacagctacaacctcttcagccgggagttccgggccagcctgcacaagggcctggacagcgctgtggaggtgtgtgtggtgtatggcaactacagccagcagctgcaggtgtacagcaagacaggcttcaactgtgatggcaagctgggcaatgaatctgtgaccttctacctgcagaacctgtatgtgaaccagacagacatctacttctgcaagattgaggtgatgtaccccccaccctacctggacaatgagaagagcaatggcaccatcatccacgtgaagggcaagcacctgtgccccagccccctcttccctggccccagcaagcccttctgggtgctggtggtggtgggcggcgtgctggcctgctacagcctgctggtgacagtggccttcatcatcttctgggtgcgcagcaagaggagccggctgctgcacagcgactacatgaacatgaccccaagaagacctggccccaccaggaagcactaccagccctatgccccaccccgggactttgctgcctaccgctcctag

SEQ ID NO: 162292 - DNA, 663 bp, Artificial Sequence
  derived and/or modified sequence
atgctgcggctgctgctggccctgaacctgttccccagcatccaggtgactggcaacaaaattcttgttaagcagagccctatgctggtggcctatgacaatgcggtgaatttgtcctgtaaatattcatacaatttgttttctagggaattccgcgcttccctacacaaggggctggacagcgcggtggaggtctgcgtcgtgtacgggaactattcccagcagttgcaggtctactcgaagaccgggttcaactgcgacggaaaactggggaacgagtctgtgaccttttatctccagaatctttacgtgaaccagacagacatctatttttgcaaaattgaggttatgtatcccccaccatatctggataacgaaaagtctaatggcacaatcatacacgtaaagggaaaacatctgtgtcctagccccttgttccccggaccttcaaagcccttctgggtgctggtcgtcgtgggcggagtgttggcctgttactccctgctggttacagtggcatttattatcttctgggtccgctctaagcgctcccgcttactccattccgattatatgaacatgacaccacggaggcccggtcctactcggaagcattaccagccatacgccccaccccgggatttcgcggcctaccgctcatag

SEQ ID NO: 162293 - DNA, 663 bp, Artificial Sequence
  derived and/or modified sequence
atgttgaggctgctcctcgcacttaatctgtttcctagtattcaagtaacgggcaataaaatcctggtgaagcagtccccgatgctggtggcatatgacaatgccgtcaacttgtcgtgtaaatattcgtacaatctgttctcacgggaatttagggcttccttgcacaaaggcctggactccgccgttgaagtatgtgtagtgtatggcaactattcgcagcaactgcaggtgtactcgaagacggggtttaattgcgatggcaagctgggcaatgagagcgtgactttctacttacaaaacctgtatgtgaatcagacagacatatatttctgtaagattgaggtgatgtaccccccaccctatttggacaacgaaaagagcaacggaaccatcatacacgtgaagggaaagcatctgtgtcccagcccccttttcccgggaccaagcaagcccttctgggtcctcgtagtggtgggcggtgttttagcttgttatagtttactcgtgactgtcgcctttatcattttttgggtcagatcaaaacgtagcagactgctgcactcagattatatgaatatgaccccccgaaggccgggtccaacaaggaagcactatcagccgtatgctcctcctcgcgactttgcggcttaccgttcctag

SEQ ID NO: 162294 - DNA, 1598 bp, Artificial Sequence
  derived and/or modified sequence
atcatgtgccctaaggggatggtggcggtggtggtggccgtggatgacggagactctcaggccttggcaggtgcgtctttcagttcccctcacacttcgggttcctcggggaggaggggctggaaccctagcccatcgtcaggacaaagatgctcaggctgctcttggctctcaacttattcccttcaattcaagtaacaggaaacaagattttggtgaagcagtcgcccatgcttgtagcgtacgacaatgcggtcaaccttagctgcaagtattcctacaatctcttctcaagggagttccgggcatcccttcacaaaggactggatagtgctgtggaagtctgtgttgtatatgggaattactcccagcagcttcaggtttactcaaaaacggggttcaactgtgatgggaaattgggcaatgaatcagtgacattctacctccagaatttgtatgttaaccaaacagatatttacttctgcaaaattgaagttatgtatcctcctccttacctagacaatgagaagagcaatggaaccattatccatgtgaaagggaaacacctttgtccaagtcccctatttcccggaccttctaagcccttttgggtgctggtggtggttggtggagtcctggcttgctatagcttgctagtaacagtggcctttattattttctgggtgaggagtaagaggagcaggctcctgcacagtgactacatgaacatgactccccgccgccccgggcccacccgcaagcattaccagccctatgccccaccacgcgacttcgcagcctatcgctcctgacacggacgcctatccagaagccagccggctggcagcccccatctgctcaatatcactgctctggataggaaatgaccgccatctccagccggccacctcaggcccctgttgggccaccaatgccaatttttctcgagtgactagaccaaatatcaagatcattttgagactctgaaatgaagtaaaagagatttcctgtgacaggccaagtcttacagtgccatggcccacattccaacttaccatgtacttagtgacttgactgagaagttagggtagaaaacaaaaagggagtggattctgggagcctcttccctttctcactcacctgcacatctcagtcaagcaaagtgtggtatccacagacattttagttgcagaagaaaggctaggaaatcattccttttggttaaatgggtgtttaatcttttggttagtgggttaaacggggtaagttagagtagggggagggataggaagacatatttaaaaaccattaaaacactgtctcccactcatgaaatgagccacgtagttcctatttaatgctgttttcctttagtttagaaatacatagacattgtcttttatgaattctgatcatatttagtcattttgaccaaatgagggatttggtcaaatgagggattccctcaaagcaatatcaggtaaaccaagttgctttcctcactccctgtcatgagacttcagtgttaatgttcacaatatactttcgaaagaataaaatagttctcctacatgaagaaagaatatgtcaggaaataa

SEQ ID NO: 162295 - DNA, 663 bp, Artificial Sequence
  derived and/or modified sequence
atgctgagactgctgctggccctgaacctgttccccagcatccaggtgaccggcaacaagatcctggtgaagcagagccccatgctggtggcctacgacaacgccgtgaacctgagctgcaagtacagctacaacctgttcagcagagagttcagagccagcctgcacaagggcctggacagcgccgtggaggtgtgcgtggtgtacggcaactacagccagcagctgcaggtgtacagcaagaccggcttcaactgcgacggcaagctgggcaacgagagcgtgaccttctacctgcagaacctgtacgtgaaccagaccgacatctacttctgcaagatcgaggtgatgtacccccccccctacctggacaacgagaagagcaacggcaccatcatccacgtgaagggcaagcacctgtgccccagccccctgttccccggccccagcaagcccttctgggtgctggtggtggtgggcggcgtgctggcctgctacagcctgctggtgaccgtggccttcatcatcttctgggtgagaagcaagagaagcagactgctgcacagcgactacatgaacatgacccccagaagacccggccccaccagaaagcactaccagccctacgccccccccagagacttcgccgcctacagaagctag

SEQ ID NO: 162296 - protein, 262 aa, Artificial Sequence
  derived and/or modified sequence
MRNSYRFLASSLSVVVSLLLIPEDVCEKIIGGNEVTPHSRPYMVLLSLDRKTICAGALIAKDWVLTAAHCNLNKRSQVILGAHSITREEPTKQIMLVKKEFPYPCYDPATREGDLKLLQLMEKAKINKYVTILHLPKKGDDVKPGTMCQVAGWGRTHNSASWSDTLREVNITIIDRKVCNDRNHYNFNPVIGMNMVCAGSLRGGRDSCNGDSGSPLLCEGVFRGVTSFGLENKCGDPRGPGVYILLSKKHLNWIIMTIKGAV

SEQ ID NO: 162297 - DNA, 789 bp, Artificial Sequence
  derived and/or modified sequence
atgcgtaattcctaccgctttctcgcctcctcgttgtcagtcgttgtgagcctgcttctgattccagaggatgtctgcgaaaagataataggcgggaatgaagtcacaccccactcaaggccttacatggtgctgttgtccctagatagaaagactatttgtgccggcgccttaatcgccaaggactgggtgctcacggccgcccattgcaatctgaacaagcggtcccaggtcatactgggggcccattcaataaccagagaggagcctacaaagcagattatgctggtgaagaaggagttcccttacccatgttatgaccccgctacgcgcgaaggcgacttaaagctgctgcagcttatggaaaaggccaaaatcaacaaatatgtcacaatccttcacttgccgaagaaaggcgatgatgtgaaacccgggactatgtgccaggtggcgggatggggtaggacccataactcggcatcatggagtgacactcttcgtgaggttaatattacaattatagatagaaaggtttgcaacgatagaaatcattacaacttcaacccagtgattgggatgaatatggtatgtgctggcagtctccggggcggccgggactcatgcaacggtgactcaggatccccactcctgtgcgagggcgtgttccggggagtcactagctttggcttggagaataagtgtggcgatcctcggggtcccggggtgtacatcctcctgtccaaaaaacatctcaactggattattatgaccataaagggggcagtttag

SEQ ID NO: 162298 - DNA, 894 bp, Artificial Sequence
  derived and/or modified sequence
attttcaggttgattgatgtgggacagcagccacaatgaggaactcctatagatttctggcatcctctctctcagttgtcgtttctctcctgctaattcctgaagatgtctgtgaaaaaattattggaggaaatgaagtaactcctcattcaagaccctacatggtcctacttagtcttgacagaaaaaccatctgtgctggggctttgattgcaaaagactgggtgttgactgcagctcactgtaacttgaacaaaaggtcccaggtcattcttggggctcactcaataaccagggaagagccaacaaaacagataatgcttgttaagaaagagtttccctatccatgctatgacccagccacacgcgaaggtgaccttaaacttttacagctgatggaaaaagcaaaaattaacaaatatgtgactatccttcatctacctaaaaagggggacgatgtgaaaccaggaaccatgtgccaagttgcagggtggggcaggactcacaatagtgcatcttggtccgatactctgagagaagtcaatatcaccatcatagacagaaaagtctgcaatgatcgaaatcactataattttaaccctgtgattggaatgaatatggtttgtgctggaagcctccgaggtggaagagactcgtgcaatggagattctggaagccctttgttgtgcgagggtgttttccgaggggtcacttcctttggccttgaaaataaatgcggagaccctcgtgggcctggtgtctatattcttctctcaaagaaacacctcaactggataattatgactatcaagggagcagtttaaataaccgtttcctttcatttactgtggcttcttaatcttttcacaaataaaatcaatttgcatgactgta

SEQ ID NO: 162299 - DNA, 789 bp, Artificial Sequence
  derived and/or modified sequence
atgaggaacagctaccgcttcctggccagcagcctgtctgtggtggtgtccctgctgctgatcccagaagatgtgtgtgagaagatcatcggcggcaatgaggtgaccccccacagccggccctacatggtgctgctgagcctggacaggaagaccatctgtgccggggccctgattgccaaggactgggtgctgacagctgcccactgcaacctgaacaagaggagccaggtgatcctgggcgcccacagcatcacccgggaggagcccaccaagcagatcatgctggtgaagaaggagttcccctacccctgctatgaccctgccacccgggagggggacctgaagctgctgcagctgatggagaaggccaagatcaacaagtatgtgaccatcctgcacctgcccaagaagggagatgatgtgaagccaggcaccatgtgccaggtggccggctggggccgcacccacaacagcgcctcctggagcgacaccctgcgggaggtgaacatcaccatcatcgacaggaaggtgtgcaatgacaggaaccactacaacttcaaccctgtgattggcatgaacatggtgtgtgccggcagcctgcggggcggccgggacagctgcaatggagacagcggcagccccctgctgtgtgagggcgtcttccggggcgtgaccagctttggcctggagaacaagtgtggggacccccggggccctggggtgtacatcctgctgagcaagaagcacctgaactggatcatcatgaccatcaagggagctgtgtag

SEQ ID NO: 162300 - DNA, 789 bp, Artificial Sequence
  derived and/or modified sequence
atgcggaacagctaccggttcctggccagcagcctgagcgtggtggtcagcctgctcctgattcccgaggatgtttgcgagaaaatcattggtgggaacgaggtcacccctcactctaggccgtacatggtgctgctctccctcgatcgcaaaaccatctgtgccggcgcactgatcgctaaagactgggttctgacggccgcacattgtaacctaaacaagcgttcccaagttatcttgggcgctcactcaattacacgcgaagaaccaaccaaacaaattatgttagtaaaaaaagaattcccctatccttgttacgatccggcgacccgagaaggagacctaaagcttttacagctgatggagaaagccaagatcaataaatatgtgaccattctgcatctgccaaaaaagggagacgacgtgaaacctggaaccatgtgtcaggtggctggctggggccgcacacacaattcagcctcgtggtccgacaccctcagggaggttaacattaccataatcgacaggaaggtctgtaacgacagaaaccattataacttcaatccggtgattgggatgaacatggtctgtgcaggtagtctgcgggggggccgcgactcttgcaacggggactcgggtagtccactgctgtgtgagggcgtgttcaggggtgtgaccagcttcggcctggagaacaagtgtggcgacccaaggggacccggggtttacattctcttgagcaagaagcatctgaactggatcattatgaccatcaagggcgccgtttag

SEQ ID NO: 162301 - DNA, 789 bp, Artificial Sequence
  derived and/or modified sequence
atgcggaacagttatcggtttcttgctagcagcctgtccgtggtggtgtccctgctactaattcccgaggatgtctgcgagaagattatcggcggaaatgaagtcaccccccactcccgcccatatatggtcctcctctcgctagacagaaagacaatctgtgccggtgccctcattgccaaagattgggtgctgacggcagcccactgcaatttaaacaaacgctcacaagttatactgggggctcactctatcaccagggaagagcccaccaagcaaatcatgctcgtgaagaaagagttcccctacccttgctacgaccccgcaactcgcgagggtgacctcaaactcctgcagttaatggagaaggccaagatcaataaatacgtgacaattctccacttacctaaaaaaggagatgacgtcaaacctggaaccatgtgccaagtggctgggtgggggcgaacacataactccgcctcctggtccgataccctgcgggaggtaaacatcactatcatcgatcgcaaggtgtgtaacgatagaaatcactacaactttaatccagtgataggaatgaacatggtctgcgccggatcacttagaggcggtcgggactcatgcaacggggatagtggctctccactgctttgcgagggagtctttcgcggtgtgacctcgttcgggctagaaaacaaatgtggcgacccaaggggcccaggcgtctacatactattgtctaaaaagcacctaaactggattatcatgacaatcaagggagcagtgtag

SEQ ID NO: 162302 - DNA, 789 bp, Artificial Sequence
  derived and/or modified sequence
atgagaaacagctacagattcctggccagcagcctgagcgtggtggtgagcctgctgctgatccccgaggacgtgtgcgagaagatcatcggcggcaacgaggtgaccccccacagcagaccctacatggtgctgctgagcctggacagaaagaccatctgcgccggcgccctgatcgccaaggactgggtgctgaccgccgcccactgcaacctgaacaagagaagccaggtgatcctgggcgcccacagcatcaccagagaggagcccaccaagcagatcatgctggtgaagaaggagttcccctacccctgctacgaccccgccaccagagagggcgacctgaagctgctgcagctgatggagaaggccaagatcaacaagtacgtgaccatcctgcacctgcccaagaagggcgacgacgtgaagcccggcaccatgtgccaggtggccggctggggcagaacccacaacagcgccagctggagcgacaccctgagagaggtgaacatcaccatcatcgacagaaaggtgtgcaacgacagaaaccactacaacttcaaccccgtgatcggcatgaacatggtgtgcgccggcagcctgagaggcggcagagacagctgcaacggcgacagcggcagccccctgctgtgcgagggcgtgttcagaggcgtgaccagcttcggcctggagaacaagtgcggcgaccccagaggccccggcgtgtacatcctgctgagcaagaagcacctgaactggatcatcatgaccatcaagggcgccgtgtag

SEQ ID NO: 162303 - protein, 340 aa, Artificial Sequence
  derived and/or modified sequence
MGKDYYQTLGLARGASDEEIKRAYRRQALRYHPDKNKEPGAEEKFKEIAEAYDVLSDPRKREIFDRYGEEGLKGSGPSGGSGGGANGTSFSYTFHGDPHAMFAEFFGGRNPFDTFFGQRNGEEGMDIDDPFSGFPMGMGGFTNVNFGRSRSAQEPARKKQDPPVTHDLRVSLEEIYSGCTKKMKISHKRLNPDGKSIRNEDKILTIEVKKGWKEGTKITFPKEGDQTSNNIPADIVFVLKDKPHNIFKRDGSDVIYPARISLREALCGCTVNVPTLDGRTIPVVFKDVIRPGMRRKVPGEGLPLPKTPEKRGDLIIEFEVIFPERIPQTSRTVLEQVLPI

SEQ ID NO: 162304 - protein, 240 aa, Artificial Sequence
  derived and/or modified sequence
MFAEFFGGRNPFDTFFGQRNGEEGMDIDDPFSGFPMGMGGFTNVNFGRSRSAQEPARKKQDPPVTHDLRVSLEEIYSGCTKKMKISHKRLNPDGKSIRNEDKILTIEVKKGWKEGTKITFPKEGDQTSNNIPADIVFVLKDKPHNIFKRDGSDVIYPARISLREALCGCTVNVPTLDGRTIPVVFKDVIRPGMRRKVPGEGLPLPKTPEKRGDLIIEFEVIFPERIPQTSRTVLEQVLPI

SEQ ID NO: 162305 - DNA, 1023 bp, Artificial Sequence
  derived and/or modified sequence
atggggaaggactactatcagaccttaggcctggctcgtggagcctcagatgaagaaatcaaaagagcttatcgacgacaagccctgcggtaccacccagacaaaaacaaggagcccggtgcagaggaaaagttcaaagagatcgcagaagcctacgatgtgctttccgaccctagaaagagggagatcttcgataggtacggagaagaaggcctcaaggggagcgggccctccggcggcagcggtggaggtgccaacggcaccagtttcagttatacatttcatggggatccacatgccatgtttgccgaattctttggcggacgaaaccctttcgacacttttttcggccagaggaatggagaggaaggtatggatatagatgacccattctccgggttccccatgggcatgggtggtttcacaaatgtgaatttcgggcggtctagatctgcccaggagccggctcggaagaagcaggacccacccgtaacacacgacctgagggtctctctggaggagatttacagcggttgtaccaaaaaaatgaagatctcccacaagcgcctgaatcctgacgggaagagcatccggaatgaggataagatcctgactatcgaggtgaaaaagggctggaaggaggggacgaagataacctttcctaaagaaggggatcagaccagtaacaacattcccgccgatattgtgttcgtacttaaggacaaaccgcacaacatttttaagcgggatgggagcgatgtcatttacccggcacgtatcagcttacgggaggctttgtgtggctgtacggtgaacgtgcctactctggacgggcggaccatcccggtggtgttcaaggatgttatacggcccggtatgcgacgtaaggtccccggggagggtctgccactgcctaaaactccagagaagcgaggcgacttgataatagagttcgaagttatttttccggaaagaattccacaaaccagtcgcacggtcttagagcaagtgcttcccatctag

SEQ ID NO: 162306 - DNA, 1023 bp, Artificial Sequence
  derived and/or modified sequence
atgggcaaggactactaccagaccctgggcctggcccggggggccagtgatgaggagatcaagagggcctaccgccggcaggccctgcgctaccacccagacaagaacaaggagcctggagctgaggagaagttcaaggagattgctgaggcctatgatgtgctgagtgaccccaggaagcgggagatctttgacagatatggagaggagggcctgaagggcagcggccccagcggcggcagcggcggcggggccaacggcaccagcttctcctacaccttccatggagacccccacgccatgtttgctgagttcttcggcggcaggaacccctttgacaccttcttcggccagagaaatggagaggagggcatggacattgatgaccccttcagcggcttccccatgggcatgggcggcttcaccaacgtgaactttggccgcagccgcagcgcccaggagcccgccaggaagaagcaggacccccctgtgacccatgacctgcgggtgtccctggaggagatctacagcggctgcaccaagaagatgaagatcagccacaagaggctgaacccagatggcaagagcatcagaaatgaagacaagatcctgaccatcgaggtgaagaagggctggaaggagggcaccaagatcaccttccccaaggagggggaccagaccagcaacaacatcccagctgacatcgtgtttgtgctgaaggacaagccccacaacatcttcaagagagatggcagtgatgtgatctacccagcccgcatcagcctgcgggaggccctgtgtggctgcaccgtgaatgtgcccaccctggatggccgcaccatccctgtggtgttcaaggatgtgatccggcccggcatgaggaggaaggtgcctggagagggcctgcccctgcccaagaccccagagaagagaggagacctgatcatcgagtttgaggtgatcttccctgagcgcatcccccagaccagcaggacagtgctggagcaggtgctgcccatctag

SEQ ID NO: 162307 - DNA, 1023 bp, Artificial Sequence
  derived and/or modified sequence
atgggcaaggactactaccagaccctgggcctggcccggggcgccagcgatgaggaaatcaagagagcgtaccgtaggcaggcgctaagataccaccccgataaaaataaggaacccggagccgaggaaaagttcaaggagatagccgaagcctacgacgttctctcggaccctcggaaaagagaaatcttcgaccgttacggcgaagaaggcctcaaggggagcggcccctctggaggctcaggcgggggggcaaacggcacctcattttcctatacttttcacggggacccccacgccatgtttgccgagtttttcggtggcagaaaccccttcgacacgtttttcggtcagcgtaacggggaggaaggcatggatatcgatgacccattctctgggtttcccatgggtatgggtggtttcacgaatgtcaatttcggccggtctcggagcgcccaggagccagcccgcaagaagcaggacccaccagttacacacgacctgcgggtatccctggaggaaatctattcggggtgtacgaagaaaatgaaaatctcgcacaagcggcttaaccccgacggcaagtcaattaggaacgaagacaagatccttacgattgaagtgaagaagggctggaaggaaggaaccaagattacatttccaaaagagggggaccaaacctctaataacatccccgccgatatcgtatttgtgcttaaagacaaaccacacaatatttttaagcgagatggctccgatgtaatctacccggcgagaatatccctcagagaggccctgtgtggctgcaccgtcaacgtccccaccctggatggtagaacaatcccggtcgtattcaaggacgtgataagaccagggatgcggaggaaggtaccaggtgaaggtctgcctctccccaaaacacccgagaagaggggggacctgattatcgaatttgaagtgatctttcctgagcgcattccccagacttcacggactgtgcttgaacaggtgcttcccatttag

SEQ ID NO: 162308 - DNA, 1023 bp, Artificial Sequence
  derived and/or modified sequence
atgggtaaggattactaccagactcttgggttggcccgaggggcttccgatgaggaaattaagagagcgtaccgtagacaggcacttcggtaccaccctgataaaaacaaggaacccggagccgaggagaaattcaaggaaatcgctgaagcttacgatgtcctgagcgatccaagaaaacgcgagattttcgataggtatggcgaggaaggtcttaaaggaagcggcccatccggcggtagtggtggtggcgctaatgggacttccttctcttatacttttcacggtgacccgcacgctatgttcgccgagttctttggcggacggaatccatttgatacatttttcggccagcgtaacggtgaagaggggatggacatagatgacccgttttctggatttccaatgggcatgggagggttcactaatgtcaattttggcagatctcggagcgctcaggagccggctaggaagaagcaagatccccctgtgacacacgaccttcgcgtgagcctggaggagatctatagcggatgtactaaaaaaatgaaaatctcccataaacgcctgaatccagacggcaaatctataaggaacgaggataaaattctcacgatcgaggtaaaaaagggttggaaagaggggaccaaaataacttttcccaaggagggggatcagaccagtaataatattcccgctgacatcgtgtttgtcctgaaggataaaccccacaacatcttcaagagggacgggagcgatgtgatatatcccgctaggattagcctgcgggaggccttgtgcgggtgcacagtcaatgtccctactctcgacggacgtacgattcctgtggtgttcaaagatgtcattcgccctggaatgcgacgaaaggtccctggagaaggcttgcccttgcccaagacccctgagaaaagaggcgacttgatcattgaattcgaagtcatttttcccgagcggatacctcagacaagcaggactgtgctggaacaggtgctgcccatttag

SEQ ID NO: 162309 - DNA, 1023 bp, Artificial Sequence
  derived and/or modified sequence
atgggcaaggactactaccagaccctgggcctggccagaggcgccagcgacgaggagatcaagagagcctacagaagacaggccctgagataccaccccgacaagaacaaggagcccggcgccgaggagaagttcaaggagatcgccgaggcctacgacgtgctgagcgaccccagaaagagagagatcttcgacagatacggcgaggagggcctgaagggcagcggccccagcggcggcagcggcggcggcgccaacggcaccagcttcagctacaccttccacggcgacccccacgccatgttcgccgagttcttcggcggcagaaaccccttcgacaccttcttcggccagagaaacggcgaggagggcatggacatcgacgaccccttcagcggcttccccatgggcatgggcggcttcaccaacgtgaacttcggcagaagcagaagcgcccaggagcccgccagaaagaagcaggacccccccgtgacccacgacctgagagtgagcctggaggagatctacagcggctgcaccaagaagatgaagatcagccacaagagactgaaccccgacggcaagagcatcagaaacgaggacaagatcctgaccatcgaggtgaagaagggctggaaggagggcaccaagatcaccttccccaaggagggcgaccagaccagcaacaacatccccgccgacatcgtgttcgtgctgaaggacaagccccacaacatcttcaagagagacggcagcgacgtgatctaccccgccagaatcagcctgagagaggccctgtgcggctgcaccgtgaacgtgcccaccctggacggcagaaccatccccgtggtgttcaaggacgtgatcagacccggcatgagaagaaaggtgcccggcgagggcctgcccctgcccaagacccccgagaagagaggcgacctgatcatcgagttcgaggtgatcttccccgagagaatcccccagaccagcagaaccgtgctggagcaggtgctgcccatctag

SEQ ID NO: 162310 - DNA, 2233 bp, Artificial Sequence
  derived and/or modified sequence
gggacggcgacagcgggtcggcgggccgcaggagggggtcatgggtaaagactactaccagacgttgggcctggcccgcggcgcgtcggacgaggagatcaagcgggcctaccgccgccaggcgctgcgctaccacccggacaagaacaaggagcccggcgccgaggagaagttcaaggagatcgctgaggcctacgacgtgctcagcgacccgcgcaagcgcgagatcttcgaccgctacggggaggaaggcctaaaggggagtggccccagtggcggtagcggcggtggtgccaatggtacctctttcagctacacattccatggagaccctcatgccatgtttgctgagttcttcggtggcagaaatccctttgacaccttttttgggcagcggaacggggaggaaggcatggacattgatgacccattctctggcttccctatgggcatgggtggcttcaccaacgtgaactttggccgctcccgctctgcccaagagcccgcccgaaagaagcaagatcccccagtcacccacgaccttcgagtctcccttgaagagatctacagcggctgtaccaagaagatgaaaatctcccacaagcggctaaaccccgacggaaagagcattcgaaacgaagacaaaatattgaccatcgaagtgaagaaggggtggaaagaaggaaccaaaatcactttccccaaggaaggagaccagacctccaacaacattccagctgatatcgtctttgttttaaaggacaagccccacaatatctttaagagagatggctctgatgtcatttatcctgccaggatcagcctccgggaggctctgtgtggctgcacagtgaacgtccccactctggacggcaggacgatacccgtcgtattcaaagatgttatcaggcctggcatgcggcgaaaagttcctggagaaggcctccccctccccaaaacacccgagaaacgtggggacctcattattgagtttgaagtgatcttccccgaaaggattccccagacatcaagaaccgtacttgagcaggttcttccaatatagctatctgagctccccaaggactgaccagggacctttccagagctcaaggatttctggacctttctaccagttgtggaccatgagagggtgggagggcccagggagggctttcgtactgctgaatgttttccagagcatatattacaatctttcaaagtcgcacactagacttcagtggtttttcgagctatagggcatcaggtggtgggaacagcaggaaaaggcattccagtctgccccactgggtctggcagccctcccgggatgggcccacatccacctccagtccctggccaggggtgagaggcagaccagcagatggacttgatccctctgtgtctttttgcttctggctggtagataatgtcaacctgcagtcttgattcccagaccctgtacactcctccttttctgttgtgtgatcagtttgtgctttattctgtatttgtctcccatgtcttgctcttctcctggagaattctgtcttctctttggccatctcaaattgagaacctaaactattcctgcagaactgcctggttggcgtccacaagcaatacctctcgttccagcaggaccaagggagccagcctccagtgagtgactccagcaagtgcagccacctctcccttgatggtctgggagcctggcctcagcaaggggccttcctgacctctggctccagtgaagctgaatgtcctcactttgtgggtcacactctttacatttctgtaaggcaatcttggcacacgtggggcttaccagtggcccaggtaattttttgtttcatggactatggactctttcaaagggatctgatccttttgaattttgcacagccctagatacaatcccttttgataaaagggtctttgcttctgattacaggagcactgtggaacgtctgtaaatatgtttttataattccatgtatagttggtgtacactcaaaacctgtccccggcagccagtgctctctgtatagggccataatggaattctgaagaaatcttggggagggaaggggagttggaacaaatgtctgttccctggaggccagtccagtgctcagacctttagactcattgtaagttgccactgccaacatgagaccaaagtgtgtgactagtcaatgaagtgcgacagcattaaagactgatgctaaacctc

SEQ ID NO: 162311 - DNA, 1216 bp, Artificial Sequence
  derived and/or modified sequence
aggcggcgccgaaggggtaaattctgagatcctgcccctgagctttcatgagctgttgaaccatctggaattcacaggcctgtcatgagagacacgatgagaagtccttaaaggcctaaaggggagtggccccagtggcggtagcggcggtggtgccaatggtacctctttcagctacacattccatggagaccctcatgccatgtttgctgagttcttcggtggcagaaatccctttgacaccttttttgggcagcggaacggggaggaaggcatggacattgatgacccattctctggcttccctatgggcatgggtggcttcaccaacgtgaactttggccgctcccgctctgcccaagagcccgcccgaaagaagcaagatcccccagtcacccacgaccttcgagtctcccttgaagagatctacagcggctgtaccaagaagatgaaaatctcccacaagcggctaaaccccgacggaaagagcattcgaaacgaagacaaaatattgaccatcgaagtgaagaaggggtggaaagaaggaaccaaaatcactttccccaaggaaggagaccagacctccaacaacattccagctgatatcgtctttgttttaaaggacaagccccacaatatctttaagagagatggctctgatgtcatttatcctgccaggatcagcctccgggaggctctgtgtggctgcacagtgaacgtccccactctggacggcaggacgatacccgtcgtattcaaagatgttatcaggcctggcatgcggcgaaaagttcctggagaaggcctccccctccccaaaacacccgagaaacgtggggacctcattattgagtttgaagtgatcttccccgaaaggattccccagacatcaagaaccgtacttgagcaggttcttccaatatagctatctgagctccccaaggactgaccagggacctttccagagctcaaggatttctggacctttctaccagttgtggaccatgagagggtgggagggcccagggagggctttcgtactgctgaatgttttccagagcatatattacaatctttcaaagtcgcacactagacttcagtggtttttcgagctatagggcatcaggtggtgggaacagcaggaaaaggcattccagtctgccccactgggtctggcagccctcccgggatgggcccacatccacctccagtccct

SEQ ID NO: 162312 - protein, 467 aa, Artificial Sequence
  derived and/or modified sequence
MALHPRRVRLKPWLVAQVDSGLYPGLIWLHRDSKRFQIPWKHATRHSPQQEEENTIFKAWAVETGKYQEGVDDPDPAKWKAQLRCALNKSREFNLMYDGTKEVPMNPVKIYQVCDIPQPQGSIINPGSTGSAPWDEKDNDVDEEDEEDELDQSQHHVPIQDTFPFLNINGSPMAPASVGNCSVGNCSPEAVWPKTEPLEMEVPQAPIQPFYSSPELWISSLPMTDLDIKFQYRGKEYGQTMTVSNPQGCRLFYGDLGPMPDQEELFGPVSLEQVKFPGPEHITNEKQKLFTSKLLDVMDRGLILEVSGHAIYAIRLCQCKVYWSGPCAPSLVAPNLIERQKKVKLFCLETFLSDLIAHQKGQIEKQPPFEIYLCFGEEWPDGKPLERKLILVQVIPVVARMIYEMFSGDFTRSFDSGSVRLQISTPDIKDNIVAQLKQLYRILQTQESWQPMQPTPSMQLPPALPPQ

SEQ ID NO: 162313 - protein, 276 aa, Artificial Sequence
  derived and/or modified sequence
MALHPRRVRLKPWLVAQVDSGLYPGLIWLHRDSKRFQIPWKHATRHSPQQEEENTIFKAWAVETGKYQEGVDDPDPAKWKAQLRCALNKSREFNLMYDGTKEVPMNPVKIYQVCDIPQPQGSIINPGSTGSAPWDEKDNDVDEEDEEDELDQSQHHVPIQDTFPFLNINGSPMAPASVGNCSVGNCSPEAVWPKTEPLEMEVPQAPIQPFYSSPELWISSLPMTDLDIKFQYRGKEYGQTMTVSNPQGCRLFYGDLGPMPDQEELFGPVSLEQVKF

SEQ ID NO: 162314 - protein, 372 aa, Artificial Sequence
  derived and/or modified sequence
MYDGTKEVPMNPVKIYQVCDIPQPQGSIINPGSTGSAPWDEKDNDVDEEDEEDELDQSQHHVPIQDTFPFLNINGSPMAPASVGNCSVGNCSPEAVWPKTEPLEMEVPQAPIQPFYSSPELWISSLPMTDLDIKFQYRGKEYGQTMTVSNPQGCRLFYGDLGPMPDQEELFGPVSLEQVKFPGPEHITNEKQKLFTSKLLDVMDRGLILEVSGHAIYAIRLCQCKVYWSGPCAPSLVAPNLIERQKKVKLFCLETFLSDLIAHQKGQIEKQPPFEIYLCFGEEWPDGKPLERKLILVQVIPVVARMIYEMFSGDFTRSFDSGSVRLQISTPDIKDNIVAQLKQLYRILQTQESWQPMQPTPSMQLPPALPPQ

SEQ ID NO: 162315 - DNA, 2171 bp, Artificial Sequence
  derived and/or modified sequence
gagctcggcgcacctgggctgggcaggtaagggctggtgcgggacggggagaggaacctgcagtccctacttgggtagagccaggcgccccttggctaagacgtcgaggagcgtggtagcgacgggtgatcttcgctgcggacttggttcggagggacgtccgcttctggtggacagattgagcaaagaatctttgagcggtcaagggaaagacaagccgactcttcagatccctgtggacacactgcctgctcttccatatcatggccctccacccccgcagagtccggctaaagccctggctggtggcccaggtggatagtggcctctaccctgggctcatctggctacacagggactctaaacgcttccagattccctggaaacatgccacccggcatagccctcaacaagaagaggaaaataccatttttaaggcctgggctgtagagacagggaagtaccaggaaggggtggatgaccctgacccagctaaatggaaggcccagctgcgctgtgctctcaataagagcagagaattcaacctgatgtatgatggcaccaaggaggtgcccatgaacccagtgaagatatatcaagtgtgtgacatccctcagccccagggctcgatcattaacccaggatccacagggtctgctccctgggatgagaaggataatgatgtggatgaagaagatgaggaagatgagctggatcagtcgcagcaccatgttcccatccaggacaccttccccttcctgaacatcaatggttctcccatggcgccagccagtgtgggcaattgcagtgtgggcaactgcagcccggaggcagtgtggcccaaaactgaacccctggagatggaagtaccccaggcacctatacagcccttctatagctctccagaactgtggatcagctctctcccaatgactgacctggacatcaagtttcagtaccgtgggaaggagtacgggcagaccatgaccgtgagcaaccctcagggctgccgactcttctatggggacctgggtcccatgcctgaccaggaggagctctttggtcccgtcagcctggagcaggtcaaattcccaggtcctgagcatattaccaatgagaagcagaagctgttcactagcaagctgctggacgtcatggacagaggactgatcctggaggtcagcggtcatgccatttatgccatcaggctgtgccagtgcaaggtgtactggtctgggccatgtgccccatcacttgttgctcccaacctgattgagagacaaaagaaggtcaagctattttgtctggaaacattccttagcgatctcattgcccaccagaaaggacagatagagaagcagccaccgtttgagatctacttatgctttggggaagaatggccagatgggaaaccattggaaaggaaactcatcttggttcaggtcattccagtagtggctcggatgatctacgagatgttttctggtgatttcacacgatcctttgatagtggcagtgtccgcctgcagatctcaaccccagacatcaaggataacatcgttgctcagctgaagcagctgtaccgcatccttcaaacccaggagagctggcagcccatgcagcccacccccagcatgcaactgccccctgccctgcctccccagtaattgtgaatgccatcttcttccttctcttttttataatattgtacatatggatttttttattgtttagatttaaccagcttttaaatctctcttttctctaacagtgttagaagtttgtgattctccaaatatgcctagatttaaagctgatttaatttatggaaaaatcacccttcagactttgcttttctttttcaaatctcctaatggtagtatgatatagcatagtagaaggagatttggcctgggagtttggacaccaaagttctagctgcagctttgcttccaatgtgaccttgaacaagtcctttaacctctgggcttcagatttattgcttataaagtgaagagattggagtagtgcctgaaattgcatccagctttagaacggactcaatgaccttcttctacttgtacaaggctaaactgcctggaacagaatccttctgcattgttcttgtaccacatttttccttggttttgttaaagtttcctcaagcacta

SEQ ID NO: 162316 - DNA, 1404 bp, Artificial Sequence
  derived and/or modified sequence
atggcactgcaccccagaagagtccggctgaagccctggttggtggcgcaggttgattccggcctctatcccgggctgatctggctgcaccgggactctaaacgcttccagatcccatggaagcatgctacccggcacagcccacagcaggaggaagagaacacgatctttaaagcatgggcagtggaaaccggtaaataccaagagggagtagacgatcctgatcctgccaaatggaaagcacagctgagatgcgctctgaacaagtcgcgagagttcaaccttatgtacgatgggactaaagaagtgcctatgaaccctgtaaagatctaccaggtatgcgacataccccagccccagggcagtattatcaatcccgggtctacggggagcgcaccttgggacgagaaggacaatgacgtcgacgaagaggacgaggaggatgagctcgaccagtcacagcaccacgttcccattcaggacacgttccccttccttaacatcaatggtagccccatggccccggcctctgtgggaaattgcagcgtaggaaactgtagtcctgaggctgtgtggcccaagaccgaacccctggagatggaagtgccccaggcgccaatccagccgttttattccagtcctgagctgtggatcagttctctgcctatgaccgacctcgacatcaaatttcaatacagaggcaaagagtacggccagactatgactgtgagtaatccccagggttgccggttgttttacggcgatctaggccccatgccggatcaggaagaacttttcggtccggtctctctagagcaggtgaagtttcctggaccagagcatataacaaacgaaaagcaaaaattgttcacaagtaaacttctggatgtaatggatcgcggtctgatattagaagtgtcaggccacgctatatacgccatccggctctgccagtgcaaagtctattggtccgggccctgcgccccttctttagtagctcccaatctgattgagcgacagaagaaggtcaaactcttctgtttagagacctttctgagtgacctaatagcccatcagaagggccagatcgagaagcagcctccatttgagatctacttgtgttttggagaagaatggcccgacggaaaaccactggaacgaaaactgatacttgttcaggtaatccccgtggtggcccgtatgatctacgaaatgttcagtggtgacttcacccgctcatttgactcaggatctgtacgactacaaataagcacacccgatatcaaggataacattgtggcccaacttaaacagttgtatcgcattcttcaaacgcaggaatcatggcaaccgatgcagcccacaccatcaatgcagctgcctcctgctttacccccccagtag

SEQ ID NO: 162317 - DNA, 831 bp, Artificial Sequence
  derived and/or modified sequence
atggctctccacccgcggagggtgagactgaagccttggttggtcgctcaggtcgactcgggattatatcctggtctaatctggctccaccgggacagtaaacgatttcagataccctggaaacacgccactcgccactctccacagcaggaggaggagaataccatttttaaagcatgggccgtggaaacaggtaagtaccaggaaggtgtggatgatccagacccggcaaaatggaaagctcaactgcgttgcgcgctgaacaaatcgagggaattcaacctcatgtatgacggcaccaaggaggtgcccatgaaccctgtgaagatttatcaggtgtgcgatatcccgcagccccaaggcagcattatcaacccgggctctacgggaagcgctccctgggacgaaaaggacaatgacgtggacgaggaggatgaggaagatgaacttgatcagagtcagcaccacgtgcctatccaggacacattcccatttctcaatattaacggctctcccatggcccctgcttccgttggaaactgctccgtcggtaactgcagccccgaggctgtgtggcccaaaaccgagcccctggagatggaagttcctcaggcaccgatccagcctttctactcctcgcccgagttgtggatctcatctctccccatgaccgatcttgacattaaattccagtataggggcaaggagtacggccaaacaatgactgtttcaaacccacaaggatgccggctgttctacggcgaccttgggcccatgcccgatcaggaggagctgttcggcccagtgagtctggagcaggtgaagttttag

SEQ ID NO: 162318 - DNA, 4306 bp, Artificial Sequence
  derived and/or modified sequence
cttggctaagacgtcgaggagcgtggtagcgacgggtgatcttcgctgcggacttggttcggagggacgtccgcttctggtggacagattgagcaaagaatctttgagcggtcaagggaaagacaagccgactcttcagatccctgtggacacactgcctgctcttccatatcatggccctccacccccgcagagtccggctaaagccctggctggtggcccaggtggatagtggcctctaccctgggctcatctggctacacagggactctaaacgcttccagattccctggaaacatgccacccggcatagccctcaacaagaagaggaaaataccatttttaaggcctgggctgtagagacagggaagtaccaggaaggggtggatgaccctgacccagctaaatggaaggcccagctgcgctgtgctctcaataagagcagagaattcaacctgatgtatgatggcaccaaggaggtgcccatgaacccagtgaagatatatcaagtgtgtgacatccctcagccccagggctcgatcattaacccaggatccacagggtctgctccctgggatgagaaggataatgatgtggatgaagaagatgaggaagatgagctggatcagtcgcagcaccatgttcccatccaggacaccttccccttcctgaacatcaatggttctcccatggcgccagccagtgtgggcaattgcagtgtgggcaactgcagcccggaggcagtgtggcccaaaactgaacccctggagatggaagtaccccaggcacctatacagcccttctatagctctccagaactgtggatcagctctctcccaatgactgacctggacatcaagtttcagtaccgtgggaaggagtacgggcagaccatgaccgtgagcaaccctcagggctgccgactcttctatggggacctgggtcccatgcctgaccaggaggagctctttggtcccgtcagcctggagcaggtcaaattcccaggtcctgagcatattaccaatgagaagcagaagctgttcactagcaagctgctggacgtcatggacagaggactgatcctggaggtcagcggtcatgccatttatgccatcaggctgtgccagtgcaaggtgtactggtctgggccatgtgccccatcacttgttgctcccaacctgattgagagacaaaagaaggtcaagctattttgtctggaaacattccttagcgatctcattgcccaccagaaaggacagatagagaagcagccaccgtttgagatctacttatgctttggggaagaatggccagatgggaaaccattggaaaggaaactcatcttggttcaggtcattccagtagtggctcggatgatctacgagatgttttctggtgatttcacacgatcctttgatagtggcagtgtccgcctgcagatctcaaccccagacatcaaggataacatcgttgctcagctgaagcagctgtaccgcatccttcaaacccaggagagctggcagcccatgcagcccacccccagcatgcaactgccccctgccctgcctccccagtaattgtgaatgccatcttcttccttctcttttttataatattgtacatatggatttttttattgtttagatttaaccagcttttaaatctctcttttctctaacagtgttagaagtttgtgattctccaaatatgcctagatttaaagctgatttaatttatggaaaaatcacccttcagactttgcttttctttttcaaatctcctaatggtagtatgatatagcatagtagaaggagatttggcctgggagtttggacaccaaagttctagctgcagctttgcttccaatgtgaccttgaacaagtcctttaacctctgggcttcagatttattgcttataaagtgaagagattggagtagtgcctgaaattgcatccagctttagaacggactcaatgaccttcttctacttgtacaaggctaaactgcctggaacagaatccttctgcattgttcttgtaccacatttttccttggttttgttaaagtttcctcaagcactgatttgtccaggatcgagctctgtttgacctgttctgctagtatagtaagctggctccctgatgggggaagtgagagggagaggagctggctggctggttgcttagaaactatgcttgatatctaaatagaaatgggtgccaaagtctgaaagtcacccagcctgtggagtgaaagctcacaaatttggcttctaaagggaagctgttgacacagaaagcctagggattctgtggaagaataggttgtcaggcatttaccttattaccactcaaataccagtgtgtgtgtgttgggggggcggcagggagagggggtaggtgacagtatgtgactcaggtgttagctttaagaggaaagagctctatttttcttgttttcttctctgagctagactgagctggggatctaagatgtacttctctgactacaaaagggacagtatcatttagattttttgcagttggaagaaatgggttgttgagtgtgttaaggctgggatgaagaagggctgggcagtactcttctggaaaggctcacctagcacgaacctgcttgtctcccttactagtggaggtatctgagtgtgaacagtgaaggtaaagagtggtatagaacaatgcagctgtatctgtcacaaactggtcttatctagaaacatctgctgagtctctaaccctttcagctttctcttcttttttgagacagagtcttgctttgttgcccaggctggagtgcagtggcaagtcaccacttactgcagctttaagctcctgggctcaagcaatcgtcctgccccagcctcctgagtagttgggacaacagtcgtgcactatgatgcttggctaattttttttttatttttgtagagatgaggtcttgctatgttgcccaggctggtcttgaactcctgggctcaagcaatctgggacctaaatggcaaataagatgctaatctgtggttgcaagccccagtcctcttgaatagtgatgcctatctgtctgtgtcgggacatagtaaggaagcccatgtctagtctggtacctttaaaccaggccatctccaacttttcaaaatgactcaaaagttgagctagccttattttaaaaactaaaagttcaaaatcagtggtgacatgaggacttatttatttaaagtgcttaagccttggttttagagtttctaagagacctagtggaatttgctattatgaaaagcatgaaaagattaagaaacctggctaaaggtcaggtgcccagcttcgaggaaaagttgggcttttagggaccgggaagcattaaaggcacagaaactttacattttgggggtcattttgttgagtaggtgaagtgagggatttgggcttgatatttggctgccccatctctacgtgggaactcaaagttaaaaacccactgtaggtaaattagaagggcagctcttgaatctgggccagtctatatcccttctgtgaagtgctaacagccaggctatctgtagcctgggtgggagcccagataatgtgagctggtaaagggtattggaaaagtgccaagaaatgccaagcttttggttcgtaaccactataaaaagtttatgaacatgtcagaggaatggatgagtgatttgtgaggtcttaactagataccccggtttcttccttgttttggcttcttttcagaatgccgggagagtacatgcagggattccatctaatcaccctcagcactctttctctggtcctgctggatagatttagatttcctttctttttttagggcctcagtctgctatctcctttggtggctaccaccactcactcccttgatatcttctactcccttgccttcaccttgcttaagactgagaagggagttagattttgtcactagctcttctttttcctcactgtgtaccccaccaaacaagattagttcaagttaaaaagaacctactggaggtaaactgggagagcaagtgttggatctgggctggtccctttcccataaaattaggtccctggttgtatgttcccatagcaccccatacttcctctctcagaataatcatttcccttgtaatgctcagcatccgcatcctgcttgactgcaaacttgctgaaggtagggactgtttgtcttggacttcgctgccagtccttagaacagtgtctgggacacagtgtgttctcaaatatttgttgctggaataaatgaatgaactaaa

SEQ ID NO: 162319 - DNA, 1027 bp, Artificial Sequence
  derived and/or modified sequence
ctttaccagactcagtagtggagacgtgttctcagcctttgtcgccagtgttcccaagccttctcccagacactggattgttgtatggatagccagctgagacccctccttttctccatacagaatctttgagcggtcaagggaaagacaagccgactcttcagatccctgtggacacactgcctgctcttccatatcatggccctccacccccgcagagtccggctaaagccctggctggtggcccaggtggatagtggcctctaccctgggctcatctggctacacagggactctaaacgcttccagattccctggaaacatgccacccggcatagccctcaacaagaagaggaaaataccatttttaaggcctgggctgtagagacagggaagtaccaggaaggggtggatgaccctgacccagctaaatggaaggcccagctgcgctgtgctctcaataagagcagagaattcaacctgatgtatgatggcaccaaggaggtgcccatgaacccagtgaagatatatcaagtgtgtgacatccctcagccccagggctcgatcattaacccaggatccacagggtctgctccctgggatgagaaggataatgatgtggatgaagaagatgaggaagatgagctggatcagtcgcagcaccatgttcccatccaggacaccttccccttcctgaacatcaatggttctcccatggcgccagccagtgtgggcaattgcagtgtgggcaactgcagcccggaggcagtgtggcccaaaactgaacccctggagatggaagtaccccaggcacctatacagcccttctatagctctccagaactgtggatcagctctctcccaatgactgacctggacatcaagtttcagtaccgtgggaaggagtacgggcagaccatgaccgtgagcaaccctcagggctgccgactcttctatggggacctgggtcccatgcctgaccaggaggagctctttggtcccgtcagcctggagcaggtcaaattcc

SEQ ID NO: 162320 - DNA, 1472 bp, Artificial Sequence
  derived and/or modified sequence
tgggctgggcaggtaagggctggtgcgggacggggagaggaacctgcagtccctacttgggtagagccaggcgccccttggctaagacgtcgaggagcgtggtagcgacgggtgatcttcgctgcggacttggttcggagggacgtccgcttctggtggacagattgagcaaaggcctgggctgtagagacagggaagtaccaggaaggggtggatgaccctgacccagctaaatggaaggcccagctgcgctgtgctctcaataagagcagagaattcaacctgatgtatgatggcaccaaggaggtgcccatgaacccagtgaagatatatcaagtgtgtgacatccctcagccccagggctcgatcattaacccaggatccacagggtctgctccctgggatgagaaggataatgatgtggatgaagaagatgaggaagatgagctggatcagtcgcagcaccatgttcccatccaggacaccttccccttcctgaacatcaatggttctcccatggcgccagccagtgtgggcaattgcagtgtgggcaactgcagcccggaggcagtgtggcccaaaactgaacccctggagatggaagtaccccaggcacctatacagcccttctatagctctccagaactgtggatcagctctctcccaatgactgacctggacatcaagtttcagtaccgtgggaaggagtacgggcagaccatgaccgtgagcaaccctcagggctgccgactcttctatggggacctgggtcccatgcctgaccaggaggagctctttggtcccgtcagcctggagcaggtcaaattcccaggtcctgagcatattaccaatgagaagcagaagctgttcactagcaagctgctggacgtcatggacagaggactgatcctggaggtcagcggtcatgccatttatgccatcaggctgtgccagtgcaaggtgtactggtctgggccatgtgccccatcacttgttgctcccaacctgattgagagacaaaagaaggtcaagctattttgtctggaaacattccttagcgatctcattgcccaccagaaaggacagatagagaagcagccaccgtttgagatctacttatgctttggggaagaatggccagatgggaaaccattggaaaggaaactcatcttggttcaggtcattccagtagtggctcggatgatctacgagatgttttctggtgatttcacacgatcctttgatagtggcagtgtccgcctgcagatctcaaccccagacatcaaggataacatcgttgctcagctgaagcagctgtaccgcatccttcaaacccaggagagctggcagcccatgcagcccacccccagcatgcaactgccccctgccctgcctccccagtaattgtgaatgccatcttcttccttctcttttttataatattgtacatatggatttttttattgtttaga

SEQ ID NO: 162321 - DNA, 1404 bp, Artificial Sequence
  derived and/or modified sequence
atggccctgcacccccggcgggtgcggctgaagccctggctggtggcccaggtggacagcggcctgtacccaggcctcatctggctgcaccgggacagcaagcgcttccagatcccctggaagcacgccaccaggcacagcccccagcaggaggaggagaacaccatcttcaaggcctgggccgtggagaccgggaagtaccaggagggcgtggatgatcctgaccctgccaagtggaaggcccagctgcgctgtgccctgaacaagagccgggagttcaacctgatgtatgatggcaccaaggaggtgcccatgaaccctgtgaagatctaccaggtgtgtgacatcccccagccccagggcagcatcatcaaccctggcagcactggaagtgccccctgggatgagaaggacaatgatgtggatgaggaggatgaagaagatgagctggaccagagccagcaccacgtgcccatccaggacaccttccccttcctgaacatcaatggcagccccatggccccagcctctgtgggcaactgcagcgtgggcaactgcagccctgaggccgtgtggcccaagacagagcccctggagatggaggtgccccaggcccccatccagcccttctacagcagccctgagctgtggatcagcagcctgcccatgacagacctggacatcaagttccagtaccggggcaaggagtatggccagaccatgacagtgagcaacccccagggctgccgcctcttctatggagacctgggccccatgccagaccaggaggagctgtttggacctgtgtccctggagcaggtgaagtttcctggccctgagcacatcaccaatgagaagcagaagctgttcaccagcaagctgctggatgtgatggaccggggcctcatcctggaggtgtctggccacgccatctatgccatccggctgtgccagtgcaaggtgtactggagcggcccctgtgcccccagcctggtggcccccaacctgattgagcggcagaagaaggtgaagctgttctgcctggagaccttcctgagtgacctgattgcccaccagaagggccagatcgagaagcagcccccatttgagatctacctgtgctttggagaggagtggccagatggcaagcccctggagaggaagctgatcctggtgcaggtgattcctgtggtggccaggatgatctatgagatgttttctggggacttcaccaggagctttgacagcggctctgtgcggctgcagatcagcaccccagacatcaaggacaacatcgtggcccagctgaagcagctgtaccgcatcctgcagacccaggagagctggcagcccatgcagcccacccccagcatgcagctgcccccagccctgcccccccagtag

SEQ ID NO: 162322 - DNA, 831 bp, Artificial Sequence
  derived and/or modified sequence
atggccctgcacccccggcgggtgcggctgaagccctggctggtggcccaggtggacagcggcctgtacccaggcctcatctggctgcaccgggacagcaagcgcttccagatcccctggaagcacgccaccaggcacagcccccagcaggaggaggagaacaccatcttcaaggcctgggccgtggagaccgggaagtaccaggagggcgtggatgatcctgaccctgccaagtggaaggcccagctgcgctgtgccctgaacaagagccgggagttcaacctgatgtatgatggcaccaaggaggtgcccatgaaccctgtgaagatctaccaggtgtgtgacatcccccagccccagggcagcatcatcaaccctggcagcactggaagtgccccctgggatgagaaggacaatgatgtggatgaggaggatgaagaagatgagctggaccagagccagcaccacgtgcccatccaggacaccttccccttcctgaacatcaatggcagccccatggccccagcctctgtgggcaactgcagcgtgggcaactgcagccctgaggccgtgtggcccaagacagagcccctggagatggaggtgccccaggcccccatccagcccttctacagcagccctgagctgtggatcagcagcctgcccatgacagacctggacatcaagttccagtaccggggcaaggagtatggccagaccatgacagtgagcaacccccagggctgccgcctcttctatggagacctgggccccatgccagaccaggaggagctgtttggacctgtgtccctggagcaggtgaagttctag

SEQ ID NO: 162323 - DNA, 1404 bp, Artificial Sequence
  derived and/or modified sequence
atggccctgcacccccggcgggtgcggctgaagccctggctggtggctcaggtggacagcggactgtatcctggattgatttggttgcatagagatagcaaaagattccagatcccgtggaagcacgccacccgtcattcccctcagcaggaggaggaaaacacaatttttaaggcatgggccgtcgaaactgggaaataccaggaaggggtagacgaccccgatccggccaagtggaaggcacaactgagatgcgctctgaataagtcacgcgagtttaatttgatgtatgacggaacaaaggaggtgccaatgaacccagtaaaaatctatcaggtgtgtgacataccgcagccacaaggttccatcatcaaccctggttccaccgggtccgctccctgggacgaaaaggataacgatgtggacgaagaggacgaggaagacgagctggaccagtcccagcaccatgttccaatccaggataccttccccttcttgaacatcaacggatcaccgatggctcctgcctctgtggggaattgtagcgtggggaattgctcgcccgaggcagtttggcctaagaccgagcccttagagatggaagtgccccaggcaccaatccagcctttttacagctcccccgagttatggatctcctctcttcccatgacagatcttgacataaagttccaatacaggggaaaggaatatggccagaccatgacagtgtctaatccccaaggctgccggcttttttatggtgatctaggcccgatgcccgatcaagaggagctgttcggacccgtgagtctcgaacaggttaagttccctgggccagagcatattaccaacgagaagcagaaactctttacaagtaaactgctcgatgttatggatagaggactgatcctggaagtgtctggacacgctatctacgctattaggctgtgtcagtgcaaggtgtactggtccggcccgtgtgcgccatcactagtggcccctaaccttatcgagcggcaaaagaaagtgaaactcttctgcttagaaacattcctctccgacttaattgctcatcaaaagggccaaatcgagaagcagccaccgttcgaaatttatctttgtttcggagaggagtggcccgacggcaagcccctcgaacgcaaattaatccttgtgcaggtaattccagtcgtcgctagaatgatatatgagatgtttagcggcgactttacccgcagctttgattctggatccgtgaggttgcagatctccacaccagacatcaaggataatatcgtggctcaactcaaacaattataccgtatcctccagacgcaggaaagctggcagccaatgcagcccacacctagtatgcagctgcccccagctctaccaccccagtag

SEQ ID NO: 162324 - DNA, 831 bp, Artificial Sequence
  derived and/or modified sequence
atggccctgcacccccggcgggtgcggctgaagccctggctggtggcccaggtggattcagggctttaccctgggctaatctggctgcatcgggatagcaagaggttccagattccctggaaacacgctacccgccatagtccacaacaggaggaagagaacacaattttcaaagcgtgggctgtcgaaaccggtaaataccaggagggcgtggatgaccccgatcctgctaaatggaaagctcagctccggtgtgccctcaataaatcaagagaattcaacctcatgtatgatggaacaaaagaggtccccatgaaccccgtaaagatctaccaggtttgcgatatcccgcagcctcaggggagcattatcaaccccggctccacaggatcggcaccttgggacgagaaagataacgatgttgacgaggaggatgaggaagatgagctcgatcagagccagcaccacgtgccaattcaggacacgttcccttttctaaatatcaacgggtctcctatggcccctgctagcgttggcaattgtagtgtagggaactgctcaccggaggctgtatggcccaagaccgagcctctagaaatggaggtaccacaagcgcccattcagcccttctattcctcaccagaactctggatttccagcctgcctatgactgatctcgacatcaaattccagtaccgcggaaaagagtacggccagactatgacagtgtccaaccctcagggctgtcgactgttctatggagatctcggtcccatgccagaccaggaagagcttttcggtccagtgtcactggaacaggtcaaattctag

SEQ ID NO: 162325 - DNA, 1404 bp, Artificial Sequence
  derived and/or modified sequence
atggcattgcatcctcggagggtccggctcaagccctggttagtggctcaggtcgattctggactgtacccagggttaatttggctccacagggatagtaagcgcttccagataccttggaaacatgccacccggcattcaccccagcaggaagaggaaaacactatatttaaagcatgggctgtggaaacaggcaaataccaagaaggggtggacgatccagaccccgcaaaatggaaggctcagcttcggtgcgccctgaataaatcgcgcgaatttaacctcatgtacgatggcacaaaggaagtgccaatgaaccccgtcaagatatatcaggtgtgtgatatcccgcagccgcaggggtcgataatcaatcctggatccacaggcagtgctccctgggatgaaaaagataatgacgtagatgaggaggatgaggaggatgagcttgatcagtcccagcaccacgtgccaatacaggatacattcccctttctgaacatcaacggctctcctatggcaccagctagcgtcggaaattgtagtgtaggcaactgctctcccgaagcggtttggccaaagacagagcccctcgaaatggaagtccctcaggcccctattcagcctttttacagtagcccagagctgtggatatcatctctgcccatgacagacctggacatcaagtttcagtataggggaaaagagtatgggcagaccatgactgtgtctaatccccagggctgccgtctgttttacggagacttggggcctatgcccgatcaggaagagctttttggaccagtgtccctcgagcaggtgaagttccctgggccagagcacattaccaacgagaagcagaagctctttaccagcaagctcctcgacgttatggatcggggtttgattctcgaagtatcgggacacgccatttacgctatcagactctgccaatgtaaagtgtattggagtggtccgtgcgcaccaagcctggtggcccctaatctgatcgaacggcagaaaaaagtgaaacttttttgtttggaaacattcctctctgatctgatcgcacatcagaagggtcaaatcgaaaaacaaccaccctttgagatctatctttgcttcggggaggaatggcccgacggaaagccacttgaaagaaagttaatcctggtgcaggtcattcccgtggtcgcccgaatgatttatgagatgtttagcggggatttcaccagatctttcgatagtgggagcgttcgcctgcaaatcagtacgcctgacatcaaggataacattgtggcacagctgaaacagctctatcgcattctccagacccaagagagttggcagcctatgcagcccacccccagcatgcaactgcccccagcattgcctccacagtag

SEQ ID NO: 162326 - DNA, 831 bp, Artificial Sequence
  derived and/or modified sequence
atggccttacatcctaggcgggtccggttgaagccatggctggtcgcccaggtggactcgggcctctacccagggctgatttggctgcatagggattcaaaacgatttcaaatcccatggaagcacgcgaccaggcactctcctcagcaggaggaagaaaacacaattttcaaggcctgggcagtggaaaccggcaaataccaggagggggtggatgaccccgaccccgctaaatggaaggcacagttacgttgcgctctaaataaatctcgggagtttaatctgatgtacgatggcacgaaggaggtaccgatgaaccccgtgaaaatataccaagtgtgtgatattccgcagccgcaagggtctatcatcaacccgggtagcaccggctctgcaccttgggatgagaaggataacgacgtagacgaagaggatgaggaggatgaactggaccaatcgcaacaccacgtcccaattcaggacaccttcccattcctcaatatcaatggcagcccaatggcccctgcctccgtgggtaattgttctgtggggaactgtagccctgaggccgtctggcccaagaccgaacccctggagatggaggtgccccaagcccctattcaacctttctactcaagcccagagctctggatttcctcactgcccatgacagatcttgacataaagtttcagtacagggggaaggaatacggccaaaccatgactgtgtctaatccccaggggtgtcgtttgttttacggcgacttggggccaatgccagaccaagaggagctgttcggacccgtttcccttgaacaagtgaaattttag

SEQ ID NO: 162327 - DNA, 1404 bp, Artificial Sequence
  derived and/or modified sequence
atggccctgcaccccagaagagtgagactgaagccctggctggtggcccaggtggacagcggcctgtaccccggcctgatctggctgcacagagacagcaagagattccagatcccctggaagcacgccaccagacacagcccccagcaggaggaggagaacaccatcttcaaggcctgggccgtggagaccggcaagtaccaggagggcgtggacgaccccgaccccgccaagtggaaggcccagctgagatgcgccctgaacaagagcagagagttcaacctgatgtacgacggcaccaaggaggtgcccatgaaccccgtgaagatctaccaggtgtgcgacatcccccagccccagggcagcatcatcaaccccggcagcaccggcagcgccccctgggacgagaaggacaacgacgtggacgaggaggacgaggaggacgagctggaccagagccagcaccacgtgcccatccaggacaccttccccttcctgaacatcaacggcagccccatggcccccgccagcgtgggcaactgcagcgtgggcaactgcagccccgaggccgtgtggcccaagaccgagcccctggagatggaggtgccccaggcccccatccagcccttctacagcagccccgagctgtggatcagcagcctgcccatgaccgacctggacatcaagttccagtacagaggcaaggagtacggccagaccatgaccgtgagcaacccccagggctgcagactgttctacggcgacctgggccccatgcccgaccaggaggagctgttcggccccgtgagcctggagcaggtgaagttccccggccccgagcacatcaccaacgagaagcagaagctgttcaccagcaagctgctggacgtgatggacagaggcctgatcctggaggtgagcggccacgccatctacgccatcagactgtgccagtgcaaggtgtactggagcggcccctgcgcccccagcctggtggcccccaacctgatcgagagacagaagaaggtgaagctgttctgcctggagaccttcctgagcgacctgatcgcccaccagaagggccagatcgagaagcagccccccttcgagatctacctgtgcttcggcgaggagtggcccgacggcaagcccctggagagaaagctgatcctggtgcaggtgatccccgtggtggccagaatgatctacgagatgttcagcggcgacttcaccagaagcttcgacagcggcagcgtgagactgcagatcagcacccccgacatcaaggacaacatcgtggcccagctgaagcagctgtacagaatcctgcagacccaggagagctggcagcccatgcagcccacccccagcatgcagctgccccccgccctgcccccccagtag

SEQ ID NO: 162328 - DNA, 831 bp, Artificial Sequence
  derived and/or modified sequence
atggccctgcaccccagaagagtgagactgaagccctggctggtggcccaggtggacagcggcctgtaccccggcctgatctggctgcacagagacagcaagagattccagatcccctggaagcacgccaccagacacagcccccagcaggaggaggagaacaccatcttcaaggcctgggccgtggagaccggcaagtaccaggagggcgtggacgaccccgaccccgccaagtggaaggcccagctgagatgcgccctgaacaagagcagagagttcaacctgatgtacgacggcaccaaggaggtgcccatgaaccccgtgaagatctaccaggtgtgcgacatcccccagccccagggcagcatcatcaaccccggcagcaccggcagcgccccctgggacgagaaggacaacgacgtggacgaggaggacgaggaggacgagctggaccagagccagcaccacgtgcccatccaggacaccttccccttcctgaacatcaacggcagccccatggcccccgccagcgtgggcaactgcagcgtgggcaactgcagccccgaggccgtgtggcccaagaccgagcccctggagatggaggtgccccaggcccccatccagcccttctacagcagccccgagctgtggatcagcagcctgcccatgaccgacctggacatcaagttccagtacagaggcaaggagtacggccagaccatgaccgtgagcaacccccagggctgcagactgttctacggcgacctgggccccatgcccgaccaggaggagctgttcggccccgtgagcctggagcaggtgaagttctag

SEQ ID NO: 162329 - protein, 261 aa, Artificial Sequence
  derived and/or modified sequence
MNPNCARCGKIVYPTEKVNCLDKFWHKACFHCETCKMTLNMKNYKGYEKKPYCNAHYPKQSFTMVADTPENLRLKQQSELQSQVRYKEEFEKNKGKGFSVVADTPELQRIKKTQDQISNIKYHEEFEKSRMGPSGGEGMEPERRDSQDGSSYRRPLEQQQPHHIPTSAPVYQQPQQQPVAQSYGGYKEPAAPVSIQRSAPGGGGKRYRAVYDYSAADEDEVSFQDGDTIVNVQQIDDGWMYGTVERTGDTGMLPANYVEAI

SEQ ID NO: 162330 - protein, 166 aa, Artificial Sequence
  derived and/or modified sequence
MTLNMKNYKGYEKKPYCNAHYPKQSFTMVADTPENLRLKQQSELQSQVRYKEEFEKNKGKGFSVVADTPELQRIKKTQDQISNIKYHEEFEKSRMGPSGGEGMEPERRDSQDGSSYRRPLEQQQPHHIPTSAPVYQQPQQQPVAQSYGGYKEPAAPVSIQRSAPGG

SEQ ID NO: 162331 - protein, 125 aa, Artificial Sequence
  derived and/or modified sequence
MNPNCARCGKIVYPTEKVNCLDKFWHKACFHCETCKMTLNMKNYKGYEKKPYCNAHYPKQSFTMVADTPENLRLKQQSELQSQVRYKEEFEKNKGKGFSVVADTPELQRSSLGFLWNEIPPSPHL

SEQ ID NO: 162332 - DNA, 786 bp, Artificial Sequence
  derived and/or modified sequence
atgaatcccaattgtgctcgctgcggtaaaatcgtctatccaactgaaaaggttaactgcttagacaagttctggcacaaagcctgctttcattgtgagacgtgtaaaatgactctgaatatgaaaaattacaaggggtacgagaagaaaccctactgtaatgcccattaccccaaacagagctttactatggtggctgacactcctgagaatctccggctcaagcagcaatcagagctgcagagtcaggtcaggtataaagaggaattcgagaaaaacaaaggaaaaggctttagtgtcgtagcagatacgcccgagctgcagagaatcaagaagacacaggaccagatcagtaacatcaagtatcacgaagaattcgaaaagtccaggatgggaccttctgggggagagggcatggagcctgagaggcgggacagccaggatgggagctcatacagaaggccactggagcaacaacaaccgcatcatataccaaccagcgccccagtttaccagcagccacagcagcaaccagttgcccaaagctacggcggatacaaagaacctgccgcccccgtgagtattcagcggtccgcaccaggcggcgggggaaaaagatatagagccgtgtacgattattctgcagcagatgaggacgaggtgagttttcaggacggggacactattgtgaatgtgcagcagatcgacgacggttggatgtacggaaccgtggaacgcaccggcgacactggtatgctgcctgcgaattatgtggaggcaatctag

SEQ ID NO: 162333 - DNA, 501 bp, Artificial Sequence
  derived and/or modified sequence
atgaccctgaatatgaagaattacaagggctatgaaaaaaagccctactgcaacgctcattatcccaaacaatccttcactatggtagctgatacgccagaaaatctcagattgaagcagcagtcagagctccaatctcaggtccgctataaagaagaattcgagaagaacaaagggaagggtttttctgttgtggccgatactcccgaattgcagagaatcaagaaaacccaagaccagatcagcaacatcaaatatcacgaagaatttgagaaatcaaggatgggccctagtggaggcgaggggatggagcccgaaagaagagactcacaagacgggtcttcctaccgccgaccactcgagcaacagcagccacaccacattccaaccagcgctcccgtgtaccagcagcctcagcagcagcccgtagcccagtcatacggaggatacaaggaacctgcagcccctgtgagcatacagcggagcgcgcctggcggctag

SEQ ID NO: 162334 - DNA, 786 bp, Artificial Sequence
  derived and/or modified sequence
atgaacccaaattgtgcacggtgtggcaagatcgtgtaccccacagagaaggtgaattgtttggacaaattctggcacaaggcatgcttccactgcgaaacctgcaagatgacactcaatatgaagaattacaagggatatgaaaagaaaccctactgcaatgcccattatcccaagcagagctttaccatggtcgccgacacccccgagaatcttagactcaaacagcaaagtgagttacagtcacaggtgcgatacaaggaggagtttgagaaaaacaaggggaaaggtttctccgtagtggcagatacacctgaactacaacgcattaagaagacccaggatcagatatcaaacatcaaataccacgaagaattcgagaagtctagaatggggcccagtggtggcgaggggatggagccagaaaggcgcgatagccaagatggcagctcctaccggagaccactggaacaacagcagcctcaccatatcccaactagcgcgcctgtttatcaacagccacagcaacagcccgtagctcagtcctatggagggtacaaagaacccgcagcacctgttagtattcagcgctcggccccggggggagggggtaagaggtatcgcgcagtgtatgactattccgccgcggacgaggatgaagtatctttccaggatggcgatacgattgtgaacgtccaacagattgatgatggatggatgtatgggaccgtcgagcgcacaggcgatacgggtatgttacccgccaactatgttgaagccatctag

SEQ ID NO: 162335 - DNA, 378 bp, Artificial Sequence
  derived and/or modified sequence
atgaaccccaactgcgcacgttgcgggaagattgtctatccgaccgaaaaagtgaattgtctggacaaattttggcataaagcttgtttccattgcgagacttgcaaaatgacactgaatatgaagaattacaagggttacgagaagaaaccatattgtaatgcacactatccaaagcagtcattcactatggtggctgatactccggaaaaccttcggcttaaacagcagagtgaattgcagagccaggtccgatacaaggaagaatttgagaaaaacaaagggaaaggcttctctgtggtggcagatactcccgagctccagcggtcatcactcggattcctctggaatgaaattcccccttcaccacatctatag

SEQ ID NO: 162336 - DNA, 786 bp, Artificial Sequence
  derived and/or modified sequence
atgaaccccaactgtgcccgctgtgggaagatcgtgtaccccacagagaaggtgaactgcctggacaagttctggcacaaggcctgcttccactgtgagacctgcaagatgaccctgaacatgaagaactacaagggctatgagaagaagccctactgcaatgcccactaccccaagcagagcttcaccatggtggccgacaccccagagaacctgcggctgaagcagcagagcgagctgcagagccaggtgcgctacaaggaggagtttgagaagaacaagggcaagggcttctctgtggtggccgacaccccagagctgcagaggatcaagaagacccaggaccagatcagcaacatcaagtaccacgaggagtttgagaagagcaggatgggccccagcggcggggagggcatggagcctgagcggcgggacagccaggacggcagcagctacagaagacccctggagcagcagcagccccaccacatccccaccagcgcccctgtgtaccagcagccccagcagcagcctgtggcccagagctatggaggctacaaggagcctgctgcccctgtgtccatccagaggtctgcccctgggggcggcggcaagcgctacagagctgtgtatgactacagcgctgctgatgaagatgaggtgtccttccaggatggagacaccatcgtgaatgtgcagcagattgatgatggctggatgtatggaacagtggagaggactggagacaccggcatgctgcctgccaactacgtggaggccatctag

SEQ ID NO: 162337 - DNA, 501 bp, Artificial Sequence
  derived and/or modified sequence
atgaccctgaacatgaagaactacaagggctatgagaagaagccctactgcaatgcccactaccccaagcagagcttcaccatggtggccgacaccccagagaacctgcggctgaagcagcagagcgagctgcagagccaggtgcgctacaaggaggagtttgagaagaacaagggcaagggcttctctgtggtggccgacaccccagagctgcagaggatcaagaagacccaggaccagatcagcaacatcaagtaccacgaggagtttgagaagagcaggatgggccccagcggcggggagggcatggagcctgagcggcgggacagccaggacggcagcagctacagaagacccctggagcagcagcagccccaccacatccccaccagcgcccctgtgtaccagcagccccagcagcagcctgtggcccagagctatggaggctacaaggagcctgctgcccctgtgtccatccagaggtctgcccctgggggctag

SEQ ID NO: 162338 - DNA, 378 bp, Artificial Sequence
  derived and/or modified sequence
atgaaccccaactgtgcccgctgtgggaagatcgtgtaccccacagagaaggtgaactgcctggacaagttctggcacaaggcctgcttccactgtgagacctgcaagatgaccctgaacatgaagaactacaagggctatgagaagaagccctactgcaatgcccactaccccaagcagagcttcaccatggtggccgacaccccagagaacctgcggctgaagcagcagagcgagctgcagagccaggtgcgctacaaggaggagtttgagaagaacaagggcaagggcttctctgtggtggccgacaccccagagctgcagaggagcagcctgggcttcctgtggaatgagatcccccccagcccccacctgtag

SEQ ID NO: 162339 - DNA, 3965 bp, Artificial Sequence
  derived and/or modified sequence
agtgcagcccctcctccccgctgtgtttattaggggaaggagggcggaggcggaggccagttccccagctccagccgccgtcgctgctgcctgtgtagttgcagccgcggccgcctcccgccagctcgcctcggggaacaggacgcgcgtgagctcaggcgtccccgccccagcttttctcggaaccatgaaccccaactgcgcccggtgcggcaagatcgtgtatcccacggagaaggtgaactgtctggataagttctggcataaagcatgcttccattgcgagacctgcaagatgacactgaacatgaagaactacaagggctacgagaagaagccctactgcaacgcacactaccccaagcagtccttcaccatggtggcggacaccccggaaaaccttcgcctcaagcaacagagtgagctccagagtcaggtgcgctacaaggaggagtttgagaagaacaagggcaaaggtttcagcgtagtggcagacacgcccgagctccagagaatcaagaagacccaggaccagatcagtaacataaaataccatgaggagtttgagaagagccgcatgggccctagcgggggcgagggcatggagccagagcgtcgggattcacaggacggcagcagctaccggcggcccctggagcagcagcagcctcaccacatcccgaccagtgccccggtttaccagcagccccagcagcagccggtggcccagtcctatggtggctacaaggagcctgcagccccagtctccatacagcgcagcgccccaggtggtggcgggaagcggtaccgcgcggtgtatgactacagcgccgccgacgaggacgaggtctccttccaggacggggacaccatcgtcaacgtgcagcagatcgacgacggctggatgtacgggacggtggagcgcaccggcgacacggggatgctgccggccaactacgtggaggccatctgaacccgcagcgcccccatctgtcttcagcacattccacggcatcgcatccgtcctgggcgtgacccgtccattcttcagtgtctctgttttttaaaacctgcgacagcttgtgattcctacccctcttccagcttcttttgccaactgaagccttcttctgccacttctgcgggctccctcctctggcaggcttcccccttgatcgacttcttggttttctctctggatggaacgggcatgggcctctctgggggaggcagggctggaatgggagacctgttggcctgtgggcctcacctgcccctctgttctctcccctcacatcctcctgcccagctcctcacatacccacacattccagggctggggtgagcctgactgccaggaccccaggtcaggggctccctacattccccagagtgggatccacttcttggttcctgggatggcgatggggactctgccgctgtgtagggaccagtgggatgggctctacctctctttctcaaagagggggctctgcccacctggggtctctctccctacctccctcctcaggggcaacaacaggagaatggggttcctgctgtggggcgaattcatcccctccccgcgcgttccttcgcacactgtgattttgccctcctgcccacgcagacctgcagcgggcaaagagctcccgaggaagcacagcttgggtcaggttcttgcctttcttaattttagggacagctaccggaaggaggggaacaaggagttctcttccgcagcccctttccccacgcccacccccagtctccagggacccttgcctgcctcctaggctggaagccatggtcccgaagtgtagggcaagggtgcctcaggaccttttggtcttcagcctccctcagcccccaggatctgggttaggtggccgctcctccctgctcctcatgggaagatgtctcagagccttccatgacctcccctccccagcccaatgccaagtggacttggagctgcacaaagtcagcagggaccactaaatctccaagacctggtgtgcggaggcaggagcatgtatgtctgcaggtgtctgacacgcaagtgtgtgagtgtgagtgtgagagatggggcgggggtgtgtctgtaggtgtctctgggcctgtgtgtgggtggggttatgtgagggtatgaagagctgtcttcccctgagagtttcctcagaacccacagtgagaggggagggctcctggggcagagaagttccttaggttttctttggaatgaaattcctccttccccccatctctgagtggaggaagcccaccaatctgccctttgcagtgtgcagggtggaaggtaagaggttggtgtggagttggggctgccatagggtctgcagcctgctggggctaagcggtggaggaaggctctgtcactccaggcatatgtttccccatctctgtctggggctacagaatagggtggcagaagtgtcaccctgtgggtgtctccctcgggggctcttcccctagacctccccctcacttacataaagctcccttgaagcaagaaagagggtcccagggctgcaaaactggaagcacagcctcggggatggggagggaaagacggtgctatatccagttcctgctctctgctcatgggtggctgtgacaaccctggcctcacttgattcatctctggttttcttgccaccctctgggagtccccatcccattttcatcctgagcccaaccaggccctgccattggcctcttgtcccttggcacacttgtacccacaggtgaggggcaggacctgaaggtattggcctgttcaacaatcagtcatcatgggtgtttttgtcaactgcttgttaattgatttggggatgtttgccccgaatgagaggttgaggaaaagactgtgggtggggaggccctgcctgacccatcccttttcctttctggccccagcctaggtggaggcaagtggaatatcttatattgggcgatttgggggctcggggaggcagagaatctcttgggagtcttgggtggcgctggtgcattctgtttcctcttgatctcaaagcacaatgtggatttggggaccaaaggtcagggacacatccccttagaggacctgagtttgggagagtggtgagtggaagggaggagcagcaagaagcagcctgttttcactcagcttaattctccttcccagataaggcaagccagtcatggaatcttgctgcaggccctccctctactcttcctgtcctaaaaataggggccgttttcttacacacccccagagagaggagggactgtcacactggtgctgagtgaccgggggctgctgggcgtctgttctttaccaaaaccatccatccctagaagagcacagagccctgaggggctgggctgggctgggctgagcccctggtcttctctacagttcacagaggtctttcagctcatttaatcccaggaaagaggcatcaaagctagaatgtgaatataacttttgtggaccaatactaagaataacaagaagcccagtggtgaggaaagtgcgttctcccagcactgcctcctgttttctccctctcatgtccctccagggaaaatgactttattgcttaatttctgcctttcccccctcacacatgcacttttgggcctttttttatagctggaaaaaacaaaataccaccctacaaacctgtatttaaaaagaaacagaaatgaccacgtgaaatttgcctctgtccaaacatttcatccgtgtgtatgtgtatgtgtgtgagtgtgtgaagccgccagttcatctttttatatggggttgttgtctcattttggtctgttttggtcccctccctcgtgggcttgtgctcgggatcaaacctttctggcctgttatgattctgaacatttgacttgaaccacaagtgaatctttctcctggtgactcaaataaaagtataatttttacctgcgga

SEQ ID NO: 162340 - DNA, 762 bp, Artificial Sequence
  derived and/or modified sequence
gtgccaggctgcaggcacagtgacacgaagcttgccacatcccccccaacccagagccacagagggacaggctgtcccaagtgaggggtatccttgcaggcttctgcccctaccagcctgtttacctttctttagagtgggttgcaggtaggcaagggaagatcaagatgaccctgccttggagcctcggatccaggctgagaggcctctaacaggcagcagagttctggcataaagcatgcttccattgcgagacctgcaagatgacactgaacatgaagaactacaagggctacgagaagaagccctactgcaacgcacactaccccaagcagtccttcaccatggtggcggacaccccggaaaaccttcgcctcaagcaacagagtgagctccagagtcaggtgcgctacaaggaggagtttgagaagaacaagggcaaaggtttcagcgtagtggcagacacgcccgagctccagagaatcaagaagacccaggaccagatcagtaacataaaataccatgaggagtttgagaagagccgcatgggccctagcgggggcgagggcatggagccagagcgtcgggattcacaggacggcagcagctaccggcggcccctggagcagcagcagcctcaccacatcccgaccagtgccccggtttaccagcagccccagcagcagccggtggcccagtcctatggtggctacaaggagcctgcagccccagtctccatacagcgcagcgccccaggtggtg

SEQ ID NO: 162341 - DNA, 3492 bp, Artificial Sequence
  derived and/or modified sequence
ggacgcgcgtgagctcaggcgtccccgccccagcttttctcggaaccatgaaccccaactgcgcccggtgcggcaagatcgtgtatcccacggagaaggtgaactgtctggataagttctggcataaagcatgcttccattgcgagacctgcaagatgacactgaacatgaagaactacaagggctacgagaagaagccctactgcaacgcacactaccccaagcagtccttcaccatggtggcggacaccccggaaaaccttcgcctcaagcaacagagtgagctccagagtcaggtgcgctacaaggaggagtttgagaagaacaagggcaaaggtttcagcgtagtggcagacacgcccgagctccagagaatcaagaagacccaggaccagatcagtaacataaaataccatgaggagtttgagaagagccgcatgggccctagcgggggcgagggcatggagccagagcgtcgggattcacaggacggcagcagctaccggcggcccctggagcagcagcagcctcaccacatcccgaccagtgccccggtttaccagcagccccagcagcagccggtggcccagtcctatggtggctacaaggagcctgcagccccagtctccatacagcgcagcgccccaggtggtggcgggaagcggtaccgcgcggtgtatgactacagcgccgccgacgaggacgaggtctccttccaggacggggacaccatcgtcaacgtgcagcagatcgacgacggctggatgtacgggacggtggagcgcaccggcgacacggggatgctgccggccaactacgtggaggccatctgaacccgcagcgcccccatctgtcttcagcacattccacggcatcgcatccgtcctgggcgtgacccgtccattcttcagtgtctctgttttttaaaacctgcgacagcttgtgattcctacccctcttccagcttcttttgccaactgaagccttcttctgccacttctgcgggctccctcctctggcaggcttcccccttgatcgacttcttggttttctctctggatggaacgggcatgggcctctctgggggaggcagggctggaatgggagacctgttggcctgtgggcctcacctgcccctctgttctctcccctcacatcctcctgcccagctcctcacatacccacacattccagggctggggtgagcctgactgccaggaccccaggtcaggggctccctacattccccagagtgggatccacttcttggttcctgggatggcgatggggactctgccgctgtgtagggaccagtgggatgggctctacctctctttctcaaagagggggctctgcccacctggggtctctctccctacctccctcctcaggggcaacaacaggagaatggggttcctgctgtggggcgaattcatcccctccccgcgcgttccttcgcacactgtgattttgccctcctgcccacgcagacctgcagcgggcaaagagctcccgaggaagcacagcttgggtcaggttcttgcctttcttaattttagggacagctaccggaaggaggggaacaaggagttctcttccgcagcccctttccccacgcccacccccagtctccagggacccttgcctgcctcctaggctggaagccatggtcccgaagtgtagggcaagggtgcctcaggaccttttggtcttcagcctccctcagcccccaggatctgggttaggtggccgctcctccctgctcctcatgggaagatgtctcagagccttccatgacctcccctccccagcccaatgccaagtggacttggagctgcacaaagtcagcagggaccactaaatctccaagacctggtgtgcggaggcaggagcatgtatgtctgcaggtgtctgacacgcaagtgtgtgagtgtgagtgtgagagatggggcgggggtgtgtctgtaggtgtctctgggcctgtgtgtgggtggggttatgtgagggtatgaagagctgtcttcccctgagagtttcctcacttacataaagctcccttgaagcaagaaagagggtcccagggctgcaaaactggaagcacagcctcggggatggggagggaaagacggtgctatatccagttcctgctctctgctcatgggtggctgtgacaaccctggcctcacttgattcatctctggttttcttgccaccctctgggagtccccatcccattttcatcctgagcccaaccaggccctgccattggcctcttgtcccttggcacacttgtacccacaggtgaggggcaggacctgaaggtattggcctgttcaacaatcagtcatcatgggtgtttttgtcaactgcttgttaattgatttggggatgtttgccccgaatgagaggttgaggaaaagactgtgggtggggaggccctgcctgacccatcccttttcctttctggccccagcctaggtggaggcaagtggaatatcttatattgggcgatttgggggctcggggaggcagagaatctcttgggagtcttgggtggcgctggtgcattctgtttcctcttgatctcaaagcacaatgtggatttggggaccaaaggtcagggacacatccccttagaggacctgagtttgggagagtggtgagtggaagggaggagcagcaagaagcagcctgttttcactcagcttaattctccttcccagataaggcaagccagtcatggaatcttgctgcaggccctccctctactcttcctgtcctaaaaataggggccgttttcttacacacccccagagagaggagggactgtcacactggtgctgagtgaccgggggctgctgggcgtctgttctttaccaaaaccatccatccctagaagagcacagagccctgaggggctgggctgggctgggctgagcccctggtcttctctacagttcacagaggtctttcagctcatttaatcccaggaaagaggcatcaaagctagaatgtgaatataacttttgtggaccaatactaagaataacaagaagcccagtggtgaggaaagtgcgttctcccagcactgcctcctgttttctccctctcatgtccctccagggaaaatgactttattgcttaatttctgcctttcccccctcacacatgcacttttgggcctttttttatagctggaaaaaacaaaataccaccctacaaacctgtatttaaaaagaaacagaaatgaccacgtgaaatttgcctctgtccaaacatttcatccgtgtgtatgtgtatgtgtgtgagtgtgtgaagccgccagttcatctttttatatggggttgttgtctcattttggtctgttttggtcccctccctcgtgggcttgtgctcgggatcaaacctttctggcctgttatgattctgaacatttgacttgaaccacaagtgaatctttctcctggtgactcaaataaaagtataattttt

SEQ ID NO: 162342 - DNA, 984 bp, Artificial Sequence
  derived and/or modified sequence
agttccccagctccagccgccgtcgctgctgcctgtgtagttgcagccgcggccgcctcccgccagctcgcctcggggaacaggacgcgcgtgagctcaggcgtccccgccccagcttttctcggaaccatgaaccccaactgcgcccggtgcggcaagatcgtgtatcccacggagaaggtgaactgtctggataagttctggcataaagcatgcttccattgcgagacctgcaagatgacactgaacatgaagaactacaagggctacgagaagaagccctactgcaacgcacactaccccaagcagtccttcaccatggtggcggacaccccggaaaaccttcgcctcaagcaacagagtgagctccagagtcaggtgcgctacaaggaggagtttgagaagaacaagggcaaaggtttcagcgtagtggcagacacgcccgagctccagagaagttccttaggttttctttggaatgaaattcctccttccccccatctctgagtggaggaagcccaccaatctgccctttgcagtgtgcagggtggaaggtaagaggttggtgtggagttggggctgccatagggtctgcagcctgctggggctaagcggtggaggaaggctctgtcactccaggcatatgtttccccatctctgtctggggctacagaatagggtggcagaagtgtcaccctgtgggtgtctccctcgggggctcttcccctagacctccccctcacttacataaagctcccttgaagcaagaaagagggtcccagggctgcaaaactggaagcacagcctcggggatggggagggaaagacggtgctatatccagttcctgctctctgctcatgggtggctgtgacaaccctggcctcacttgattcatctctggttttcttgccaccctctgggagtccccatcccattttcatcctgagcccaaccaggccctgccattggcctcttgtcccttg

SEQ ID NO: 162343 - DNA, 786 bp, Artificial Sequence
  derived and/or modified sequence
atgaaccccaactgcgcccggtgcggcaagatcgtgtaccccaccgagaaggtgaattgcctggacaagttttggcacaaggcttgcttccactgcgagacttgcaagatgaccctaaacatgaaaaactacaaaggatatgagaaaaagccgtactgtaatgcgcactaccctaagcagagctttaccatggttgccgacactcccgaaaatctccggctcaaacagcagagtgagctgcagagtcaggtgcgatataaagaagagtttgagaaaaataagggcaaaggcttttcggtcgtggctgatacacccgagttgcagagaatcaaaaaaacacaagatcaaatatctaatataaagtatcacgaggaattcgaaaagtcaaggatgggaccgtctgggggcgagggcatggaacccgaaagacgcgactctcaggacggcagcagctataggaggcctttagaacagcaacagccacaccatatacctacatctgccccagtctatcagcaaccacagcagcagcccgtcgctcagtcatatggcggctataaggagcccgccgcgccagtgtcaatccagaggtccgcaccaggcgggggcggaaagagataccgggctgtctacgattatagcgccgcagacgaggatgaggtatctttccaggacggcgataccattgttaatgtccagcaaatcgatgacggctggatgtatggaactgtggagaggacaggcgatacaggtatgctgccggccaactatgtcgaggccatctag

SEQ ID NO: 162344 - DNA, 501 bp, Artificial Sequence
  derived and/or modified sequence
atgaccctgaacatgaagaactacaagggctacgagaagaagccctattgcaacgctcactaccccaaacagagctttaccatggtggccgacaccccagaaaatcttcgactcaagcagcagagtgaactgcagagtcaggtgagatataaggaggaatttgaaaaaaacaagggtaagggcttctcagtggtcgccgatacgccagaactccagaggatcaagaaaacacaggatcagatttccaacattaagtaccacgaggagtttgagaagagtaggatgggtccctcaggtggggaaggcatggagccagagagacgcgactcccaagatggctcttcctatcggcgacccctggaacagcagcagccccatcacattccgacaagcgctcctgtgtaccagcaacctcagcaacaacccgtagcacagtcttacggtggctacaaggaaccggcagcgcctgtaagtattcagagaagcgcaccgggagggtag

SEQ ID NO: 162345 - DNA, 786 bp, Artificial Sequence
  derived and/or modified sequence
atgaaccccaactgcgcccggtgcggcaagatcgtgtaccccaccgaaaaagtgaattgccttgataagttctggcacaaagcttgcttccactgcgagacgtgtaagatgaccttgaacatgaaaaactataaaggttatgaaaaaaaaccatattgtaacgctcactatcccaagcagtcctttacaatggttgcggacacacccgagaacctgcggcttaagcagcaatccgaacttcagagccaggttcgttataaagaggagttcgagaagaacaagggaaaaggtttcagtgttgtcgccgacacccctgagttgcagcggattaaaaaaacccaggaccagatcagcaacataaaataccacgaggaatttgagaagtcccgaatggggcccagtggcggagaggggatggaacccgagcgccgcgacagtcaggacgggtctagctatagacgaccactggagcagcaacaacctcaccatatcccaacatcagcacccgtatatcagcaacctcaacagcagcctgttgctcagagttacggcgggtataaagaaccggccgcccccgtgagcatccaacgaagcgcgccagggggagggggtaaacgatatcgcgctgtgtacgactatagtgccgcggatgaggatgaggtttcatttcaggacggagacacgatcgttaatgtccagcagatagatgatggatggatgtatggcacagtcgaaagaaccggcgacacaggcatgctgcccgcaaactatgtcgaagcgatctag

SEQ ID NO: 162346 - DNA, 378 bp, Artificial Sequence
  derived and/or modified sequence
atgaaccccaactgcgcccggtgcggcaagatcgtgtaccccaccgagaaagtgaattgtctggacaagttttggcacaaagcctgtttccactgtgagacatgcaagatgacactgaatatgaaaaattacaaaggctacgaaaaaaaaccttactgcaacgctcactacccgaagcaaagttttacaatggtcgcggatacgccggagaaccttcgactgaaacagcagagcgagttgcagagtcaggtgagatacaaagaggaatttgagaagaacaagggaaagggcttctccgtggtagctgacacacctgagttgcagagaagcagcctggggttcctctggaacgagatccccccatccccacacttatag

SEQ ID NO: 162347 - DNA, 786 bp, Artificial Sequence
  derived and/or modified sequence
atgaaccccaactgcgctcgctgcgggaagatcgtctatcccactgaaaaggtcaattgtttagacaagttctggcacaaggcttgcttccattgtgagacctgcaaaatgacccttaacatgaagaattacaaaggatacgagaagaaaccttattgcaatgcacattacccaaaacagtctttcactatggtggcggacactcccgaaaacctgcggctgaaacagcagagcgagctccagagccaggtgaggtataaggaggaatttgagaaaaataaaggcaaggggttctccgtcgtcgccgacacccccgagctgcagcggatcaaaaagacacaggatcagatcagcaacataaagtatcacgaagagtttgagaagtcccgcatgggacctagcggcggtgagggcatggaacccgagagacgcgatagccaggatggttcctcctaccgcagacctctcgagcagcagcagccccaccacatcccaactagcgcaccagtctaccaacagccacagcagcaacctgtagcccagagctacggcggttacaaggaacctgccgcacctgtgtccattcagcgcagcgcgcctggagggggtgggaagagatatcgagccgtgtacgactattctgctgccgacgaagatgaggtgtccttccaggacggagacacaatcgtgaacgtccaacaaatcgatgatggctggatgtacggaacagtagaaaggacaggcgataccggtatgctgccggctaattacgttgaggctatctag

SEQ ID NO: 162348 - DNA, 501 bp, Artificial Sequence
  derived and/or modified sequence
atgaccttgaacatgaagaactacaagggttatgaaaaaaaaccctactgcaacgctcattacccaaagcagtccttcacgatggtcgctgatacccctgagaatcttaggctcaaacagcagtccgagcttcagtctcaggtcaggtacaaagaggaattcgaaaagaataaagggaaaggattcagtgtagtcgctgacacacccgagcttcagagaattaagaaaacacaggatcagatctctaatattaaatatcatgaagaattcgagaagtcacgtatggggccttcaggcggtgaaggtatggaaccggagcgcagagatagtcaggacggctcctcttaccgccgaccacttgagcagcagcagccacatcacattccgacctctgctcccgtttatcagcagccacagcaacagccagtggcacagtcttatgggggttacaaggaaccggcagccccagttagtatccaacgatcagctcctggagggtag

SEQ ID NO: 162349 - DNA, 786 bp, Artificial Sequence
  derived and/or modified sequence
atgaatccaaattgcgcgagatgtgggaaaattgtataccccacagaaaaagtcaattgtctggacaaattttggcacaaggcctgtttccattgtgaaacctgtaagatgacactaaatatgaagaattacaaaggatacgaaaagaagccctattgcaatgcacattaccctaagcagagctttactatggttgcggatactcccgagaatctgcggctgaagcagcaatctgaactgcagagtcaagttaggtacaaagaagagtttgagaagaacaaaggtaaaggtttcagtgtggtagcggacacaccagaactgcagcgaattaagaaaacacaggatcagatatccaacattaagtatcacgaagaattcgagaaaagtaggatgggaccgagcggtggcgagggcatggaaccagaacgaagggattcccaagacggcagtagttaccgcagacctctagagcaacagcagccgcatcatatccctacctctgctcccgtttaccagcagccacagcagcaacctgtcgcccagagctatgggggatacaaagagccagcggctcctgttagcattcagcggagcgcacccggagggggtggcaagagatacagggcagtttatgattacagcgccgcagacgaagacgaagtttcttttcaggatggcgacaccattgttaatgttcaacaaatcgatgacggttggatgtacggcaccgtcgaacgaacaggcgacacgggaatgcttcccgctaattacgtcgaagcaatttag

SEQ ID NO: 162350 - DNA, 378 bp, Artificial Sequence
  derived and/or modified sequence
atgaatcctaattgtgctcgatgcgggaagatcgtgtatccaactgaaaaggtaaactgcctcgataagttctggcacaaagcttgctttcactgcgagacctgtaaaatgacactgaatatgaagaattacaagggctatgagaaaaaaccgtattgtaatgcgcactacccaaagcaaagtttcacaatggttgccgacacacccgagaacctgcgtttgaagcagcagtcagagctgcaatctcaagtgaggtacaaggaagagtttgagaagaataagggtaagggcttttctgtcgtggctgatactcccgaactgcaacggtcaagcctcggctttttgtggaatgagatcccaccttccccccatctgtag

SEQ ID NO: 162351 - DNA, 786 bp, Artificial Sequence
  derived and/or modified sequence
atgaaccccaactgcgccagatgcggcaagatcgtgtaccccaccgagaaggtgaactgcctggacaagttctggcacaaggcctgcttccactgcgagacctgcaagatgaccctgaacatgaagaactacaagggctacgagaagaagccctactgcaacgcccactaccccaagcagagcttcaccatggtggccgacacccccgagaacctgagactgaagcagcagagcgagctgcagagccaggtgagatacaaggaggagttcgagaagaacaagggcaagggcttcagcgtggtggccgacacccccgagctgcagagaatcaagaagacccaggaccagatcagcaacatcaagtaccacgaggagttcgagaagagcagaatgggccccagcggcggcgagggcatggagcccgagagaagagacagccaggacggcagcagctacagaagacccctggagcagcagcagccccaccacatccccaccagcgcccccgtgtaccagcagccccagcagcagcccgtggcccagagctacggcggctacaaggagcccgccgcccccgtgagcatccagagaagcgcccccggcggcggcggcaagagatacagagccgtgtacgactacagcgccgccgacgaggacgaggtgagcttccaggacggcgacaccatcgtgaacgtgcagcagatcgacgacggctggatgtacggcaccgtggagagaaccggcgacaccggcatgctgcccgccaactacgtggaggccatctag

SEQ ID NO: 162352 - DNA, 501 bp, Artificial Sequence
  derived and/or modified sequence
atgaccctgaacatgaagaactacaagggctacgagaagaagccctactgcaacgcccactaccccaagcagagcttcaccatggtggccgacacccccgagaacctgagactgaagcagcagagcgagctgcagagccaggtgagatacaaggaggagttcgagaagaacaagggcaagggcttcagcgtggtggccgacacccccgagctgcagagaatcaagaagacccaggaccagatcagcaacatcaagtaccacgaggagttcgagaagagcagaatgggccccagcggcggcgagggcatggagcccgagagaagagacagccaggacggcagcagctacagaagacccctggagcagcagcagccccaccacatccccaccagcgcccccgtgtaccagcagccccagcagcagcccgtggcccagagctacggcggctacaaggagcccgccgcccccgtgagcatccagagaagcgcccccggcggctag

SEQ ID NO: 162353 - DNA, 378 bp, Artificial Sequence
  derived and/or modified sequence
atgaaccccaactgcgccagatgcggcaagatcgtgtaccccaccgagaaggtgaactgcctggacaagttctggcacaaggcctgcttccactgcgagacctgcaagatgaccctgaacatgaagaactacaagggctacgagaagaagccctactgcaacgcccactaccccaagcagagcttcaccatggtggccgacacccccgagaacctgagactgaagcagcagagcgagctgcagagccaggtgagatacaaggaggagttcgagaagaacaagggcaagggcttcagcgtggtggccgacacccccgagctgcagagaagcagcctgggcttcctgtggaacgagatcccccccagcccccacctgtag

SEQ ID NO: 162354 - protein, 323 aa, Artificial Sequence
  derived and/or modified sequence
MAYVPAPGYQPTYNPTLPYYQPIPGGLNVGMSVYIQGVASEHMKRFFVNFVVGQDPGSDVAFHFNPRFDGWDKVVFNTLQGGKWGSEERKRSMPFKKGAAFELVFIVLAEHYKVVVNGNPFYEYGHRLPLQMVTHLQVDGDLQLQSINFIGGQPLRPQGPPMMPPYPGPGHCHQQLNSLPTMEGPPTFNPPVPYFGRLQGGLTARRTIIIKGYVPPTGKSFAINFKVGSSGDIALHINPRMGNGTVVRNSLLNGSWGSEEKKITHNPFGPGQFFDLSIRCGLDRFKVYANGQHLFDFAHRLSAFQRVDTLEIQGDVTLSYVQI

SEQ ID NO: 162355 - DNA, 972 bp, Artificial Sequence
  derived and/or modified sequence
atggcctacgtgcccgcccccggctaccagcccacctacaaccccaccctgccctactaccagcccatccccggcggcctgaacgtgggcatgagcgtgtacatccagggcgtggccagcgagcacatgaagagattcttcgtgaacttcgtggtgggccaggaccccggcagcgacgtggccttccacttcaaccccagattcgacggctgggacaaggtggtgttcaacaccctgcagggcggcaagtggggcagcgaggagagaaagagaagcatgcccttcaagaagggcgccgccttcgagctggtgttcatcgtgctggccgagcactacaaggtggtggtgaacggcaaccccttctacgagtacggccacagactgcccctgcagatggtgacccacctgcaggtggacggcgacctgcagctgcagagcatcaacttcatcggcggccagcccctgagaccccagggcccccccatgatgcccccctaccccggccccggccactgccaccagcagctgaacagcctgcccaccatggagggcccccccaccttcaacccccccgtgccctacttcggcagactgcagggcggcctgaccgccagaagaaccatcatcatcaagggctacgtgccccccaccggcaagagcttcgccatcaacttcaaggtgggcagcagcggcgacatcgccctgcacatcaaccccagaatgggcaacggcaccgtggtgagaaacagcctgctgaacggcagctggggcagcgaggagaagaagatcacccacaaccccttcggccccggccagttcttcgacctgagcatcagatgcggcctggacagattcaaggtgtacgccaacggccagcacctgttcgacttcgcccacagactgagcgccttccagagagtggacaccctggagatccagggcgacgtgaccctgagctacgtgcagatctag

SEQ ID NO: 162356 - DNA, 972 bp, Artificial Sequence
  derived and/or modified sequence
atggcttatgtgcctgcacccggataccagccaacttataacccgaccctcccatactaccaacccatccctggcggccttaatgtcggaatgtccgtctacattcagggggtggcctccgaacacatgaagaggttttttgtgaactttgtggttgggcaagatcctggaagcgacgtagcttttcacttcaacccacgctttgatgggtgggacaaggtagtgttcaacaccctccagggggggaagtgggggtcagaagagcggaagagatccatgccattcaagaaaggtgcagcctttgagctggtctttatcgttctcgccgagcattacaaggtagtagtgaacggcaatcctttctacgaatatgggcaccggctacccttgcaaatggtgacacatctgcaagtagacggtgatcttcagctgcagtccatcaatttcataggtggccaacccctccggccacagggcccaccaatgatgccgccttaccccggacctggacattgccatcaacagctgaattccctaccaacgatggagggcccccccacatttaacccccctgtcccgtatttcggtcgcttgcaagggggactcactgcaagaaggactattattatcaaagggtacgtccccccaactggcaaatccttcgccattaacttcaaggtgggatcatccggcgacatagctctccacatcaatccacggatggggaacggcacagtggtcaggaattctctcctaaatggctcatggggatctgaagagaaaaaaattactcacaatcctttcggccccgggcagttcttcgatctaagtatccggtgcggtctggacaggtttaaggtatatgccaatggccaacatctcttcgactttgcacaccgcctttccgcctttcaacgggtggacactctggagatccagggcgacgtgacactgtcatacgtacagatttag

SEQ ID NO: 162357 - DNA, 972 bp, Artificial Sequence
  derived and/or modified sequence
atggcctacgtgcctgcccctggctaccagcccacctacaaccccaccctgccctactaccagcccatccctgggggcctgaatgtgggcatgtctgtgtacatccagggcgtggccagcgagcacatgaagcgcttctttgtgaactttgtggtgggccaggaccccggcagtgatgtggccttccacttcaaccccaggtttgatggctgggacaaggtggtgttcaacaccctgcagggcggcaagtggggcagcgaggagaggaagaggtccatgcccttcaagaagggagctgcctttgagctggtgttcatcgtgctggccgagcactacaaggtggtggtgaatggaaaccccttctatgaatatggccaccggctgcccctgcagatggtgacccacctgcaggtggatggagacctgcagctgcagagcatcaacttcatcggcggccagcccctgcggccccagggcccccccatgatgccaccctacccaggccctggccactgccaccagcagctgaacagcctgcccaccatggagggcccccccaccttcaacccccctgtgccctacttcggccgcctgcagggcggcctgacagcccggaggaccatcatcatcaagggctacgtgcccccaacaggcaagagctttgccatcaacttcaaggtgggcagcagcggggacatcgccctgcacatcaaccccaggatgggaaatggaacagtggtgaggaacagcctgctgaatggctcctggggcagcgaggagaagaagatcacccacaaccccttcggccctggccagttctttgacctgagcatccgctgtggcctggaccgcttcaaggtgtatgccaacggccagcacctgtttgattttgcccaccggctgagcgccttccagagggtggacaccctggagatccagggagatgtgaccctgtcctatgtgcagatctag

SEQ ID NO: 162358 - DNA, 1278 bp, Artificial Sequence
  derived and/or modified sequence
tggtcaccagggaagctggcaagggaagggagactagggtgcgctctaggagaagccgacagcctgagagtcccagaagaggagccctgtggaccctcccctgccagccactcccttaccctgggtataagagccaccaccgcctgccatccgccaccatctcccactcctgcagctcttctcacaggaccagccactagcgcagcctcgagcgatggcctatgtccccgcaccgggctaccagcccacctacaacccgacgctgccttactaccagcccatcccgggcgggctcaacgtgggaatgtctgtttacatccaaggagtggccagcgagcacatgaagcggttcttcgtgaactttgtggttgggcaggatccgggctcagacgtcgccttccacttcaatccgcggtttgacggctgggacaaggtggtcttcaacacgttgcagggcgggaagtggggcagcgaggagaggaagaggagcatgcccttcaaaaagggtgccgcctttgagctggtcttcatagtcctggctgagcactacaaggtggtggtaaatggaaatcccttctatgagtacgggcaccggcttcccctacagatggtcacccacctgcaagtggatggggatctgcaacttcaatcaatcaacttcatcggaggccagcccctccggccccagggacccccgatgatgccaccttaccctggtcccggacattgccatcaacagctgaacagcctgcccaccatggaaggacccccaaccttcaacccgcctgtgccatatttcgggaggctgcaaggagggctcacagctcgaagaaccatcatcatcaagggctatgtgcctcccacaggcaagagctttgctatcaacttcaaggtgggctcctcaggggacatagctctgcacattaatccccgcatgggcaacggtaccgtggtccggaacagccttctgaatggctcgtggggatccgaggagaagaagatcacccacaacccatttggtcccggacagttctttgatctgtccattcgctgtggcttggatcgcttcaaggtttacgccaatggccagcacctctttgactttgcccatcgcctctcggccttccagagggtggacacattggaaatccagggtgatgtcaccttgtcctatgtccagatctaatctattcctggggccataactcatgggaaaacagaattatcccctaggactcctttctaagcccctaataaaatgtctgagggtgtctcatg

SEQ ID NO: 162359 - DNA, 972 bp, Artificial Sequence
  derived and/or modified sequence
atggcctacgtgcccgcccccggctaccagcccacctacaaccccaccctaccttactaccaacccatcccgggtggactcaacgttgggatgtctgtgtacattcagggagtggcatcagagcacatgaagaggttctttgttaacttcgtggtgggccaggatcccggaagtgacgtcgcatttcattttaaccctcgattcgacggctgggacaaggtagtgttcaataccctccagggaggtaagtggggctccgaagaacggaaacggagcatgccttttaagaaaggtgcggcgttcgagcttgtattcatcgtcctggccgagcactataaggtcgtcgtgaatggcaatcccttctacgaatatggccatcgcctccccctccagatggtgactcatctgcaggtggatggtgatctgcagctgcaaagtattaatttcattggtgggcagcctctccgacctcagggcccgccaatgatgcctccttatcctgggcctggccattgtcatcaacagctgaattctcttccgactatggaaggccccccgacatttaaccctcctgtcccctatttcggacggctgcaggggggactaacggcccgaagaacgatcatcatcaaaggctatgtacctcccaccggcaagagtttcgctatcaacttcaaagtgggaagctcgggcgacattgctctccacatcaacccacgcatgggaaacggcactgttgtgcgaaacagcctcttgaatggcagctggggcagcgaggagaaaaaaatcacacacaacccattcggacctggccaattctttgatctctccattcggtgcggactcgaccggtttaaagtttatgcgaatggacagcatctcttcgactttgcacatcggctgagcgcattccagagggtggacactctggagatccagggggacgtgaccctcagctacgtgcaaatttag

SEQ ID NO: 162360 - DNA, 972 bp, Artificial Sequence
  derived and/or modified sequence
atggcctatgtgcctgcacctggatatcagcccacttacaatccgaccctgccctactatcagcctatccctgggggattaaatgtgggtatgagcgtgtatatacaaggagtggcttcggaacatatgaaacggtttttcgtaaactttgtggtcggccaggatcctggctcagacgtggcttttcacttcaaccctcggtttgatggatgggacaaagtggtgttcaacacgctgcagggaggtaagtggggctctgaggaacgaaagaggagcatgcccttcaagaagggagccgcattcgagttggtcttcattgtgctggctgagcactacaaggtcgtcgtgaatggaaatcccttctacgagtacgggcataggctcccattgcagatggtgacccatttacaagtcgacggagacctgcagctgcagtctatcaactttatagggggtcagccactgaggccccagggtccaccaatgatgccgccataccccggtcccggacattgccatcagcagctaaactccttaccaacaatggaaggccctcccaccttcaatccaccagtcccctatttcggccgattacagggcggtctaaccgcgagacggactatcatcataaaagggtacgtcccccctaccggcaagtccttcgctatcaatttcaaagtggggagtagcggcgatatcgctctccacatcaatccgaggatgggtaacggtaccgtagtgagaaattcgttgttgaatgggtcctgggggagcgaggagaaaaaaataacacacaacccttttggtccaggccagttttttgatctctccatccgttgtggcctggaccgctttaaggtgtatgccaatggtcaacacctgttcgattttgcccacagactgtcagccttccagcgcgtggacaccctcgagatacaaggggacgtcacactgtcatacgtgcagatctag

SEQ ID NO: 162361 - protein, 712 aa, Artificial Sequence
  derived and/or modified sequence
MRVLLHLPALLASLILLQAAASTTRAQTTRTSAISDTVSQAKVQVNKAFLDSRTRLKTAMSSETPTSRQLSEYLKHAKGRTRTAIRNGQVWEESLKRLRQKASLTNVTDPSLDLTSLSLEVGCGAPAPVVRCDPCSPYRTITGDCNNRRKPALGAANRALARWLPAEYEDGLSLPFGWTPGKTRNGFPLPLAREVSNKIVGYLNEEGVLDQNRSLLFMQWGQIVDHDLDFAPDTELGSSEYSKAQCDEYCIQGDNCFPIMFPPNDPKAGTQGKCMPFFRAGFVCPTPPYKSLAREQINALTSFLDASFVYSSEPSLASRLRNLSSPLGLMAVNQEVSDHGLPYLPYDSKKPSPCEFINTTARVPCFLAGDSRASEHILLATSHTLFLREHNRLARELKRLNPQWDGEKLYQEARKILGAFVQIITFRDYLPILLGDHMQKWIPPYQGYSESVDPRISNVFTFAFRFGHLEVPSSMFRLDENYQPWGPEPELPLHTLFFNTWRMVKDGGIDPLVRGLLAKKSKLMKQNKMMTGELRNKLFQPTHRIHGFDLAAINTQRCRDHGQPGYNSWRAFCDLSQPQTLEELNTVLKSKMLAKKLLGLYGTPDNIDIWIGAIAEPLVERGRVGPLLACLLGKQFQQIRDGDRFWWENPGVFTNEQKDSLQKMSFSRLVCDNTRITKVPRDPFWANSYPYDFVDCSAIDKLDLSPWASVKN

SEQ ID NO: 162362 - protein, 457 aa, Artificial Sequence
  derived and/or modified sequence
CFPVQFPPNDPKAGTQGKCMPFFRAGFVCPTPPYKSLAREQINALTSFLDASFVYSSEPSLASRLRNLSSPLGLMAVNQEVSDHGLPYLPYDSKKPSPCEFINTTARVPCFLAGDSRASEHILLATSHTLFLREHNRLARELKRLNPQWDGEKLYQEARKILGAFVQIITFRDYLPILLGDHMQKWIPPYQGYSESVDPRISNVFTFAFRFGHLEVPSSMFRLDENYQPWGPEPELPLHTLFFNTWRMVKDGGIDPLVRGLLAKKSKLMKQNKMMTGELRNKLFQPTHRIHGFDLAAINTQRCRDHGQPGYNSWRAFCDLSQPQTLEELNTVLKSKMLAKKLLGLYGTPDNIDIWIGAIAEPLVERGRVGPLLACLLGKQFQQIRDGDRFWWENPGVFTNEQKDSLQKMSFSRLVCDNTRITKVPRDPFWANSYPYDFVDCSAIDKLDLSPWASVKN

SEQ ID NO: 162363 - protein, 653 aa, Artificial Sequence
  derived and/or modified sequence
MSSETPTSRQLSEYLKHAKGRTRTAIRNGQVWEESLKRLRQKASLTNVTDPSLDLTSLSLEVGCGAPAPVVRCDPCSPYRTITGDCNNRRKPALGAANRALARWLPAEYEDGLSLPFGWTPGKTRNGFPLPLAREVSNKIVGYLNEEGVLDQNRSLLFMQWGQIVDHDLDFAPDTELGSSEYSKAQCDEYCIQGDNCFPIMFPPNDPKAGTQGKCMPFFRAGFVCPTPPYKSLAREQINALTSFLDASFVYSSEPSLASRLRNLSSPLGLMAVNQEVSDHGLPYLPYDSKKPSPCEFINTTARVPCFLAGDSRASEHILLATSHTLFLREHNRLARELKRLNPQWDGEKLYQEARKILGAFVQIITFRDYLPILLGDHMQKWIPPYQGYSESVDPRISNVFTFAFRFGHLEVPSSMFRLDENYQPWGPEPELPLHTLFFNTWRMVKDGGIDPLVRGLLAKKSKLMKQNKMMTGELRNKLFQPTHRIHGFDLAAINTQRCRDHGQPGYNSWRAFCDLSQPQTLEELNTVLKSKMLAKKLLGLYGTPDNIDIWIGAIAEPLVERGRVGPLLACLLGKQFQQIRDGDRFWWENPGVFTNEQKDSLQKMSFSRLVCDNTRITKVPRDPFWANSYPYDFVDCSAIDKLDLSPWASVKN

SEQ ID NO: 162364 - DNA, 2139 bp, Artificial Sequence
  derived and/or modified sequence
atgcgggtgcttctgcacctacccgccttacttgcatctttaatcctgctgcaggctgccgcttccactaccagggcacagaccacacgaacctcagccatcagtgatactgtatcacaggctaaggtgcaggtgaataaagcgtttctggactctagaacaaggttgaagacagctatgtcatctgagactcctacgtccagacaactgagcgaatatctgaaacacgcaaagggccgcactcgcacagcaatcaggaatggacaagtctgggaggagtctctgaagcgactcaggcagaaggcatcgctgactaacgtaacagacccatctttggacctcacatccctgtcactcgaagtaggctgcggggccccagcccctgtggtgagatgcgatccttgttcgccatacaggactatcactggagattgtaacaatcgacgcaaaccagcacttggggctgcgaatcgggcactggcacggtggttaccagcggagtacgaggatggtctgagcctgccttttgggtggaccccagggaagacaaggaatgggtttcccttacccctggcacgggaggtgtccaacaagatagtagggtatctgaatgaggagggcgtgctcgaccagaatagatcactactcttcatgcagtggggccagatcgtcgaccacgacctcgattttgcacccgacacggaacttgggtccagcgagtatagtaaggctcagtgtgacgaatattgtattcagggcgataattgctttcccatcatgtttccgcccaacgaccctaaggctggcacacagggcaagtgcatgcctttcttcagggctgggtttgtatgccccacacccccttataagagtcttgcccgcgaacagatcaacgctctcacctcttttctcgatgccagtttcgtgtattccagcgagccatctttggcatcacgactgcgcaatctctcctcaccattgggactaatggccgtgaatcaagaggtaagcgatcacggcctgccttacctcccatacgattcaaagaagccgtccccctgcgagtttataaacactaccgctcgggtgccatgcttcctggccggggactctcgtgcttcagagcacattttgttggctacaagccacaccctctttttacgcgagcacaatagactagcacgcgagctcaaacgcctgaacccccagtgggatggtgaaaaattataccaggaggcgaggaagatcctaggggcatttgtccagatcatcacattcagagattatctgcctattttgctcggggaccatatgcagaagtggatccccccttatcagggttactcagagagcgtagacccccgaattagcaacgtgtttacgtttgcattcaggttcggacaccttgaggtgcctagttccatgtttagattagacgaaaactatcaaccttggggacctgagccagaactccccttgcataccctgttctttaacacttggagaatggtgaaagacgggggcatcgatccactagtgagaggcctcctggccaaaaaatcaaagctgatgaaacagaataagatgatgacaggtgagctacggaataagctgttccagcctactcaccgtatccacggttttgacctggctgctataaatacccagagatgcagagatcacggtcagccgggttacaatagttggcgcgccttttgtgatctgagccagccccagacgttagaagaattgaatacggtgttgaagtcaaaaatgctagccaagaagcttttgggtctgtacggtactcctgacaacatcgacatttggataggcgctatagctgagcccctcgtggagcgaggtcgtgtgggacctctgctagcatgcctgctgggaaagcaattccagcaaatcagagatggtgatcgcttttggtgggagaatcctggtgtcttcacaaacgagcagaaagattcactccagaagatgagctttagtcggctagtatgtgacaacacacggatcacaaaggtccccagagatcccttctgggcgaactcatatccctatgattttgtggactgttctgccatcgacaaactggacctgagtccatgggcctccgtgaagaactag

SEQ ID NO: 162365 - DNA, 1962 bp, Artificial Sequence
  derived and/or modified sequence
atgtccagcgaaacccccacctcacgacaactttccgagtacctaaaacacgctaagggaaggacccggacagcaatacgcaatgggcaggtgtgggaagaaagcctgaaaagactcagacagaaggctagcttgactaatgttacggaccccagtctggacctcaccagcttaagtcttgaagtggggtgcggagcacccgctcccgtggtgagatgcgatccatgctccccataccgcaccattactggagactgcaacaaccgacggaaacctgcactgggagccgctaatcgggcgctagcccgctggctgccggcggagtatgaagatgggctgtcacttccattcggctggactcccgggaagaccagaaatgggttccccctgcctcttgcccgcgaggtcagcaacaagatcgtgggataccttaacgaggagggagttctggatcagaatcgtagcttgttgttcatgcagtggggtcagatcgtcgaccacgatctggatttcgcccccgatactgaactaggcagcagcgaatatagcaaggcccagtgcgacgagtattgcattcagggtgataactgcttcccaataatgtttccacctaacgatcccaaagctggcacccaggggaaatgtatgccctttttccgagccggtttcgtgtgccccactcctccctacaaatccctcgctcgagaacagatcaacgccctcaccagttttttggacgctagttttgtttatagtagtgaaccctctctggcttccaggctgcggaatctgtcttctccccttggactgatggctgtgaaccaggaagtgtctgatcacggtcttccgtatttgccttacgattctaaaaaaccatctccgtgcgagttcatcaacactactgcaagagtgccctgctttctggcaggcgacagcagggcctccgagcatattttattggcaacaagccacactttgttccttagagaacataaccgactggcccgagaacttaaaaggttgaacccacagtgggatggggaaaagctataccaggaggcgcgaaaaatcctgggtgcctttgtccagattattactttcagagactacctccctatcctgctcggggaccatatgcaaaagtggatcccaccttatcagggctattccgagtccgttgacccccgaatatcaaacgtgttcaccttcgccttccgcttcggccacctggaggtaccatctagcatgtttcgactcgacgagaactatcagccctgggggccagagccagagctccctctccacacattgttcttcaacacctggcggatggtgaaagatggcggcatcgaccctctggtgcgcggcctgctcgccaagaagtcgaagttgatgaaacagaacaaaatgatgaccggtgaactcaggaacaaattgtttcagcctactcatcgtatccatgggtttgatctggccgccattaacacccagcgatgtagggatcatggccagcccggctataactcctggcgagccttttgtgatctgtcccagccacagaccctggaagagctgaacacagtgctaaaatcaaaaatgcttgcaaaaaagctcctggggttatacggcactcccgataacattgacatctggattggagctatcgccgaacccctagtcgagcgcggcagagttgggcctttgctcgcctgcctgttggggaagcagtttcagcagattagagacggagaccggttctggtgggagaacccaggcgtttttactaacgagcaaaaggactcacttcagaaaatgagcttcagcagactggtctgcgacaatactaggattaccaaagtgcctagggaccccttctgggctaatagctacccttatgatttcgtcgattgctcagcaatcgataagctcgatctctcaccatgggcatctgtcaaaaattag

SEQ ID NO: 162366 - DNA, 2978 bp, Artificial Sequence
  derived and/or modified sequence
cagggcatgcagtttttgccttccggaactagatcaggatcatgcatttaagctagaaaatggaaagaggagttgcttcacccacagtcagtgctattgcatcaaccaatccctgccattctgcagtttcctggtgtatctgcccggagtcacacagtctttcctgctaagcctcagcgtctcctccaagccacatcaaaatctttccttctgggcctttcccagaagtgaattcttgctggaaggtataaaagaccagctcctccaagcagagcaactccctggctgccgtgaaaagacaaggcactgggcagtgatgagggtccttctccatctcccagccctcctggcttccctcatcttgcttcaggctgcagcatctaccacaagagcgcagactaccagaacctctgccatctccgatactgtgagtcaggccaaggtccaagtcaacaaggccttcctggactcccgaaccaggctgaagaccgccatgagctctgagactcccaccagccgacagctctcagaatacctcaagcatgccaaaggccggacgcgcacagccatccgcaatggacaggtgtgggaggagtctttaaagagactgaggcagaaggcatccttgaccaatgtcacagatcccagcctggacttgacttcactgtctctggaggtgggctgtggtgctcctgctcccgtggtgagatgcgacccgtgcagcccttaccgcaccattacgggagactgcaataacaggaggaagcctgcgctgggcgccgccaacagggctctggcgcgctggctgcccgcggagtacgaggacgggctctccctgcccttcggctggacgccggggaagacgcgcaacggcttccctctcccgctggcccgggaggtatctaacaagattgttggctatctgaatgaggagggtgttctggaccaaaacaggtccctgctcttcatgcagtggggtcagattgtggatcatgacctggactttgcccctgacaccgagctggggagtagcgagtactccaaagcccagtgtgatgagtactgtatccagggagacaactgcttccccatcatgttcccacccaatgaccccaaggcggggactcaagggaaatgcatgcctttcttccgagctgggttcgtctgccccactccaccctacaagtccctggcccgagagcagatcaacgctctgacctccttcctggatgccagctttgtgtacagctccgagccaagcctggccagccgcctccgcaacctcagcagccccctgggcctcatggctgtcaaccaggaggtctcagaccatggactaccctacctgccctatgacagcaagaagccaagcccctgtgagttcatcaacaccactgcccgtgtgccctgcttcctggcaggagattctcgagcctcagagcatattctgctggccacatcccacaccctctttctccgcgagcataaccggctggccagagaactaaagagactcaaccctcagtgggatggagagaagctctaccaggaagcccggaaaatcctgggagccttcgtgcagattatcacctttagggactacctacccattttgctaggtgaccacatgcagaagtggatacccccatatcaaggctacagtgaatctgtggatcccagaatttccaatgtcttcaccttcgccttccgctttggccacttggaggtcccctctagtatgttccgcctggatgagaattatcagccatgggggccagaaccagaactccccctccacaccctcttcttcaacacttggaggatggtcaaagatggtggaattgatcctctggtgcggggcctgctggccaagaaatccaagctgatgaaacagaataaaatgatgactggagagctgcgcaacaagcttttccagccaactcacaggatccatggctttgacctggctgccatcaacacacagcgttgccgggaccatgggcaacctgggtacaattcctggagagccttctgtgacctctcacagccgcagacactagaggagttgaacacagtgctgaagagcaagatgctggccaagaagttactgggtctctacgggacccctgacaacatcgacatctggataggggccattgctgagccgctggtggaaaggggtcgggtggggcctctcctggcctgcctcttgggcaagcagttccagcagatccgtgatggagacaggttctggtgggaaaaccctggggtcttcacgaacgagcagaaggactctctacagaaaatgtccttctcacgccttgtctgtgacaacacccgcatcaccaaggtcccacgggacccattctgggccaacagctacccctatgacttcgtggattgctcagccatcgacaagctggacctgtcaccctgggcctcagtgaagaattaggggcccgcgctgcacaggaaagttccctttggtccacagggccatttcaagcaagttcaatgacctggtcccttagagctccatatcccagtcccagcccttctttgcagctgggcctctctatacccctggatgaacagcttgctcaggccccagggtggctgcctcggccctcccagctcttacactcagctccagtggcttctcctttctgtcaagacttagccccgctgagatgcccttctgctccagcttgctggatgttacctgtcctcttccctccacaagtcttggcccttaacctttatctttcttcctgtcctctcacctagattgtaagctccctgggccaggacttcagcctgcctccgagggtcccctgtggcacctagcatggtgcacagcacattagaagtgctcaaaaacatctgatgactgactaaagatgctaggcgtgacaccgttccctccaaaagcagacctcggaatcactgccaaataagtaactagacgtttacaggcc

SEQ ID NO: 162367 - DNA, 2350 bp, Artificial Sequence
  derived and/or modified sequence
gctaagcctcagcgtctcctccaagccacatcaaaatctttccttctgggcctttcccagaagtgaattcttgctggaaggtataaaagaccagctcctccaagcagagcaactccctggctgccgtgaaaagacaaggcactgggcagtgatgagggtccttctccatctcccagccctcctggcttccctcatcttgcttcaggctgcagcatctaccacaagaggctgaagaccgccatgagctctgagactcccaccagccgacagctctcagaatacctcaagcatgccaaaggccggacgcgcacagccatccgcaatggacaggtgtgggaggagtctttaaagagactgaggcagaaggcatccttgaccaatgtcacagatcccagcctggacttgacttcactgtctctggaggtgggctgtggtgctcctgctcccgtggtgagatgcgacccgtgcagcccttaccgcaccattacgggagactgcaataacaggaggaagcctgcgctgggcgccgccaacagggctctggcgcgctggctgcccgcggagtacgaggacgggctctccctgcccttcggctggacgccggggaagacgcgcaacggcttccctctcccgctggcccgggaggtatctaacaagattgttggctatctgaatgaggagggtgttctggaccaaaacaggtccctgctcttcatgcagtggggtcagattgtggatcatgacctggactttgcccctgacaccgagctggggagtagcgagtactccaaagcccagtgtgatgagtactgtatccagggagacaactgcttccccatcatgttcccacccaatgaccccaaggcggggactcaagggaaatgcatgcctttcttccgagctgggttcgtctgccccactccaccctacaagtccctggcccgagagcagatcaacgctctgacctccttcctggatgccagctttgtgtacagctccgagccaagcctggccagccgcctccgcaacctcagcagccccctgggcctcatggctgtcaaccaggaggtctcagaccatggactaccctacctgccctatgacagcaagaagccaagcccctgtgagttcatcaacaccactgcccgtgtgccctgcttcctggcaggagattctcgagcctcagagcatattctgctggccacatcccacaccctctttctccgcgagcataaccggctggccagagaactaaagagactcaaccctcagtgggatggagagaagctctaccaggaagcccggaaaatcctgggagccttcgtgcagattatcacctttagggactacctacccattttgctaggtgaccacatgcagaagtggatacccccatatcaaggctacagtgaatctgtggatcccagaatttccaatgtcttcaccttcgccttccgctttggccacttggaggtcccctctagtatgttccgcctggatgagaattatcagccatgggggccagaaccagaactccccctccacaccctcttcttcaacacttggaggatggtcaaagatggtggaattgatcctctggtgcggggcctgctggccaagaaatccaagctgatgaaacagaataaaatgatgactggagagctgcgcaacaagcttttccagccaactcacaggatccatggctttgacctggctgccatcaacacacagcgttgccgggaccatgggcaacctgggtacaattcctggagagccttctgtgacctctcacagccgcagacactagaggagttgaacacagtgctgaagagcaagatgctggccaagaagttactgggtctctacgggacccctgacaacatcgacatctggataggggccattgctgagccgctggtggaaaggggtcgggtggggcctctcctggcctgcctcttgggcaagcagttccagcagatccgtgatggagacaggttctggtgggaaaaccctggggtcttcacgaacgagcagaaggactctctacagaaaatgtccttctcacgccttgtctgtgacaacacccgcatcaccaaggtcccacgggacccattctgggccaacagctacccctatgacttcgtggattgctcagccatcgacaagctggacctgtcaccctgggcctcagtgaagaattaggggcccgcgctgcacaggaaagttccctttggtccacagggccatttcaagcaagttcaatgacctggtcccttagagctccatatcccagtcccagcccttctttgcagctgggcctctctatacccctggatgaacagcttgctca

SEQ ID NO: 162368 - DNA, 2139 bp, Artificial Sequence
  derived and/or modified sequence
atgagggtgctgctgcacctgcctgccctgctggccagcctcatcctgctgcaggccgccgccagcaccacccgggcccagaccaccaggaccagcgccatcagtgacacagtgtcccaggccaaggtgcaggtgaacaaggccttcctggacagcaggacccggctgaagacagccatgagcagcgagacccccaccagccggcagctgtctgagtacctgaagcacgccaagggccgcaccaggacagccatcagaaatggccaggtgtgggaggagagcctgaagaggctgcggcagaaggccagcctgaccaacgtgacagaccccagcctggacctgaccagcctgagcctggaggtgggctgtggggccccagcccctgtggtgcgctgtgacccctgcagcccctaccgcaccatcaccggggactgcaacaacagaaggaagccagccctgggcgccgccaacagagccctggcccgctggctgcctgcagaatatgaagatggcctgagcctgcccttcggctggacccctgggaagaccagaaatggcttccccctgcccctggcccgggaggtgagcaacaagatcgtgggctacctgaatgaggagggcgtgctggaccagaacagaagcctgctcttcatgcagtggggccagatcgtggaccatgacctggactttgccccagacacagagctgggcagcagcgagtacagcaaggcccagtgtgatgagtactgcatccagggcgacaactgcttccccatcatgttccccccaaatgaccccaaggccggcacccagggcaagtgcatgcccttcttccgggccggctttgtgtgccccaccccaccctacaagagcctggcccgggagcagatcaatgccctgaccagcttcctggatgccagctttgtgtacagcagcgagcccagcctggccagccggctgaggaacctgagcagccccctgggcctgatggctgtgaaccaggaggtgtctgaccacggcctgccctacctgccctatgacagcaagaagcccagcccctgtgagttcatcaacaccacagcccgggtgccctgcttcctggccggggacagccgggccagcgagcacatcctgctggccaccagccacaccctcttcctgcgggagcacaaccggctggcccgggagctgaagaggctgaacccccagtgggatggagagaagctgtaccaggaggccaggaagatcctgggcgcctttgtgcagatcatcaccttccgggactacctgcccatcctgctgggggaccacatgcagaagtggatccccccctaccagggctacagcgagagcgtggacccccgcatcagcaatgtgttcacctttgccttccgcttcggccacctggaggtgcccagctccatgttccggctggatgagaactaccagccctggggccctgagcctgagctgcccctgcacaccctcttcttcaacacctggaggatggtgaaggatggcggcatcgaccccctggtgcggggcctgctggccaagaagagcaagctgatgaagcagaacaagatgatgactggagagctgaggaacaagctgttccagcccacccaccgcatccacggctttgacctggccgccatcaacacccagcgctgccgggaccacggccagcccggctacaacagctggagggccttctgtgacctgagccagccccagaccctggaggagctgaacacagtgctgaagagcaagatgctggccaagaagctgctgggcctgtatggcaccccagacaacatcgacatctggattggagccatcgccgagcccctggtggagcggggccgggtgggccccctgctggcctgcctgctgggcaagcagttccagcagatcagagatggagaccgcttctggtgggagaaccctggggtcttcaccaatgagcagaaggacagcctgcagaagatgtccttcagccggctggtgtgtgacaacacccgcatcaccaaggtgccccgggaccccttctgggccaacagctacccctatgactttgtggactgcagcgccatcgacaagctggacctgagcccctgggcctctgtgaagaactag

SEQ ID NO: 162369 - DNA, 1962 bp, Artificial Sequence
  derived and/or modified sequence
atgagcagcgagacccccaccagccggcagctgtctgagtacctgaagcacgccaagggccgcaccaggacagccatcagaaatggccaggtgtgggaggagagcctgaagaggctgcggcagaaggccagcctgaccaacgtgacagaccccagcctggacctgaccagcctgagcctggaggtgggctgtggggccccagcccctgtggtgcgctgtgacccctgcagcccctaccgcaccatcactggagactgcaacaacagaaggaagccagccctgggcgccgccaacagagccctggcccgctggctgcctgcagaatatgaagatggcctgagcctgcccttcggctggaccccaggcaagaccagaaatggcttccccctgcccctggcccgggaggtgagcaacaagatcgtgggctacctgaatgaggagggcgtgctggaccagaacagaagcctgctcttcatgcagtggggccagatcgtggaccatgacctggactttgccccagacacagagctgggcagcagcgagtacagcaaggcccagtgtgatgagtactgcatccagggcgacaactgcttccccatcatgtttcctccaaatgaccccaaggccggcacccagggcaagtgcatgcccttcttccgggccggctttgtgtgccccaccccaccctacaagagcctggcccgggagcagatcaatgccctgaccagcttcctggatgccagctttgtgtacagcagcgagcccagcctggccagccggctgaggaacctgagcagccccctgggcctgatggctgtgaaccaggaggtgtctgaccacggcctgccctacctgccctatgacagcaagaagcccagcccctgtgagttcatcaacaccacagcccgggtgccctgcttcctggccggggacagccgggccagcgagcacatcctgctggccaccagccacaccctcttcctgcgggagcacaaccggctggcccgggagctgaagaggctgaacccccagtgggatggagagaagctgtaccaggaggccaggaagatcctgggcgcctttgtgcagatcatcaccttccgggactacctgcccatcctgctgggggaccacatgcagaagtggatccccccctaccagggctacagcgagagcgtggacccccgcatcagcaatgtgttcacctttgccttccgcttcggccacctggaggtgcccagctccatgttccggctggatgagaactaccagccctggggccctgagcctgagctgcccctgcacaccctcttcttcaacacctggaggatggtgaaggatggcggcatcgaccccctggtgcggggcctgctggccaagaagagcaagctgatgaagcagaacaagatgatgaccggggagctgaggaacaagctgttccagcccacccaccgcatccacggctttgacctggccgccatcaacacccagcgctgccgggaccacggccagcccggctacaacagctggagggccttctgtgacctgagccagccccagaccctggaggagctgaacacagtgctgaagagcaagatgctggccaagaagctgctgggcctgtatggcaccccagacaacatcgacatctggattggagccatcgccgagcccctggtggagcggggccgggtgggccccctgctggcctgcctgctgggcaagcagttccagcagatcagagatggagaccgcttctggtgggagaaccctggggtcttcaccaatgagcagaaggacagcctgcagaagatgtccttcagccggctggtgtgtgacaacacccgcatcaccaaggtgccccgggaccccttctgggccaacagctacccctatgactttgtggactgcagcgccatcgacaagctggacctgagcccctgggcctctgtgaagaactag

SEQ ID NO: 162370 - DNA, 2139 bp, Artificial Sequence
  derived and/or modified sequence
atgcgggtgctgctgcacctgcccgccctgctggccagcctgatccttctccaagccgccgcatctacgacaagagcccagacgacacgcacctccgccatatccgacactgtgtcgcaggcaaaagtgcaagtgaacaaggcctttctggattccaggactcggctgaagacagctatgtccagcgaaacgcccacgtcgcggcagttgagcgaatacctcaagcatgcaaagggacgcacacgtacagctattagaaacggacaggtgtgggaggagtcactaaagaggcttagacagaaggcttccctgactaatgtgactgatcccagtctcgacttgacctcgctttcactggaggtgggatgcggtgcgccagctcctgtagtccgctgcgacccctgctctccttacaggactatcacaggagattgcaacaaccgccgcaaaccagctcttggcgccgcgaaccgggcgcttgcccggtggctgcccgccgagtatgaggacggcttgtccctccctttcgggtggaccccaggcaagacacggaatggatttccactgcccctggccagagaggtgagcaataagatcgtgggctacctgaacgaagaaggagttcttgatcaaaatagatcactcctgtttatgcaatggggtcaaatagtggatcacgatcttgattttgcacccgacaccgagctcggaagctctgaatacagcaaagcccagtgcgatgagtactgcattcagggcgacaattgctttcctatcatgtttccgcccaacgacccaaaggcgggaacccaggggaaatgcatgccattcttccgtgctgggtttgtgtgtccgactccgccatacaagagtctggcaagagagcagatcaacgccctgacctccttccttgacgcgtcatttgtatactcgtcagaaccaagcctggcaagccggctcaggaatctatcatcacctcttggcctgatggccgtaaatcaggaagtctctgatcacggcctcccttacctcccttacgacagcaagaagccttcaccctgtgaattcataaacacaacagccagggtgccatgctttttggcaggggatagtcgcgcctccgagcacatcctacttgcaacttcccataccctgtttctccgggaacataatagactggcacgggagctcaagcggctgaatccacaatgggacggcgagaaactgtatcaggaagcacgaaaaatactcggagcatttgtacaaatcataacttttcgggactatctgccgatcctgcttggggatcatatgcaaaaatggatcccaccataccaggggtattccgaaagcgtagatcctaggatctcaaacgtgttcacatttgcattccggttcggtcatctggaggtgccaagtagcatgttcaggctggacgagaattaccagccctggggtcccgagcctgaattacctttacataccctttttttcaacacttggagaatggtcaaggacgggggtatcgatcccctcgtccgtggacttctggccaagaagtccaagctcatgaaacaaaataagatgatgaccggagagcttaggaataaactctttcagcctacgcatcgcatccacggctttgatctggccgctataaatactcagcgttgccgggatcacggacagcccggttataactcctggcgggccttttgtgatttgtcccagccccaaaccctggaagaactcaacactgtgctgaagtccaagatgttggccaagaagttactgggcctgtatggcactcccgacaacatcgatatatggattggggctattgcagagcctttagtggagcgaggtcgtgtgggtcccctcctggcctgtttattaggtaaacagttccagcaaattagggacggcgatcgcttctggtgggaaaatcccggagtgttcacaaatgagcagaaggattccctgcaaaagatgtcattctcacggctcgtttgtgataacacacggataaccaaagtccctagggaccccttctgggcaaactcctacccctacgactttgtggattgcagcgcaatagacaaactggatctgagcccttgggcctcagtcaagaactag

SEQ ID NO: 162371 - DNA, 1962 bp, Artificial Sequence
  derived and/or modified sequence
atgagcagcgagacccccaccagccggcagctgagcgagtacctgaagcatgcaaagggccgcacacggaccgcaatccgtaatgggcaagtatgggaggagtctctgaagcggctccggcagaaagcctcactcacgaatgtcaccgatcccagtcttgatctgacatctctttcactggaagttgggtgtggcgctcctgcgcccgtagtgcgctgtgacccatgttccccttacagaacaatcaccggagattgcaataacagacgcaaaccagccctgggcgctgcgaaccgggctctagcccgctggttgccagccgaatacgaagatggacttagtctgcccttcgggtggaccccggggaagactcggaatggatttcccctgccactggccagagaagtcagcaataagatcgttgggtacctgaatgaggagggggtgctcgaccagaatcgctcactgcttttcatgcagtggggacagatcgtagatcatgacttagatttcgctccagacacagaactggggtcttcagagtacagcaaagcacaatgtgacgagtattgtattcagggggacaactgtttccccatcatgtttcctcccaacgatcccaaggccgggacacagggcaaatgcatgcccttctttcgggccgggttcgtgtgtccgacccccccttataagagtctcgcccgcgaacagatcaacgccctgacctcgttcctggatgctagctttgtctactcatcagagccatcacttgcatcacgcctgaggaatctctcatcccccctgggattaatggctgtcaaccaagaggtatccgaccatggactgccctacttaccatacgactctaagaaaccatccccttgtgaattcattaataccaccgctcgcgtgccttgtttcctggccggagacagccgggcaagtgagcatattctgttggctacctctcataccctgttcctgagagaacataatcgcctagcaagagagctcaagaggctcaacccacaatgggacggggagaagctatatcaggaagctcgcaagatcttgggagcctttgtgcaaattattacatttcgagattacttgccgatccttctcggagaccatatgcagaagtggatcccaccttatcagggctattccgaaagtgtagaccctagaattagcaacgtgtttacctttgccttcagatttgggcatctagaggtcccatcttctatgttccggctggatgagaattatcagccctggggccctgagccagaactgcctctgcacacactatttttcaatacttggcggatggtgaaagacgggggtatcgatccccttgtgaggggcctgttagccaagaagtctaaattaatgaagcagaataagatgatgacaggagagctaaggaataagctgttccagccaacacacagaatccacggatttgacctcgccgcaatcaacacacagcgatgtcgagaccacgggcagcccggatacaactcatggcgcgccttttgcgatctgagccagccccagacattggaagaattaaacacagtgctaaaaagcaaaatgctggccaagaagctgcttggtctatatgggacacctgataacatcgacatatggatcggagctattgctgaaccactagtggagagaggccgagtggggccacttctggcttgcctattgggaaagcaattccagcagattagggatggcgataggttttggtgggagaacccaggtgtgtttacaaatgagcagaaggatagtcttcagaagatgtcattttctcgattggtctgtgataacacacggatcaccaaggtccctagagaccccttttgggccaattcatacccatacgattttgtcgactgttccgcaatcgataagctggaccttagcccttgggcttctgtcaagaactag

SEQ ID NO: 162372 - DNA, 2139 bp, Artificial Sequence
  derived and/or modified sequence
atgcgcgttttgctgcacctaccggctcttctggcttctctgatcctgctgcaagctgcagcaagtaccactagggctcagaccacgagaacatctgccattagtgacacagtgtcccaggccaaggtccaggtgaacaaggcctttcttgatagccgtacccggttaaagacagctatgagtagcgagacacccacctcgcgtcagctgagcgagtacttaaaacacgctaagggtcggaccagaactgccatccgtaacggacaggtgtgggaagagagcttaaaacgcctgcgtcaaaaagccagtctgaccaacgtaactgacccttcactcgacctcacgagcctgagcctggaagtagggtgtggggctccagcgccagtagtccgctgcgatccctgcagtccatatcgaaccatcactggtgactgcaataaccggagaaagccagctctcggagctgccaatagggctctggcccgatggctcccagccgagtacgaggacggacttagcttgccttttggctggacacccggaaagacccggaatggatttcctttgcctctcgcccgtgaggtgagcaacaaaatagtggggtacctaaacgaggagggcgtgttagaccaaaaccggagcctgctctttatgcaatggggccagattgtcgaccacgatctggattttgcccctgataccgagcttggctcaagtgaatatagtaaggcccagtgtgatgaatactgtatccaaggagacaactgttttccgatcatgtttccaccaaacgaccctaaagcagggacccagggtaaatgtatgccttttttccgcgctggcttcgtttgtccgacgcccccttataagagtctcgcaagagagcaaattaacgcactcaccagtttcctggacgcttcatttgtatactctagcgagccatctcttgcttctcgcctcaggaatttaagctctccactcggactcatggcagtgaaccaggaagtgtctgaccatggccttccatatctgccttacgattccaaaaagccaagtccctgtgagtttatcaatactaccgcacgcgtcccttgttttctggcaggtgattccagggcctccgaacacatcctgctcgcgacctcacataccctgttcctccgggagcacaatcgcctcgctagagaactgaaacgcctcaacccccagtgggacggagagaagctttaccaggaggcacgtaaaatcctgggggcatttgtccagataatcacgttccgggactatctgcccattttactgggcgatcacatgcaaaagtggataccaccttatcagggctatagcgagtctgttgatcccagaatatctaatgtgtttacgtttgctttccgattcggccacctggaagtgccaagctccatgttcaggctggatgagaattatcagccatgggggcctgagcctgagctgccgctgcacaccttgttctttaacacttggcggatggtgaaggatggtggaatcgacccattagtaagagggctgctggcaaagaagtcgaagttgatgaaacagaacaaaatgatgacaggagagctgcggaacaaactgttccagccaacacatcgtatccacggtttcgatctcgcagccatcaacactcagcgctgtagagatcatggtcagccaggctacaattcctggcgggctttttgtgacctgtctcagccccaaaccctagaggaactgaataccgtgctgaagtcgaagatgcttgctaagaagctcctgggcctgtatggaactccagacaacatcgacatatggataggagccatcgctgagcctctggttgagcggggtcgcgtcggccctctcctcgcctgtctgctgggcaaacagttccaacagatacgcgacggtgacagattctggtgggagaacccaggcgttttcacaaatgagcagaaggacagcctgcaaaaaatgtccttcagcaggctcgtctgcgacaacacccggataaccaaggtaccaagggatcccttttgggcaaattcgtatccatatgacttcgttgattgttccgccattgacaagctggatctcagcccatgggccagtgtgaaaaactag

SEQ ID NO: 162373 - DNA, 1962 bp, Artificial Sequence
  derived and/or modified sequence
atgagtagcgagaccccaacctctagacaacttagtgaatatctcaaacatgcgaagggtcggactagaaccgcaatccggaacgggcaggtctgggaggagtccctcaaaaggctccgccagaaggcgtctttgactaacgtcaccgacccctctctggacctaaccagtctgagtttggaagtgggatgcggtgccccagctcccgtcgtgcggtgcgatccttgctcaccttaccgcaccattactggcgattgcaacaatagacgaaagccggctcttggggctgctaatagagccctggctcgctggctgcccgctgaatacgaggatggattgtccctaccattcggctggacccctggaaagacccgaaacggatttccattgccgctggcacgcgaggtcagtaacaaaatcgtgggttatctgaacgaggagggggtactggatcagaatagaagtttgctgtttatgcaatggggccaaatcgtggatcatgacctggacttcgcccctgacacagagctgggcagttctgaatacagtaaggcccagtgtgatgaatattgtattcagggggacaactgcttccctattatgttccccccaaacgaccccaaagccggtacccaggggaaatgcatgcccttttttcgggctggatttgtgtgtcccacccctccatataagagcctggccagggagcagatcaacgcactgacatcctttctggatgcatcattcgtttacagcagtgaaccaagtctcgcgagtaggcttcgcaacctatccagcccactcggcctcatggccgtgaaccaggaggtcagtgatcacggcctgccgtaccttccctacgattcaaaaaagccgtccccatgcgaatttataaatactacagctagagtgccctgttttttggcgggagactcgagggccagtgagcatatcctcctggccacctctcataccttgtttctccgggagcacaacaggctcgcgcgagaactgaagaggttgaatccccagtgggacggggagaagctttaccaggaggccagaaagattctcggggctttcgtccagattatcactttccgggattatctgcccattttactgggggaccacatgcagaaatggattcctccataccaggggtactcagagtccgtagatccccgaattagtaacgtatttacatttgcattccggttcggccatctggaggtgcctagttccatgtttagactagacgagaactatcaaccatggggccctgaacccgagcttccattgcataccctgttctttaacacttggagaatggtcaaagacggcggaattgatcccctggtcaggggactcttggcaaagaagtctaaactaatgaagcaaaataaaatgatgaccggtgaactgcgcaataaactgtttcaaccaactcaccgaattcacggcttcgaccttgctgcgattaacacacaaaggtgcagagatcacgggcagcccggttacaactcatggcgggcattctgtgatctgtctcaacctcagactctggaagaacttaatacagtgctgaagtccaaaatgctggccaagaaattactgggattgtacggcaccccagataacatagatatttggatcggtgcaatcgctgagcccctcgtcgaaagaggccgtgtcgggccactcttggcttgtctgttgggcaagcaattccaacagatccgggatggtgataggttttggtgggagaatccaggtgtcttcacaaacgagcagaaagattctctgcagaagatgtccttctccagactagtgtgtgacaacacaagaatcacaaaagtccccagagatccattctgggcaaattcttacccctacgacttcgtagactgcagcgccattgataagctggatctctccccatgggcatccgtcaagaactag

SEQ ID NO: 162374 - DNA, 2139 bp, Artificial Sequence
  derived and/or modified sequence
atgagagtgctgctgcacctgcccgccctgctggccagcctgatcctgctgcaggccgccgccagcaccaccagagcccagaccaccagaaccagcgccatcagcgacaccgtgagccaggccaaggtgcaggtgaacaaggccttcctggacagcagaaccagactgaagaccgccatgagcagcgagacccccaccagcagacagctgagcgagtacctgaagcacgccaagggcagaaccagaaccgccatcagaaacggccaggtgtgggaggagagcctgaagagactgagacagaaggccagcctgaccaacgtgaccgaccccagcctggacctgaccagcctgagcctggaggtgggctgcggcgcccccgcccccgtggtgagatgcgacccctgcagcccctacagaaccatcaccggcgactgcaacaacagaagaaagcccgccctgggcgccgccaacagagccctggccagatggctgcccgccgagtacgaggacggcctgagcctgcccttcggctggacccccggcaagaccagaaacggcttccccctgcccctggccagagaggtgagcaacaagatcgtgggctacctgaacgaggagggcgtgctggaccagaacagaagcctgctgttcatgcagtggggccagatcgtggaccacgacctggacttcgcccccgacaccgagctgggcagcagcgagtacagcaaggcccagtgcgacgagtactgcatccagggcgacaactgcttccccatcatgttcccccccaacgaccccaaggccggcacccagggcaagtgcatgcccttcttcagagccggcttcgtgtgccccacccccccctacaagagcctggccagagagcagatcaacgccctgaccagcttcctggacgccagcttcgtgtacagcagcgagcccagcctggccagcagactgagaaacctgagcagccccctgggcctgatggccgtgaaccaggaggtgagcgaccacggcctgccctacctgccctacgacagcaagaagcccagcccctgcgagttcatcaacaccaccgccagagtgccctgcttcctggccggcgacagcagagccagcgagcacatcctgctggccaccagccacaccctgttcctgagagagcacaacagactggccagagagctgaagagactgaacccccagtgggacggcgagaagctgtaccaggaggccagaaagatcctgggcgccttcgtgcagatcatcaccttcagagactacctgcccatcctgctgggcgaccacatgcagaagtggatccccccctaccagggctacagcgagagcgtggaccccagaatcagcaacgtgttcaccttcgccttcagattcggccacctggaggtgcccagcagcatgttcagactggacgagaactaccagccctggggccccgagcccgagctgcccctgcacaccctgttcttcaacacctggagaatggtgaaggacggcggcatcgaccccctggtgagaggcctgctggccaagaagagcaagctgatgaagcagaacaagatgatgaccggcgagctgagaaacaagctgttccagcccacccacagaatccacggcttcgacctggccgccatcaacacccagagatgcagagaccacggccagcccggctacaacagctggagagccttctgcgacctgagccagccccagaccctggaggagctgaacaccgtgctgaagagcaagatgctggccaagaagctgctgggcctgtacggcacccccgacaacatcgacatctggatcggcgccatcgccgagcccctggtggagagaggcagagtgggccccctgctggcctgcctgctgggcaagcagttccagcagatcagagacggcgacagattctggtgggagaaccccggcgtgttcaccaacgagcagaaggacagcctgcagaagatgagcttcagcagactggtgtgcgacaacaccagaatcaccaaggtgcccagagaccccttctgggccaacagctacccctacgacttcgtggactgcagcgccatcgacaagctggacctgagcccctgggccagcgtgaagaactag

SEQ ID NO: 162375 - DNA, 1962 bp, Artificial Sequence
  derived and/or modified sequence
atgagcagcgagacccccaccagcagacagctgagcgagtacctgaagcacgccaagggcagaaccagaaccgccatcagaaacggccaggtgtgggaggagagcctgaagagactgagacagaaggccagcctgaccaacgtgaccgaccccagcctggacctgaccagcctgagcctggaggtgggctgcggcgcccccgcccccgtggtgagatgcgacccctgcagcccctacagaaccatcaccggcgactgcaacaacagaagaaagcccgccctgggcgccgccaacagagccctggccagatggctgcccgccgagtacgaggacggcctgagcctgcccttcggctggacccccggcaagaccagaaacggcttccccctgcccctggccagagaggtgagcaacaagatcgtgggctacctgaacgaggagggcgtgctggaccagaacagaagcctgctgttcatgcagtggggccagatcgtggaccacgacctggacttcgcccccgacaccgagctgggcagcagcgagtacagcaaggcccagtgcgacgagtactgcatccagggcgacaactgcttccccatcatgttcccccccaacgaccccaaggccggcacccagggcaagtgcatgcccttcttcagagccggcttcgtgtgccccacccccccctacaagagcctggccagagagcagatcaacgccctgaccagcttcctggacgccagcttcgtgtacagcagcgagcccagcctggccagcagactgagaaacctgagcagccccctgggcctgatggccgtgaaccaggaggtgagcgaccacggcctgccctacctgccctacgacagcaagaagcccagcccctgcgagttcatcaacaccaccgccagagtgccctgcttcctggccggcgacagcagagccagcgagcacatcctgctggccaccagccacaccctgttcctgagagagcacaacagactggccagagagctgaagagactgaacccccagtgggacggcgagaagctgtaccaggaggccagaaagatcctgggcgccttcgtgcagatcatcaccttcagagactacctgcccatcctgctgggcgaccacatgcagaagtggatccccccctaccagggctacagcgagagcgtggaccccagaatcagcaacgtgttcaccttcgccttcagattcggccacctggaggtgcccagcagcatgttcagactggacgagaactaccagccctggggccccgagcccgagctgcccctgcacaccctgttcttcaacacctggagaatggtgaaggacggcggcatcgaccccctggtgagaggcctgctggccaagaagagcaagctgatgaagcagaacaagatgatgaccggcgagctgagaaacaagctgttccagcccacccacagaatccacggcttcgacctggccgccatcaacacccagagatgcagagaccacggccagcccggctacaacagctggagagccttctgcgacctgagccagccccagaccctggaggagctgaacaccgtgctgaagagcaagatgctggccaagaagctgctgggcctgtacggcacccccgacaacatcgacatctggatcggcgccatcgccgagcccctggtggagagaggcagagtgggccccctgctggcctgcctgctgggcaagcagttccagcagatcagagacggcgacagattctggtgggagaaccccggcgtgttcaccaacgagcagaaggacagcctgcagaagatgagcttcagcagactggtgtgcgacaacaccagaatcaccaaggtgcccagagaccccttctgggccaacagctacccctacgacttcgtggactgcagcgccatcgacaagctggacctgagcccctgggccagcgtgaagaactag

SEQ ID NO: 162376 - protein, 499 aa, Artificial Sequence
  derived and/or modified sequence
MNDDPSMEENGVERVCPESLLQSREYSSLPLPRHTSSTDGTITSSDPGLEILNMASCDLDRNSLCKKEEDTRSASPTIEAQGTSPAHDNIAFQDSTSKDKTILNLEAKEEPETIEEHKKEHASGDSVVSPLPVTTVKSVNLRQSENTSANEKEVEAEFLRLSLGFKCDWFTLEKRVKLEERSRDLAEENLKKEITNCLKLLESLTPLCEDDNQAQEIIKKLEKSIKFLSQCAARVASRAEMLGAINQESRVSKAVEVMIQHVENLKRMYAKEHAELEELKQVLLQNERSFNPLEDDDDCQIKKRSASLNSKPSSLRRVTIASLPRNIGNAGMVAGMENNDRFSRRSSSWRILGSKQSEHRPSLPRFISTYSWADAEEEKCELKTKDDSEPSGEETVERTRKPSLSEKKNNPSKWDVSSVYDTIASWATNLKSSIRKANKALWLSIAFIVLFAALMSFLTGQLFQKSVDAAPTQQEDSWTSLEHILWPFTRLRHNGPPPV

SEQ ID NO: 162377 - protein, 77 aa, Artificial Sequence
  derived and/or modified sequence
MNDDPSMEENGVERVCPESLLQSREYSSLPLPRHTSSTDGTITSSDPGLEILNMASCDLDRNSLCKKEEDTRSASPT

SEQ ID NO: 162378 - DNA, 1500 bp, Artificial Sequence
  derived and/or modified sequence
atgaacgacgaccccagcatggaggagaacggcgtggagagagtgtgccccgagagcctgctgcagagcagagagtacagcagcctgcccctgcccagacacaccagcagcaccgacggcaccatcaccagcagcgaccccggcctggagatcctgaacatggccagctgcgacctggacagaaacagcctgtgcaagaaggaggaggacaccagaagcgccagccccaccatcgaggcccagggcaccagccccgcccacgacaacatcgccttccaggacagcaccagcaaggacaagaccatcctgaacctggaggccaaggaggagcccgagaccatcgaggagcacaagaaggagcacgccagcggcgacagcgtggtgagccccctgcccgtgaccaccgtgaagagcgtgaacctgagacagagcgagaacaccagcgccaacgagaaggaggtggaggccgagttcctgagactgagcctgggcttcaagtgcgactggttcaccctggagaagagagtgaagctggaggagagaagcagagacctggccgaggagaacctgaagaaggagatcaccaactgcctgaagctgctggagagcctgacccccctgtgcgaggacgacaaccaggcccaggagatcatcaagaagctggagaagagcatcaagttcctgagccagtgcgccgccagagtggccagcagagccgagatgctgggcgccatcaaccaggagagcagagtgagcaaggccgtggaggtgatgatccagcacgtggagaacctgaagagaatgtacgccaaggagcacgccgagctggaggagctgaagcaggtgctgctgcagaacgagagaagcttcaaccccctggaggacgacgacgactgccagatcaagaagagaagcgccagcctgaacagcaagcccagcagcctgagaagagtgaccatcgccagcctgcccagaaacatcggcaacgccggcatggtggccggcatggagaacaacgacagattcagcagaagaagcagcagctggagaatcctgggcagcaagcagagcgagcacagacccagcctgcccagattcatcagcacctacagctgggccgacgccgaggaggagaagtgcgagctgaagaccaaggacgacagcgagcccagcggcgaggagaccgtggagagaaccagaaagcccagcctgagcgagaagaagaacaaccccagcaagtgggacgtgagcagcgtgtacgacaccatcgccagctgggccaccaacctgaagagcagcatcagaaaggccaacaaggccctgtggctgagcatcgccttcatcgtgctgttcgccgccctgatgagcttcctgaccggccagctgttccagaagagcgtggacgccgcccccacccagcaggaggacagctggaccagcctggagcacatcctgtggcccttcaccagactgagacacaacggccccccccccgtgtag

SEQ ID NO: 162379 - DNA, 234 bp, Artificial Sequence
  derived and/or modified sequence
atgaacgacgaccccagcatggaggagaacggcgtggagagagtgtgccccgagagcctgctgcagagcagagagtacagcagcctgcccctgcccagacacaccagcagcaccgacggcaccatcaccagcagcgaccccggcctggagatcctgaacatggccagctgcgacctggacagaaacagcctgtgcaagaaggaggaggacaccagaagcgccagccccacctag

SEQ ID NO: 162380 - DNA, 1500 bp, Artificial Sequence
  derived and/or modified sequence
atgaatgacgaccccagcatggaggagaacggggtggagcgagtttgtcctgagagtttgctacagtccagagaatactcctcgttgcctctacctagacacacctctagtacagatggaacgattacttcatccgatcccgggttagagatccttaatatggcgagttgcgatctggaccgaaatagtctctgcaagaaggaagaggataccaggtccgccagccccactatcgaagcacagggcacttcaccagctcacgataacattgcattccaggactctacaagcaaggacaaaacaatacttaacttagaggctaaggaagaacccgagaccatcgaggagcacaaaaaggagcacgcttctggggacagtgtggtttcccccctgccggttaccactgtaaagtcagtgaacctgcgccagagtgaaaatacctccgccaacgaaaaggaggtggaagccgaattccttagactgagtcttgggtttaaatgcgattggtttacgctggagaagcgtgtgaagctggaggagagaagcagagacttagccgaggagaatctgaaaaaagagatcactaactgcctgaaattgctggaaagtctgacccccttgtgcgaggatgacaaccaagcacaggagatcatcaagaaactcgagaagagcatcaaattcctaagtcagtgcgccgccagggtggccagcagggcggagatgttaggagctattaatcaggagtctagagtcagcaaagcagttgaggtgatgatccagcatgtggaaaatctcaaaagaatgtacgccaaggaacacgccgagctagaggagctcaaacaggtgctgcttcagaatgagcggagctttaatcccctggaggacgatgacgattgtcagatcaaaaagcggtctgctagcctcaactccaaaccttcgagcttgcgtcgggtgacaattgctagcctccctcgtaacattggtaatgcagggatggttgcgggtatggaaaataacgacaggttctcaaggcggtctagcagctggcgaattctaggcagcaagcagagcgagcatagaccctctctcccccggttcatttcaacatacagttgggctgatgccgaagaggagaaatgtgaactgaaaacaaaagacgactcagagcctagtggtgaggagaccgtcgaaagaacccgaaaaccttccttgagcgaaaagaaaaacaacccctccaagtgggatgtgagttctgtgtatgacacgatcgcttcttgggctacgaatctgaaaagttctattagaaaggcaaataaagctctttggttatctattgcctttatcgtgctatttgccgcactgatgtcttttctgaccgggcagctcttccaaaagtcggtcgatgcagctccaacccaacaagaggatagctggaccagtctcgaacatatcctgtggccgtttacaaggctgaggcataacgggccaccacccgtttag

SEQ ID NO: 162381 - DNA, 1500 bp, Artificial Sequence
  derived and/or modified sequence
atgaacgatgaccccagcatggaagagaatggcgtggagagggtgtgccctgaatctttactccagagccgggagtactcaagcctgccccttcctcgccatacttccagtaccgacggcaccattacttccagcgatcctggcctcgagatcctcaacatggcgagctgcgatttggaccgcaattctctctgcaagaaggaggaagatactcgctccgcatccccaactatcgaggcacagggtaccagcccagctcacgacaatattgcattccaggacagcacttcaaaggataaaacaattctgaatctggaggctaaggaagagcccgagactattgaagagcacaagaaggagcacgctagcggagactccgtcgtcagtccactacctgtcactaccgtgaagagcgtcaatcttcgacagagcgaaaataccagtgcaaacgagaaagaggtggaggccgaattcctccgactgtccttagggttcaagtgtgactggttcaccctggagaagcgggtcaaactcgaagaaagatctagagatttggcagaggagaatctgaagaaagagattacaaattgtcttaagctattggagagcctcaccccactatgtgaagatgacaaccaagctcaggagattatcaaaaagctggaaaagtccataaaattcctgtcccagtgtgccgcaagggtggcttcccgggccgagatgctgggagctattaatcaggaaagccgtgttagcaaggccgtggaggtgatgatccagcatgtggaaaacctcaaacgcatgtacgccaaagagcacgcagaactggaagaattgaagcaggttttacttcaaaatgagagaagttttaatcccttggaggacgatgatgactgccagataaagaagcgcagcgcctctctgaactctaaacctagttccctgcgaagagttaccatcgccagtttacccagaaatataggcaatgcaggaatggttgctggaatggagaacaatgatcggttctcccggagatcatcttcatggagaatcttgggaagcaaacaaagtgaacataggccatctcttccacgattcatatcgacctattcttgggccgatgctgaagaggagaaatgcgagctgaaaactaaggatgatagtgagccgagcggagaggagaccgtcgagcgtacgcgaaaaccaagtctcagcgagaaaaagaataatccttcaaaatgggacgtgtcttctgtatacgacactattgcttcctgggccacgaacctaaagagcagtatacgaaaagccaacaaggccctatggctgagtattgcattcatcgtgctgttcgccgcactcatgtcatttctgacggggcaattgttccagaaatctgtggacgccgctccaactcagcaagaagattcgtggactagtctcgaacacatactctggccatttactaggttgcgccataatggaccaccccccgtatag

SEQ ID NO: 162382 - DNA, 1500 bp, Artificial Sequence
  derived and/or modified sequence
atgaacgatgatcctagtatggaagagaacggggtggagcgggtgtgtccagagagtctgctacagagcagggagtacagcagcctgccattgcctagacacacatcaagcactgacgggaccataacaagttcggacccaggccttgaaattttgaatatggcctcgtgcgatttggacagaaatagcctgtgcaaaaaggaggaggatactcggagcgcctcgcccacaatcgaagctcagggaaccagcccggcccacgataatatcgcattccaggactccacttcgaaggacaaaacaatccttaacctggaggcgaaagaagagcctgaaacaatcgaggagcacaaaaaagagcatgcgtcaggagacagtgtggtcagtccactaccagtgacgactgtcaaatccgtcaacctgcgccagagcgagaacacaagtgccaacgaaaaggaagtggaggctgagtttctgaggctgtccctgggattcaaatgcgactggttcaccctagagaagcgggttaagctggaggagcgatcacgagacctggcggaagaaaaccttaagaaggagatcactaattgtctaaaattattggaatcactgacccccctgtgtgaggacgacaatcaggctcaggagataataaagaaactcgaaaagtcaatcaagttcttgagccaatgcgccgcacgtgtggccagtagggcagaaatgttgggcgccattaatcaggagtcacgcgtatcaaaagcagtcgaagtcatgatccagcacgtcgagaaccttaagcgcatgtatgcaaaggaacacgctgagctcgaagagttgaagcaggtgctgctccagaacgaacgcagcttcaatccgctggaggatgacgatgactgtcagatcaaaaaacgctccgctagcttaaattcaaagccttcctccttaagacgtgtgaccatcgcctccctcccgcggaacatcggaaacgcaggaatggtggcagggatggaaaataatgataggttctcacgcagatctagctcttggcgcatcctgggaagcaaacaaagtgagcaccggccttcactgccccgcttcatcagtacttattcatgggcagacgcggaggaagaaaaatgcgagctgaagacaaaagatgatagtgagcccagcggggaggaaaccgttgaaagaacccgtaagcccagtttgagtgagaagaagaataatccctctaagtgggacgtaagctcagtttacgacacaatcgcaagctgggcgacgaacctgaagtcaagcattcgtaaagctaataaagccctctggttgagcatcgcctttatagtgctgtttgccgcactaatgtccttcttaaccgggcaattgttccaaaagtctgtggacgcagctcccacccagcaggaggactcatggacaagcctcgagcatatcctgtggccttttacccggctgaggcataacggacctcccccagtgtag

SEQ ID NO: 162383 - DNA, 234 bp, Artificial Sequence
  derived and/or modified sequence
atgaacgatgacccctccatggaggagaatggcgtggagagagtgtgccctgaatctctcctgcagtccagggaatactcttcactgccactgcccaggcataccagctccacagacggcacaatcacctcttctgatccgggactcgagatcctcaacatggccagttgtgatctggataggaatagcctatgtaagaaagaagaggacactagatccgcctcacccacatag

SEQ ID NO: 162384 - DNA, 1500 bp, Artificial Sequence
  derived and/or modified sequence
atgaatgatgaccccagcatggaggagaatggagtggagcgggtgtgcccagagagcctgctgcagagccgggagtacagcagcctgcccctgcccaggcacaccagcagcacagatggcaccatcaccagcagtgaccccggcctggagatcctgaacatggccagctgtgacctggacaggaacagcctgtgcaagaaggaggaggacaccaggtctgccagccccaccatcgaggcccagggcaccagccctgcccatgacaacatcgccttccaggacagcaccagcaaggacaagaccatcctgaacctggaggccaaggaggagcctgagaccatcgaggagcacaagaaggagcacgccagcggggacagcgtggtgagccccctgcctgtgaccaccgtgaagtctgtgaacctgcggcagagcgagaacaccagcgccaatgagaaggaggtggaggccgagttcctgcggctgagcctgggcttcaagtgtgactggttcaccctggagaagagggtgaagctggaggagaggagccgggacctggccgaggagaacctgaagaaggagatcaccaactgcctgaagctgctggagagcctgacccccctgtgtgaagatgacaaccaggcccaggagatcatcaagaagctggagaagagcatcaagttcctgagccagtgtgccgcccgggtggccagcagagctgagatgctgggcgccatcaaccaggagagccgggtgtccaaggctgtggaggtgatgatccagcacgtggagaacctgaagaggatgtatgccaaggagcacgccgagctggaggagctgaagcaggtgctgctgcagaatgaaagaagcttcaaccccctggaggatgatgatgactgccagatcaagaagaggtctgccagcctgaacagcaagcccagcagcctgcggcgggtgaccatcgccagcctgcccagaaatattggaaatgccggcatggtggccggcatggagaacaatgaccgcttcagccgccgcagcagctcctggaggatcctgggcagcaagcagagcgagcaccggcccagcctgccccgcttcatcagcacctacagctgggcagatgctgaggaggagaagtgtgagctgaagaccaaggatgacagcgagcccagcggggaggagaccgtggagaggaccaggaagcccagcctgtctgagaagaagaacaaccccagcaagtgggatgtgtcctctgtgtatgacaccatcgcctcctgggccaccaacctgaagagcagcatcaggaaggccaacaaggccctgtggctgagcatcgccttcatcgtgctgtttgctgccctgatgtccttcctgaccggccagctgttccagaagtctgtggatgctgcccccacccagcaggaggacagctggaccagcctggagcacatcctgtggcccttcacccggctgcggcacaacggccccccacctgtgtag

SEQ ID NO: 162385 - DNA, 234 bp, Artificial Sequence
  derived and/or modified sequence
atgaatgatgaccccagcatggaggagaatggagtggagcgggtgtgcccagagagcctgctgcagagccgggagtacagcagcctgcccctgcccaggcacaccagcagcacagatggcaccatcaccagcagtgaccccggcctggagatcctgaacatggccagctgtgacctggacaggaacagcctgtgcaagaaggaggaggacaccaggtctgccagccccacctag

SEQ ID NO: 162386 - DNA, 2504 bp, Artificial Sequence
  derived and/or modified sequence
aaagggggagttgtaagagaggcggtatcaacagcctgctgatgaaagaggcgactctgcagaaagaggcaacttgacatatcaggactttaaccgctgtagaaatagctcaggcataccaagcccatgcaaacacagaattgcagaagttcaggagaggcttatcacttccctgagaagaaaaacacattttcagttttgcctgcatcataagagtgagcactccattgctttctttcctggccacactgctacaatccagcactaactatccatgtccagggtaaggatcgagatcgagaagcccacactgccagtgaaaaagctacgtctttactgcataaattagaggaagcaatttcggaacaacggaaccttcaaactataaatactgaattatcgaacacttgccaggcacttcagcagaagacaaggaaactgaagaagctttttagatgaggaatttcctcactatgattccctgtcctgcgcagatgcaattcaacaacctcttcaagaaaaattgaagcagtgttgccacaaactatatggtggtcaagaagcaagaatacatcagacacccctgaccttgaaacatacgtgctggtacacacctctgctggatgccttatctctggatagttttacagcagttccaaccctggaatcaacacctttctcaggtgtagccaaccaaatccacactctgtgtgaaaggcccacatatggagaagtaaaggatggtgctttggatgtaaaaagacaacacaagtgcccaggccccacaagtggccccagcccaggaacgaatctctcaggctgcatcaggatgaatgatgacccaagtatggaagagaatggtgttgaacgcgtgtgtcctgagagcctgctgcagtccagggaatattcctcactaccattacccagacacacttcatcgacagacggtactataacttcaagtgatcctggattagaaattctgaatatggcttcttgtgaccttgacagaaactcgctctgtaagaaagaggaggatacaagatcagcttctcccacgatagaggcccaaggcacaagtccagctcatgataatattgcattccaagactctacgagtaaggataaaaccatattaaatctggaagccaaagaggaaccagaaacaatagaagaacataaaaaagaacatgcttcaggagactctgtggtttcccctcttcctgtaaccactgtgaaatcggttaaccttagacaaagtgagaacacttctgctaatgagaaggaggtggaggcagaatttctcagattatctttgggatttaagtgtgactggtttaccttggagaagagagtgaagcttgaagagaggtcccgtgacttggcagaagaaaatttgaagaaagaaatcactaactgtttaaaactattagagtctttaacacctctgtgtgaagatgacaaccaggcacaggaaatcattaagaagctggagaagagtataaagtttcttagccagtgtgcagcacgagtggccagtagggctgagatgttgggagccatcaatcaggaaagccgggttagtaaagcagttgaagtgatgattcagcacgtagaaaacttgaagaggatgtatgccaaagagcacgctgaattagaagaactgaaacaggttcttctgcagaatgaaaggtctttcaatcctcttgaagatgatgatgactgccaaattaaaaaacgttcagcttctctaaactccaagccatcttctctacgaagagtgactattgcctctttacccagaaatattggaaatgcaggaatggtggctgggatggaaaataatgatcgattcagtagaaggtcaagcagttggcgtattttggggtcaaagcagagtgaacaccgtccctcattacctcgatttattagcacctattcctgggcagatgctgaagaagaaaaatgtgaactaaaaactaaagatgactcagagccatctggagaagaaacagtagaaaggacaaggaagccaagtctttctgaaaagaaaaataatccatcaaagtgggatgtctcttcagtttatgacacaatagcttcctgggcaacaaatctcaagtcctccatcagaaaggctaataaggccctctggctctctattgcattcattgtactgtttgcagctttgatgagcttcctcacaggccaattattccagaagtctgtggatgccgctcccacacagcaagaggactcatggacgtctctagaacatatcttgtggccatttaccagactccgacacaatgggccaccaccagtgtgacagcaggacatcctaatatatggatcttgatttttaagtttcagtatctgaacttcgtaaattagtaacttttagctgggaaagtatagcatgaaaccagaggttctcagaatgactgtaagatagcttacatttcctctttttgcctttatctccccaactaaaatacaatggg

SEQ ID NO: 162387 - DNA, 2208 bp, Artificial Sequence
  derived and/or modified sequence
tgctttctttcctggccacactgctacaatccagcactaactatccatgtccagggtaaggatcgagatcgagaagcccacactgccagtgaaaaagctacgtctttactgcataaattagaggaagcaatttcggaacaacggaaccttcaaactataaatactgaattatcgaacacttgccaggcacttcagcagaagacaaggaaactgaagaaagcagtgttgccacaaactatatggtggtcaagaagcaagaatacatcagacacccctgaccttgaaacatacgtgctggtacacacctctgctggatgccttatctctggatagttttacagcagttccaaccctggaatcaacacctttctcaggtgtagccaaccaaatccacactctgtgtgaaaggcccacatatggagaagtaaaggatggtgctttggatgtaaaaagacaacacaagtgcccaggccccacaagtggccccagcccaggaacgaatctctcaggctgcatcaggatgaatgatgacccaagtatggaagagaatggtgttgaacgcgtgtgtcctgagagcctgctgcagtccagggaatattcctcactaccattacccagacacacttcatcgacagacggtactataacttcaagtgatcctggattagaaattctgaatatggcttcttgtgaccttgacagaaactcgctctgtaagaaagaggaggatacaagatcagcttctcccacgatagaggcccaaggcacaagtccagctcatgataatattgcattccaagactctacgagtaaggataaaaccatattaaatctggaagccaaagaggaaccagaaacaatagaagaacataaaaaagaacatgcttcaggagactctgtggtttcccctcttcctgtaaccactgtgaaatcggttaaccttagacaaagtgagaacacttctgctaatgagaaggaggtggaggcagaatttctcagattatctttgggatttaagtgtgactggtttaccttggagaagagagtgaagcttgaagagaggtcccgtgacttggcagaagaaaatttgaagaaagaaatcactaactgtttaaaactattagagtctttaacacctctgtgtgaagatgacaaccaggcacaggaaatcattaagaagctggagaagagtataaagtttcttagccagtgtgcagcacgagtggccagtagggctgagatgttgggagccatcaatcaggaaagccgggttagtaaagcagttgaagtgatgattcagcacgtagaaaacttgaagaggatgtatgccaaagagcacgctgaattagaagaactgaaacaggttcttctgcagaatgaaaggtctttcaatcctcttgaagatgatgatgactgccaaattaaaaaacgttcagcttctctaaactccaagccatcttctctacgaagagtgactattgcctctttacccagaaatattggaaatgcaggaatggtggctgggatggaaaataatgatcgattcagtagaaggtcaagcagttggcgtattttggggtcaaagcagagtgaacaccgtccctcattacctcgatttattagcacctattcctgggcagatgctgaagaagaaaaatgtgaactaaaaactaaagatgactcagagccatctggagaagaaacagtagaaaggacaaggaagccaagtctttctgaaaagaaaaataatccatcaaagtgggatgtctcttcagtttatgacacaatagcttcctgggcaacaaatctcaagtcctccatcagaaaggctaataaggccctctggctctctattgcattcattgtactgtttgcagctttgatgagcttcctcacaggccaattattccagaagtctgtggatgccgctcccacacagcaagaggactcatggacgtctctagaacatatcttgtggccatttaccagactccgacacaatgggccaccaccagtgtgacagcaggacatcctaatatatggatcttgatttttaagtttcagtatctgaacttcgtaaattagtaacttttagctgggaaagtatagcatgaaaccagaggttctcagaatgactgtaagatagcttacatttcctctttttgcctttatctccccaactaaaatacaatggggaagaagtctgcc

SEQ ID NO: 162388 - DNA, 2193 bp, Artificial Sequence
  derived and/or modified sequence
aaacacagaattgcagaagttcaggagaggcttatcacttccctgagaagaaaaacacattttcagttttgcctgcatcataagagtgagcactccattgctttctttcctggccacactgctacaatccagcactaactatccatgtccagggtaaggatcgagatcgagaagcccacactgccagtgaaaaagctacgtctttactgcataaattagaggaagcaatttcggaacaacggaaccttcaaactataaatactgaattatcgaacacttgccaggcacttcagcagaagacaaggaaactgaagaagctttttagatgaggaatttcctcactatgattccctgtcctgcgcagatgcaattcaacaacctcttcaagaaaaattgcagtgttgccacaaactatatggtggtcaagaagcaagaatacatcagacacccctgaccttgaaacatacgtgctggtacacacctctgctgggtgcccaggccccacaagtggccccagcccaggaacgaatctctcaggctgcatcaggatgaatgatgacccaagtatggaagagaatggtgttgaacgcgtgtgtcctgagagcctgctgcagtccagggaatattcctcactaccattacccagacacacttcatcgacagacggtactataacttcaagtgatcctggattagaaattctgaatatggcttcttgtgaccttgacagaaactcgctctgtaagaaagaggaggatacaagatcagcttctcccacgatagaggcccaaggcacaagtccagctcatgataatattgcattccaagactctacgagtaaggataaaaccatattaaatctggaagccaaagaggaaccagaaacaatagaagaacataaaaaagaacatgcttcaggagactctgtggtttcccctcttcctgtaaccactgtgaaatcggttaaccttagacaaagtgagaacacttctgctaatgagaaggaggtggaggcagaatttctcagattatctttgggatttaagtgtgactggtttaccttggagaagagagtgaagcttgaagagaggtcccgtgacttggcagaagaaaatttgaagaaagaaatcactaactgtttaaaactattagagtctttaacacctctgtgtgaagatgacaaccaggcacaggaaatcattaagaagctggagaagagtataaagtttcttagccagtgtgcagcacgagtggccagtagggctgagatgttgggagccatcaatcaggaaagccgggttagtaaagcagttgaagtgatgattcagcacgtagaaaacttgaagaggatgtatgccaaagagcacgctgaattagaagaactgaaacaggttcttctgcagaatgaaaggtctttcaatcctcttgaagatgatgatgactgccaaattaaaaaacgttcagcttctctaaactccaagccatcttctctacgaagagtgactattgcctctttacccagaaatattggaaatgcaggaatggtggctgggatggaaaataatgatcgattcagtagaaggtcaagcagttggcgtattttggggtcaaagcagagtgaacaccgtccctcattacctcgatttattagcacctattcctgggcagatgctgaagaagaaaaatgtgaactaaaaactaaagatgactcagagccatctggagaagaaacagtagaaaggacaaggaagccaagtctttctgaaaagaaaaataatccatcaaagtgggatgtctcttcagtttatgacacaatagcttcctgggcaacaaatctcaagtcctccatcagaaaggctaataaggccctctggctctctattgcattcattgtactgtttgcagctttgatgagcttcctcacaggccaattattccagaagtctgtggatgccgctcccacacagcaagaggactcatggacgtctctagaacatatcttgtggccatttaccagactccgacacaatgggccaccaccagtgtgacagcaggacatcctaatatatggatcttgatttttaagtttcagtatctgaacttcgtaaattagtaacttttagctgggaaagtatagcatgaaaccagaggttctcagaatgactgtaagatagcttacatttcctctttttg

SEQ ID NO: 162389 - DNA, 785 bp, Artificial Sequence
  derived and/or modified sequence
attttcagttttgcctgcatcataagagtgagcactccattgctttctttcctggccacactgctacaatccagcactaactatccatgtccagggtaaggatcgagatcgagaagcccacactgccagtgaaaaagctacgtctttactgcataaattagaggaagcaatttcggaacaacggaaccttcaaactataaatactgaattatcgaacacttgccaggcacttcagcagaagacaaggaaactgaagacaacaattgagtcacttcaaaaggagttcattgaaggggaacaccatggcttgctgtttcagagctttttagatgaggaatttcctcactatgattccctgtcctgcgcagatgcaattcaacaacctcttcaagaaaaattgaagcagtgttgccacaaactatatggtggtcaagaagcaagaatacatcagacacccctgaccttgaaacatacgtgctggtacacacctctgctgggtgcccaggccccacaagtggccccagcccaggaacgaatctctcaggctgcatcaggatgaatgatgacccaagtatggaagagaatggtgttgaacgcgtgtgtcctgagagcctgctgcagtccagggaatattcctcactaccattacccagacacacttcatcgacagacggtactataacttcaagtgatcctggattagaaattctgaatatggcttcttgtgaccttgacagaaactcgctctgtaagaaagaggaggatacaagatcagcttctcccac

SEQ ID NO: 162390 - DNA, 1500 bp, Artificial Sequence
  derived and/or modified sequence
atgaacgacgaccccagcatggaggagaacggcgtggagcgggtgtgtccggaaagcctcctgcagagccgtgagtattcctctctgccccttccccgtcacacatcctccacggatggtaccatcactagctctgatccgggactggagatactgaatatggcatcttgcgacttggaccgaaacagcctgtgcaagaaagaggaagatacccgcagtgcctcaccaacaattgaggcccagggaacctctcctgctcacgataacatcgccttccaggactcgacttccaaggacaagaccattctaaacttggaggccaaagaagagcccgaaacaatcgaggaacataagaaggagcatgctagcggagacagcgtggtgtcgccattgcctgtcactacggtgaagtcagtcaatctgcgccagtccgagaatacaagtgccaatgagaaagaggtggaagccgagttcttacgtctctccttgggcttcaaatgtgactggtttacactggagaaacgcgttaagctcgaggaacggagccgcgacctggctgaagagaacctgaaaaaagaaataacaaactgtttaaaactgttggagagtcttacacccctctgtgaagatgataaccaggctcaggaaattatcaagaaactagaaaagagcattaagtttttatcccagtgtgcggctagagtggccagtcgagccgagatgctaggggctatcaatcaggagtcccgtgtgtctaaggcagttgaggtgatgattcagcatgtagagaatttaaaacggatgtatgccaaggagcacgccgagctcgaggagttgaaacaagtgctactgcaaaatgaaagaagctttaacccactcgaagacgacgacgattgccagattaagaaaaggtcagcttcccttaatagcaagcccagcagcctcaggagggtgacaattgcatctctgcctagaaatattggtaatgccggaatggtcgccgggatggaaaataacgatcggttcagtcgccgcagcagcagttggagaatcctgggctctaaacagtcagaacatcggcctagcctgccccgcttcatatccacgtacagctgggcagatgcggaggaagaaaaatgtgagttgaagaccaaggatgatagcgagccgtccggagaagagaccgtcgagagaaccaggaaaccatctctgtccgaaaagaagaacaaccctagcaagtgggatgtttccagcgtctacgatacaatcgccagttgggcgactaatctgaagtcttcgatcagaaaggctaataaggccctttggctcagcatagcctttattgtactttttgcagcattgatgagtttcctgaccggacaactgtttcaaaagtcagtcgacgcagctccgacacaacaggaagactcttggacatctttggagcatatcctctggccattcacgcggctgaggcacaacggccccccccctgtgtag

SEQ ID NO: 162391 - DNA, 1500 bp, Artificial Sequence
  derived and/or modified sequence
atgaacgacgaccccagcatggaggagaacggcgtggagcgggtgtgccccgagtccctgctgcagagtagagaatacagttccctgccgctgccccggcatacctctagtactgatggaaccattacttccagcgatccaggactggagatcctgaatatggcctcttgtgacctggatcgtaatagcctctgtaagaaagaagaggatactcggtcagcaagccccaccatcgaggcccaagggactagccccgcccacgacaacatcgcatttcaggacagcacaagcaaggacaagacaatcctgaatctggaggccaaggaggaacccgaaaccatcgaggaacacaagaaagagcatgcctccggcgactccgttgtttccccactacccgttactactgtgaaatcagtcaacctcagacagtccgagaatacgagtgctaacgagaaggaagtagaagccgagtttttgcgcctctctctcgggttcaagtgcgattggttcaccttggaaaagcgagtcaagctggaggagcggtccagggacctggcagaagaaaacttgaagaaggagatcacaaattgtctgaagctgttggagagtttgactcctctgtgtgaagacgataaccaggctcaggaaattatcaagaagttagagaaatcaatcaaatttctgtcccagtgtgctgcaagagttgcgagcagggcagagatgcttggggctatcaatcaggagtcccgcgtgtccaaagccgtggaggttatgatacagcatgtggaaaatctgaaaaggatgtacgcaaaagagcacgccgagctcgaggagcttaaacaggtgctgcttcagaatgaacggtcctttaatccactggaggacgatgacgactgccagattaaaaaacggagtgccagcttgaatagtaagccaagctcactgcgtagggtgactatcgcctcactaccgagaaacatcggcaatgccggaatggtggcaggtatggagaacaacgacagattctcccgacgttcttctagctggcgcatactcgggtcgaagcaaagtgagcatcgccccagccttcccagatttatcagcacgtattcttgggctgatgccgaggaggaaaagtgtgaactgaagaccaaggatgactctgaaccctcaggggaggaaacagttgaacgtactaggaaaccatccctgtccgaaaaaaaaaataaccctagtaagtgggatgtttcaagcgtatacgacaccatagcaagctgggcgaccaacctgaagtctagcatacgaaaggccaataaagctttgtggctcagcattgctttcatcgtgctgttcgctgccctgatgagcttcctgacagggcagttgttccagaaatctgtggatgccgctcccacccagcaagaagatagttggacatcactcgagcacatcctctggccctttacccgcttacgccacaatggccctccaccagtttag

SEQ ID NO: 162392 - DNA, 1500 bp, Artificial Sequence
  derived and/or modified sequence
atgaacgacgaccccagcatggaggagaacggcgtggagcgggtgtgtcccgagtccctgcttcagtcccgggaatacagtagtcttccactgccccggcatacctcctctactgacgggacaattacctcctctgatcccggcctggaaatcttgaatatggcatcttgtgacctggatcgcaactctctgtgcaaaaaagaggaggatacaaggtccgcctcccctaccattgaggcgcaggggactagccctgcacacgataacatcgcattccaggacagcacctccaaagacaaaactattctgaacctggaggccaaagaagaacccgaaactatcgaggagcataagaaggaacatgcctccggggactccgtggtctcaccactgccagtaacaacggtgaagtcagtgaatttgcgtcagagcgaaaatacctccgcaaatgaaaaagaggtcgaagccgagttcctgcggctcagcctgggatttaagtgcgactggttcacactggagaagagggtgaagctagaagagagaagtagggacttggcggaagagaatctcaaaaaagagattaccaattgcctgaagctcctcgaaagtctaaccccgctatgtgaggacgacaaccaggcacaggagatcatcaagaagttggaaaaatccatcaaatttcttagtcagtgtgccgctcgagttgccagccgcgccgaaatgctgggtgccattaatcaggagtcaagggtgagcaaagcagtggaggtcatgatccagcatgtggaaaaccttaaacggatgtatgctaaagagcatgccgaattggaagagctcaaacaggttctgctgcaaaacgagcggagctttaatccactggaggacgacgacgactgtcagattaagaaaagatccgcttcccttaactccaagcccagcagcttaagacgtgtcacgattgctagcttgccccgcaacatcgggaatgcgggcatggttgcgggtatggagaataatgatagattctccaggcgtagctcttcatggcgaatcctggggagcaaacagagcgaacaccgaccatcccttcctaggttcattagtacgtactcctgggccgatgctgaggaggagaaatgtgagctgaaaacaaaggacgactcagagccgagcggcgaagagacagtcgagcggactcgtaaaccgtctctttctgagaagaaaaataatccctctaagtgggacgtgtcctcagtctacgatacaatcgcctcctgggccaccaatctgaagtcaagcattagaaaggccaataaagctctttggctgtcaatagcctttatcgttctgtttgctgcgctcatgagctttctgacgggacagttgttccagaaatcggtggacgcggcgccaacgcagcaggaagatagttggacgtctctggagcacatcttatggccatttaccaggctgcggcacaacggacccccccccgtttag

SEQ ID NO: 162393 - DNA, 234 bp, Artificial Sequence
  derived and/or modified sequence
atgaacgacgaccccagcatggaggagaacggcgtggagcgggtgtgcccggaatcactcttacagtcccgcgaatattctagtctgcccctgcccaggcacacaagttcaaccgacgggacgatcacctcctcagaccccggtctggaaattctcaacatggcatcatgcgacttggatcgaaatagcctgtgcaaaaaagaggaggacacacggtccgcgagtccgacttag

SEQ ID NO: 162394 - DNA, 1500 bp, Artificial Sequence
  derived and/or modified sequence
atgaatgacgacccgagcatggaggagaatggtgtggagcgggtgtgccccgaaagcctgttgcagagcagagagtattcttccttgccgcttccgaggcatactagtagcacggacggtaccatcacctcatctgacccaggtttggagattcttaacatggcgtcctgcgacttggacagaaatagcttgtgcaagaaggaagaagatacacgctctgcctcaccaactattgaagcacagggaacatcacccgcacatgacaacatcgccttccaggactcaacttctaaagacaagaccattcttaacctggaagctaaggaagaacccgagacaattgaagaacataagaaagagcacgctagtggagacagcgtggtcagccccctcccagtgaccaccgtgaaaagtgtgaacctgaggcagtccgaaaacacctccgctaatgagaaggaagttgaggctgaattccttcgattgagcctgggctttaaatgtgattggttcactcttgagaaacgggtgaagttggaggagcgttcacgcgatctggccgaggaaaaccttaagaaggagatcaccaattgcctcaagttgttggaaagcctgaccccgttatgcgaagacgacaaccaggctcaggaaatcattaagaaactcgaaaagagcatcaagttcctgtcccagtgcgcagcacgcgtggcatctagagcagaaatgttaggcgcaattaatcaggagagccgagtctctaaagccgtggaagtgatgatacaacacgtggaaaacctgaaacgtatgtatgcaaaggagcacgccgagctggaagaactgaagcaggtcctcctgcaaaatgaacgctctttcaatcctttagaagacgacgacgactgccagattaaaaaaagaagtgcgtcattgaacagcaagccttcctccctccgacgtgtgactatagcttcactccctcgtaatatcggcaatgccggtatggtggccggaatggagaacaatgatcggttctcccgaagaagctccagttggcggatactcggctctaaacagtctgaacaccggcctagcctccccagatttattagcacatactcatgggccgacgcagaggaagaaaagtgtgagctgaagaccaaggatgactccgaaccaagtggggaagagaccgttgagcgaactcggaagccgtccctcagcgagaaaaaaaacaacccatcaaagtgggacgtatctagcgtgtatgatactatcgcttcatgggctacaaatctgaagtcaagtattaggaaggccaataaagcactgtggcttagcattgccttcattgtgttgttcgccgctctcatgtcattccttaccggccagctctttcagaaaagcgtggatgcggctcccacacaacaggaagattcttggacgagtctagagcatatactctggccgtttactaggttgagacacaacgggccaccgcctgtttag

SEQ ID NO: 162395 - DNA, 1500 bp, Artificial Sequence
  derived and/or modified sequence
atgaacgacgatccgtctatggaggaaaacggcgtggaaagggtgtgcccagagtctctcctgcagagtcgcgaatactctagtctacctctaccacgtcacactagctcaacggatgggactatcacctcaagcgatccgggtctggagattctgaatatggcctcctgtgacttagatagaaacagcttgtgtaagaaggaggaggacacaaggtctgccagccctacaatcgaggctcaagggacaagccccgcacacgacaacattgcatttcaagacagtacttccaaagataagaccatcctcaacctggaagccaaggaggagcctgagactattgaggagcataagaaggaacatgcctccggagattctgtcgtgtcgcctttgcctgtgactaccgtcaagtccgtaaacttgcggcaatcagagaacaccagtgccaatgaaaaggaggtcgaagctgagtttcttcggctatcactgggttttaaatgtgattggtttactttggagaaaagggtgaaacttgaggaacgatctcgcgacctggccgaggagaacctgaaaaaggagatcacgaattgcctcaaacttcttgagtcactgactcccttgtgcgaagatgacaatcaggcacaggaaattataaagaagctggagaagagtattaaatttctttcccagtgtgccgctcgggtggcttcaagggcggaaatgttgggcgctattaatcaggagagccgagtgtctaaggcagttgaggtgatgattcaacatgtcgaaaacctgaagcgcatgtatgcaaaagaacacgccgagctcgaagagctgaagcaggtattgttacaaaacgagaggtctttcaatcccctcgaagacgacgacgactgccagattaagaaaagatccgctagtctgaattcaaagccttcctccctgcgcagagtgaccatcgcttctctgcctcgaaatatcggaaacgcaggaatggtggccggtatggaaaataatgacaggtttagccggcgaagctctagctggcgcattctcggttccaagcagagtgagcacagaccaagcttacccagatttatcagcacctactcatgggccgacgcagaggaggagaaatgcgagctgaaaacaaaagacgactcagagccctcgggggaggagactgtggaaaggactaggaagcccagtctgtccgagaagaagaataaccccagcaagtgggacgtgagcagtgtttacgataccatcgcatcctgggccaccaatctaaaaagctcgatccgcaaagctaataaggctctctggttgagtatcgcctttattgttctattcgctgcgctgatgtcctttctcaccgggcaactgttccagaagtctgtagacgctgctcctacccaacaggaagactcttggacatccctcgagcacattctgtggcctttcacacgcctgcggcataacgggcctcctcctgtttag

SEQ ID NO: 162396 - DNA, 1500 bp, Artificial Sequence
  derived and/or modified sequence
atgaatgatgatccctctatggaagagaacggcgtcgagagggtgtgtcccgaaagcctgctccagagtagggaatacagttcattgcctctgccaagacacacatcttcaacagatggcacaattacaagctcagaccccggactagagatcttaaacatggctagctgtgatctggaccgcaatagcctgtgcaagaaagaggaagacacacgcagcgcatcccccactattgaagcccaaggcacctctcctgcgcacgacaatatagccttccaggattcaacgtccaaagacaaaacaatcctgaaccttgaagccaaggaggagcctgagacaattgaagaacacaaaaaagaacatgcctctggagattcggtcgtttcacctttacccgtgactacagtcaagagcgtcaatttgcgtcaatcggagaatacatccgcgaatgagaaggaggtggaggcagagtttcttcggttgtcactgggtttcaagtgcgattggttcaccctggaaaaacgggttaaactagaagagaggtcacgcgacctggccgaggagaacctgaaaaaggaaattactaactgcctgaaactacttgagtcactcacacccctgtgtgaagacgataaccaagcacaagaaatcatcaagaaactagagaagagcatcaagttccttagtcagtgcgccgcacgtgtggcgagccgagcggaaatgttgggcgctataaatcaggagagtcgggtgtcaaaggccgtcgaggtcatgatccaacacgtggaaaacttgaaaagaatgtacgctaaggagcatgccgagctggaagagcttaagcaggtgcttctgcagaatgaacgctccttcaacccactggaggatgacgatgactgtcagattaaaaaacggagcgcctctctgaacagcaagccatcctctctccgaagggttacaatcgcttccctgccaaggaatatagggaacgcaggtatggtggcagggatggaaaataacgatcgcttctccaggcggtctagtagctggcgaatcttggggagtaaacagtccgaacataggccttcattacctagatttatatcaacctactcttgggccgacgcagaggaggagaagtgcgagctgaaaactaaagacgattccgagcctagcggcgaagagaccgtcgaacggacgaggaagccgtccctaagcgaaaagaagaataatccatctaagtgggatgtatcctccgtctacgataccatcgccagctgggctacgaacctcaaatcctcaatccggaaggccaacaaagctctgtggctgtctatcgccttcatcgtgttgttcgctgctctcatgtcattcctgacaggacagctgtttcagaaaagcgtggacgcagcccctacgcagcaggaggactcctggacctccttagaacacattctgtggccttttacgcgattaaggcacaacggcccaccccctgtgtag

SEQ ID NO: 162397 - DNA, 234 bp, Artificial Sequence
  derived and/or modified sequence
atgaatgatgatccgagcatggaagaaaacggggtggagcgcgtctgtccagagtcattactgcagtctcgggagtacagcagcctgcccctacccagacacacctcttctaccgatggtactatcaccagcagcgatccaggtctcgaaatactgaacatggcaagttgtgacctagatcgtaattccctgtgcaagaaagaagaggatactaggtctgcctctcccacttag

SEQ ID NO: 162398 - protein, 900 aa, Artificial Sequence
  derived and/or modified sequence
MATCAVEVFGLLEDEENSRIVRVRVIAGIGLAKKDILGASDPYVRVTLYDPMNGVLTSVQTKTIKKSLNPKWNEEILFRVHPQQHRLLFEVFDENRLTRDDFLGQVDVPLYPLPTENPRLERPYTFKDFVLHPRSHKSRVKGYLRLKMTYLPKTSGSEDDNAEQAEELEPGWVVLDQPDAACHLQQQQEPSPLPPGWEERQDILGRTYYVNHESRRTQWKRPTPQDNLTDAENGNIQLQAQRAFTTRRQISEETESVDNRESSENWEIIREDEATMYSNQAFPSPPPSSNLDVPTHLAEELNARLTIFGNSAVSQPASSSNHSSRRGSLQAYTFEEQPTLPVLLPTSSGLPPGWEEKQDERGRSYYVDHNSRTTTWTKPTVQATVETSQLTSSQSSAGPQSQASTSDSGQQVTQPSEIEQGFLPKGWEVRHAPNGRPFFIDHNTKTTTWEDPRLKIPAHLRGKTSLDTSNDLGPLPPGWEERTHTDGRIFYINHNIKRTQWEDPRLENVAITGPAVPYSRDYKRKYEFFRRKLKKQNDIPNKFEMKLRRATVLEDSYRRIMGVKRADFLKARLWIEFDGEKGLDYGGVAREWFFLISKEMFNPYYGLFEYSATDNYTLQINPNSGLCNEDHLSYFKFIGRVAGMAVYHGKLLDGFFIRPFYKMMLHKPITLHDMESVDSEYYNSLRWILENDPTELDLRFIIDEELFGQTHQHELKNGGSEIVVTNKNKKEYIYLVIQWRFVNRIQKQMAAFKEGFFELIPQDLIKIFDENELELLMCGLGDVDVNDWREHTKYKNGYSANHQVIQWFWKAVLMMDSEKRIRLLQFVTGTSRVPMNGFAELYGSNGPQSFTVEQWGTPEKLPRAHTCFNRLDLPPYESFEELWDKLQMAIENTQGFDGVD

SEQ ID NO: 162399 - DNA, 2703 bp, Artificial Sequence
  derived and/or modified sequence
atggctacttgcgccgtcgaggtgttcggtctcctcgaagacgaggaaaattcccgcattgtgagagtcagagttattgccggcatcggcctcgccaaaaaagacattctcggtgcctcagatccttacgtcagagttactctgtacgacccgatgaacggcgtgctgacttcagtgcagacgaagaccataaaaaagtccctgaatccaaagtggaacgaagagatcctgttcagagtgcaccctcaacagcacaggctactgttcgaggtcttcgatgagaaccgactgacacgggatgacttcttaggtcaggtggacgtgcccctatacccgctgcccactgagaacccgcggctcgaacgtccttacacttttaaagactttgtacttcatccacgtagccacaaaagccgggtgaaaggataccttagactgaaaatgacgtatcttcctaagacctctggcagcgaagacgacaatgcggaacaagcagaggaactggagccaggatgggtcgtgctcgaccagcccgacgccgcgtgccatttgcagcagcaacaggagccttcccctctgcctcctggatgggaagagagacaggatatactgggccgcacctattacgttaaccatgaaagccgccgtacccaatggaagaggcccacaccacaggacaacttaacagatgctgaaaatgggaacatccagctccaggcccaacgggcttttaccactaggcggcagattagcgaggagacagaaagcgtcgacaatcgcgagagctccgagaactgggaaattatcagagaggacgaggctacaatgtacagcaatcaggctttccccagtccccctccctcctcaaacttggatgtacccacccatctggctgaagagttaaacgctcgactgaccatattcgggaattccgccgtcagccaaccggcatcaagttcaaatcatagttcacgtagaggaagcttgcaggcctacaccttcgaggaacagcctacactgcccgtcctgctacccacctctagcggcctaccgcccgggtgggaggagaagcaggacgagaggggaagatcctactatgtcgatcataattccaggactactacatggacaaagccaaccgtgcaggccacagtggagactagccagttgacaagttcgcagtcaagcgcaggaccccagtctcaggcctctacatctgatagcgggcaacaagtgacccagccctcagagatcgagcaagggttcctgcccaaagggtgggaggttcgtcacgcccctaatggtagaccatttttcattgaccacaataccaagactacaacatgggaagatcctcggctgaagatccccgcccaccttcggggaaaaacatcactggacactagcaacgacttgggcccactgcctcccggctgggaggaacggactcacacagatggtagaatcttctacatcaaccacaacattaagcgcacccagtgggaagaccctcgcctcgaaaacgtagccattactgggccagcggtgccctactcccgggattacaaacggaaatacgaattctttaggcgtaaactgaagaaacagaatgacattcccaataagtttgagatgaagcttagaagggcaactgttctagaagactcgtataggagaattatgggtgttaagagagcggatttcctgaaagctagactctggattgagttcgatggtgaaaagggtctggattacgggggcgtagcaagagaatggttttttctcatatccaaagagatgtttaatccatattatggcctcttcgagtattccgctactgacaactatacacttcagataaatcccaacagcggtctctgtaatgaagaccatctgagttactttaagttcatcgggagggttgcgggcatggcagtgtaccatgggaagttgctcgatggattcttcattagacccttctacaagatgatgttacacaagcctatcacactacatgatatggagtcagtagatagcgagtattacaactccctgcgctggatcctggaaaacgaccctaccgaacttgaccttcgcttcataattgatgaggaactgtttggacagacgcatcagcacgaactgaagaatggcggttccgagattgtcgttacaaataagaacaagaaggagtacatttacctagtgatccagtggcgattcgttaatcggatacaaaagcagatggctgcctttaaggaaggctttttcgaattgatacctcaagatctgataaagatttttgacgaaaatgagctggaactgttgatgtgtggcctcggcgatgtggatgtcaacgactggcgcgagcacactaaatataaaaacgggtactccgccaatcaccaggtaattcagtggttttggaaagccgtgcttatgatggatagcgaaaaaaggatccggctcttacagtttgtgacaggtacgtctcgggtgcctatgaatggctttgcagagctctatggttctaacgggcctcaatcttttacggttgaacagtggggaacaccggagaaactccccagagcacatacatgcttcaataggctagatttacccccctacgagtcctttgaagagttgtgggataagctgcagatggctatagagaatacacaaggtttcgacggagtggactag

SEQ ID NO: 162400 - DNA, 2703 bp, Artificial Sequence
  derived and/or modified sequence
atggccacctgtgctgtggaggtgtttggcctgctggaggatgaggagaacagccgcatcgtgcgggtgcgggtgattgctggcatcggcctggccaagaaggacatcctgggcgccagtgacccctacgtgcgggtgaccctgtatgaccccatgaatggagtgctgacctctgtgcagaccaagaccatcaagaagagcctgaaccccaagtggaatgaggagatcctcttccgggtgcacccccagcagcaccggctgctgtttgaggtgtttgatgagaaccggctgaccagagatgacttcctgggccaggtggatgtgcccctgtaccccctgcccacagagaacccccggctggagcggccctacaccttcaaggactttgtgctgcaccccaggagccacaagagccgggtgaagggctacctgcggctgaagatgacctacctgcccaagaccagcggctctgaagatgacaatgctgagcaggccgaggagctggagcccggctgggtggtgctggaccagccagatgctgcctgccacctgcagcagcagcaggagcccagccccctgcccccaggctgggaggagcggcaggacatcctgggccgcacctactacgtgaaccacgagagcaggaggacccagtggaagaggcccaccccccaggacaacctgacagatgctgaaaatggaaacatccagctgcaggcccagagggccttcaccacccggcggcagatcagcgaggagacagagagcgtggacaaccgggagagcagcgagaactgggagatcatcagagaagatgaggccaccatgtacagcaaccaggccttccccagccccccacccagcagcaacctggatgtgcccacccacctggccgaggagctgaatgcccggctgaccatcttcggcaacagcgctgtgtcccagcctgccagcagcagcaaccacagcagcagaagaggcagcctgcaggcctacacctttgaggagcagcccaccctgcctgtgctgctgcccaccagcagcggcctgcccccaggctgggaggagaagcaggatgagcggggccgcagctactacgtggaccacaacagcaggaccaccacctggaccaagcccaccgtgcaggccaccgtggagaccagccagctgaccagcagccagagcagcgctggcccccagagccaggccagcaccagtgacagcggccagcaggtgacccagcccagcgagattgagcagggcttcctgcccaagggctgggaggtgagacatgcccccaacggccggcccttcttcatcgaccacaacaccaagaccaccacctgggaggacccccggctgaagatcccagcccacctgcggggcaagaccagcctggacaccagcaatgacctgggccccctgcccccaggctgggaggagaggacccacacagatggccgcatcttctacatcaaccacaacatcaagaggacccagtgggaggacccccggctggagaatgtggccatcaccggccctgctgtgccctacagccgggactacaagaggaaatatgagttcttccggaggaagctgaagaagcagaatgacatccccaacaagtttgagatgaagctgcggcgggccaccgtgctggaggacagctaccgccgcatcatgggcgtgaagagagctgacttcctgaaggcccggctgtggattgaatttgatggagagaagggcctggactatggaggagtggcccgggagtggttcttcctgatcagcaaggagatgttcaacccctactacggcctgtttgagtacagcgccacagacaactacaccctgcagatcaaccccaacagcggcctgtgcaatgaagaccacctgagctacttcaagttcatcggccgggtggccggcatggctgtgtaccacggcaagctgctggatggcttcttcatccggcccttctacaagatgatgctgcacaagcccatcaccctgcatgacatggagagcgtggacagcgagtactacaacagcctgcgctggatcctggagaatgaccccacagagctggacctgcgcttcatcattgatgaggagctgtttggccagacccaccagcacgagctgaagaatggaggcagcgagatcgtggtgaccaacaagaacaagaaggagtacatctacctggtgatccagtggaggtttgtgaaccgcatccagaagcagatggccgccttcaaggagggcttctttgagctgatcccccaggacctgatcaagatctttgatgaaaatgagctggagctgctgatgtgtggcctgggagatgtggatgtgaatgactggagggagcacaccaagtacaagaatggctacagcgccaaccaccaggtgatccagtggttctggaaggctgtgctgatgatggattctgagaagaggatccggctgctgcagtttgtgacaggcaccagccgggtgcccatgaatggatttgctgagctgtatggcagcaatggcccccagagcttcaccgtggagcagtggggcaccccagagaagctgccccgggcccacacctgcttcaaccggctggacctgcccccctatgagagctttgaggagctgtgggacaagctgcagatggccatcgagaacacccagggctttgatggagtggactag

SEQ ID NO: 162401 - DNA, 2703 bp, Artificial Sequence
  derived and/or modified sequence
atggccacctgcgccgtggaggtgttcggcctgctggaggacgaggagaactctcgaattgtacgggtgagagtcatagctggcatcggcctggccaagaaggacattcttggtgcttcagatccgtatgtacgggtaactctgtacgacccaatgaacggcgttctgacttccgtgcagactaagactatcaaaaagagtctcaacccaaagtggaatgaggagatcctcttccgcgtgcacccccagcagcatcggctgctctttgaagttttcgacgagaatcgcctaacacgtgacgacttcctgggccaggtcgatgtgccattgtaccctttgccaactgagaatcctcgactcgagcgcccgtacacattcaaggacttcgtcttacacccacggagccacaagagccgggtgaaggggtacctgagactgaagatgacctacctccccaaaactagcggctcagaggacgataatgcagagcaagcagaggagctcgagcctggatgggtggtgttggatcaacccgacgccgcctgccatctgcagcaacaacaggaacccagccctctgccacccggctgggaagaaaggcaggatatcctggggcgaacatactatgttaatcatgagagtcgtagaacacaatggaaaaggcctaccccacaagacaacctaacggacgctgagaacgggaatatccagctgcaggcccaacgtgcttttactactcggagacagataagtgaagagacagagagcgtggataacagggaatctagtgagaattgggaaatcattcgcgaggatgaggccacgatgtactctaaccaggcttttccttcacctcctccatcttccaacctcgatgtaccgacccatttggcggaagagctcaatgctcggctcactatctttggtaacagtgctgtgtcccaaccagcgtcttcctccaaccacagtagtagaaggggaagcttgcaagcctacaccttcgaggagcaaccaaccttacccgtgctgttgcccaccagctcgggcctcccccctggctgggaggagaagcaggacgagcgcggccgcagctattacgtggaccacaacagtcgaactactacctggaccaaacccactgtccaggcgacagtcgaaactagccaactgacaagctcccagagcagtgccggccctcaatcccaggcatctacatccgatagtggacagcaggtgacgcaacccagcgagatcgagcaaggctttctgcctaagggctgggaggtccggcatgcacctaacggtcgccctttttttatcgatcacaacacaaagaccaccacctgggaggatccacgcctgaagatccccgcgcacctgcggggcaagacatcattagacactagtaatgatctagggccacttccccctgggtgggaagagcgtacacacaccgatggaaggatcttttacataaatcataacatcaagcggacgcagtgggaggatccacgactcgaaaatgtggccataactggcccagctgtgccttactcccgagactacaagaggaaatatgagttttttagacggaagctgaaaaagcaaaacgatataccaaacaagttcgagatgaagctgagaagggccacagtgctcgaggactcttatcggagaatcatgggagttaagagagccgacttcctgaaggcacgtctgtggatcgagttcgacggggaaaaagggctggactatgggggtgttgctagagagtggttttttctgatatccaaagagatgttcaacccttattacggactattcgaatacagtgccacagacaattacaccctccagataaaccccaactccggtttatgtaacgaggatcacctgtcttatttcaagttcataggcagagtagccggcatggctgtctaccatggcaagctgcttgatggtttctttatcagacctttttacaagatgatgctgcacaaaccgattactttacacgacatggaatctgttgattccgagtactataacagcttacgatggattctggagaatgatccaaccgaactcgacctcaggtttataattgacgaagagctcttcgggcagactcaccagcacgagcttaaaaacgggggctctgaaatcgtggtgacgaacaagaataaaaaagaatatatttatttggtgattcagtggaggttcgtgaacagaatccagaagcagatggcagcgtttaaagagggcttcttcgagctgattcctcaagatttgatcaagatctttgacgagaacgaattagaacttctcatgtgcggattaggcgatgtcgacgtgaacgactggagagagcacaccaaatataagaatggttacagcgcgaatcatcaggtgatccagtggttttggaaagccgttctcatgatggacagcgagaaacgcatcaggctgctacagttcgtcacagggacttcacgtgtgcctatgaatgggttcgcggagctgtatggaagcaacggcccccagagttttacggtggaacaatggggcacccctgagaagttacctcgcgcacatacctgctttaacaggctagacctccctccctatgagagctttgaagagttgtgggacaaactgcagatggctatcgaaaacacccagggtttcgacggggtcgattag

SEQ ID NO: 162402 - DNA, 5760 bp, Artificial Sequence
  derived and/or modified sequence
ctcccgcttctcctcctcctcctccacagttgcctgccctgggcgggggcgagcgcgtccggtttgctggaagcgttcggaaatggcaacttgcgcggtggaggtgttcgggctcctggaggacgaggaaaattcacgaattgtgagagtaagagttatagccggaataggccttgccaagaaggatatattgggagctagtgatccttacgtgagagtgacgttatatgacccaatgaatggagttcttacaagtgtgcaaacaaaaaccattaaaaagagtttgaatccaaagtggaatgaagaaatattattcagagttcatcctcagcagcaccggcttctttttgaagtgtttgacgaaaaccgattgacaagagatgatttcctaggtcaagtggatgttccactttatccattaccgacagaaaatccaagattggagagaccatatacatttaaggattttgttcttcatccaagaagtcacaaatcaagagttaaaggttatctgagactaaaaatgacttatttacctaaaaccagtggctcagaagatgataatgcagaacaggctgaggaattagagcctggctgggttgttttggaccaaccagatgctgcttgccatttgcagcaacaacaagaaccttctcctctacctccagggtgggaagagaggcaggatatccttggaaggacctattatgtaaaccatgaatctagaagaacacagtggaaaagaccaacccctcaggacaacctaacagatgctgagaatggcaacattcaactgcaagcacaacgtgcatttaccaccaggcggcagatatccgaggaaacagaaagtgttgacaaccgagagtcttccgagaactgggaaattataagagaagatgaagccaccatgtatagcaaccaggccttcccatcacctccaccgtcaagtaacttggatgttccaactcatcttgcagaagaattgaatgccagactcaccatttttggaaattcagccgtgagccagccagcatcgagctcaaatcattccagcagaagaggcagcttacaagcctatacttttgaggaacaacctacacttcctgtgcttttgcctacttcatctggattaccaccaggttgggaagaaaaacaagatgaaagaggaagatcatattatgtagatcacaattccagaacgactacttggacaaagcccactgtacaggccacagtggagaccagtcagctgacctcaagccagagttctgcaggccctcaatcacaagcctccaccagtgattcaggccagcaggtgacccagccatctgaaattgagcaaggattccttcctaaaggctgggaagtccggcatgcaccaaatgggaggcctttctttattgaccacaacactaaaaccaccacctgggaagatccaagattgaaaattccagcccatctgagaggaaagacatcacttgatacttccaatgatctagggcctttacctccaggatgggaagagagaactcacacagatggaagaatcttctacataaatcacaatataaaaagaacacaatgggaagatcctcggttggagaatgtagcaataactggaccagcagtgccctactccagggattacaaaagaaagtatgagttcttccgaagaaagttgaagaagcagaatgacattccaaacaaatttgaaatgaaacttcgccgagcaactgttcttgaagactcttaccggagaattatgggtgtcaagagagcagacttcctgaaggctcgactgtggattgagtttgatggtgaaaagggattggattatggaggagttgccagagaatggttcttcctgatctcaaaggaaatgtttaacccttattatgggttgtttgaatattctgctacggacaattataccctacagataaatccaaactctggattgtgtaacgaagatcacctctcttacttcaagtttattggtcgggtagctggaatggcagtttatcatggcaaactgttggatggttttttcatccgcccattttacaagatgatgcttcacaaaccaataacccttcatgatatggaatctgtggatagtgaatattacaattccctaagatggattcttgaaaatgacccaacagaattggacctcaggtttatcatagatgaagaactttttggacagacacatcaacatgagctgaaaaatggtggatcagaaatagttgtcaccaataagaacaaaaaggaatatatttatcttgtaatacaatggcgatttgtaaaccgaatccagaagcaaatggctgcttttaaagagggattctttgaactaataccacaggatctcatcaaaatttttgatgaaaatgaactagagcttcttatgtgtggactgggagatgttgatgtgaatgactggagggaacatacaaagtataaaaatggctacagtgcaaatcatcaggttatacagtggttttggaaggctgttttaatgatggattcagaaaaaagaataagattacttcagtttgtcactggcacatctcgggtgcctatgaatggatttgctgaactatacggttcaaatggaccacagtcatttacagttgaacagtggggtactcctgaaaagctgccaagagctcatacctgttttaatcgcctggacttgccaccttatgaatcatttgaagaattatgggataaacttcagatggcaattgaaaacacccagggctttgatggagttgattagattacaaataacaatctgtagtgtttttactgccatagttttataaccaaaatcttgacttaaaattttccggggaactactaaaatgtggccactgagtcttcccagatcttgaagaaaatcatataaaaagcatttgaagaaatagtacgacaacttatttttaatcacttttaaataatgtgttgcatttacacagttgtttcatgctgtctttagagttaggtgcctgcctaaagccaggcaccaccacacctggctttagagttcacacaataggatataagtcctgtatgacttaaatagtgaattttgtccttaacatttacctcttgtatagtatctgccaggcagttttttcttaaactactgagatgataactgtgaaatatttgtgatacgtgtcatgtgtgaaaagtttgatgcattttgagatggaaaactgaaatttggaaaaagaaatactttactattgagtaaactacaatatatttagtgctactcgcagctatttattattttgtagacctgccttatgcaccttactgcctagatttttgggaaaaaactttggaaagtgtgttacctatatttctagccaactaactcacagaaaaactgtttacttcttcactttcgaagtatttggcttttgttaatatgcagttttactaaacagatggttcataagacatgtgaagcaaattcatatttgcaatgggtaaaaagtattaaagcctttctcttgcctgcatatcctattgaccattggtatagtcatcactttttcatattttagtgtagttagaagaattccttcttcaaacattaaagatccacaaagcagtatttctaaatatgccttgaagaactaaatgaagtgtatagcacttgcctttactagatattctttacacttgtacaattatgtagtaaatgtatgtttacagggtttatcatgtttacagattaagctaatttctgtagtcgcatttttatatttttagtatcactctagtaaaaaaaccaaataatttgtttaaaataaccaaagagttgttataatgcataatttgtattaaatttattactatttcttatgccttttaaaatactgtttactatgaagacaatgtttttaattacaaatccagaattctgtaggcaaaatgctacagttcatatcttcctttaaccaaactgaagtacataaagaccatgtacatgtattcatcaaacgtttattgaatgctgcgtgcctagcgctgtgctatgctctggggtaagagttgtcagcttcagagaagctgagtcctgatcctcaaggaacttgcaaatgtgtctatgaatttgtaaaacaatcaaaagtaggcgtaagcagaataaggcaaaagggaaagtgttctaggttccagcacacctgcaaagataaagtgtgccaagactgtatttatatttcatacttatattgtttcatccttatattggaatgattatatagaaaatgctcttaaaaagattaaacctatttctcagtatggtatcttggtgatttaggaataattgtaaatatatgttacgaatcttcttaaatatatatatatacacaccctgtgagaactgtaaaaagtacctctggttcttggtttaagtttgttggggtataacatgatgagtactcattagcacctgatagaaatctgaaatgtgacagtagcaaaaccactttctactttccaaacaccacagcatcagcatggtttaggggaagcaattcacagattaatgtaccctgcgttttgtcttcaccattgtcaaccagcagtcaaggatgagcaccaggtatagtcctggtttgatatctcaccagccatgtgaactgaagcagcttacttaacctctctggattcatatttcttcatctgtcaaatgagagtaatcatgcccaccctcattgtcatgccagattgtcagaagttccagacagatgagaaagcaaaaagtactttgtaaagtgttatacaatcagaaggtgctttgtgctgaccgtcagattgtgtcaagtcaggtgtgcaaattgaccacactcccaaagaatcatttaaaagtaaagtgacttctaagagacaaggaagtaggaacatttctgatattaaatatataaataatatggatacacatgtgtatatctgtatatggatcttaccatcataattcattttcttcatatcagcaaagtaatagtaatgtgggccaatgcattttggaaatgtcctcattatgtagaatggaatgtgaaaattatttttgttaaaacaggattttgccacaattatttaaatattatgtttgtgaactatctaagcatgagaaaatacaaagctttctttgtatctggctgatactcatttggatgattctgtgactcatagaacatgatgttaaatgagaccagactcaactgccaccagtccccagctgcagaccttcatccccttcatctcccactaggggctcgtggtctggaagaaacatctatcaagcaacacagccccttatcccagatagaaaagtgtctcaaatgcattctactgcgggacagtcagtaggatcattttcataaagcaaggacatcatatgtttctagaaattacaagcatataactttagcctacaatctcttattaaaaatttttaacaaaattgtattacaaatgcatttcatcagaactcaaatttaaatggtgtttgttttgggtttttatttataatgctgaagttattccatataagtatcaagttaaacacaattcattttgattataaactatttgactttttaaaatcttctgacacagtaaatatatatatcaagattgatgtatcaaaatttattgcacactttaaagtgtaaaatcattttttaaaatcttgaatccacaaataaagttctattctgattttaaaaaacaaaa

SEQ ID NO: 162403 - DNA, 2703 bp, Artificial Sequence
  derived and/or modified sequence
atggccacctgtgcagtcgaagtcttcggtttgctcgaagatgaagaaaatagtagaattgtccgggttagggtcatcgctggcattggactcgcgaaaaaagatatcctcggcgcatctgacccatatgtgagggtaactctgtatgatccaatgaatggggtgctgacctccgtgcagacaaaaaccatcaagaaatccctgaaccccaaatggaatgaagagatcttgttccgggttcacccacaacaacatagactgctgttcgaggtcttcgatgaaaaccggttgactagagacgacttcctcggccaggtcgatgtacctttgtatccacttcctacagagaacccacgcctggagagaccatatacctttaaagattttgtcctccacccccgaagccacaagtcgcgcgtaaaagggtacttacgcctgaagatgacctatctgccaaaaaccagcggctcggaagatgacaatgccgagcaagcagaggaactcgaaccaggatgggtggttctggatcaacctgatgcagcctgccatctgcaacagcagcaagaaccttcccccctgccacctggctgggaagaaaggcaggacatcctcggacgaacatattatgtgaaccacgaaagccggaggactcagtggaaacgccctacaccacaggacaacttaacggacgctgaaaatggcaacatccagcttcaggcccagcgagccttcaccacaagacgacagatttccgaagagacagaaagcgttgataatagggaaagtagcgagaactgggagattatcagagaggacgaagcgactatgtacagtaatcaggcctttcctagccctccacccagctctaaccttgatgttccaacccatctcgcagaggaattaaatgccagactgacaatctttgggaattcggctgtttcacagcccgcatcatcctctaatcatagcagcagaaggggtagccttcaggcgtatacattcgaggaacagcctaccctccccgtgctacttcctacctcatcgggactgcctccgggttgggaggaaaaacaggacgagcgaggacgttcctactatgttgaccacaattcccgcacgaccacctggacaaagcccacagtgcaggccaccgtcgagacctctcaactcacatccagccagtcaagcgctgggccacagagtcaggcgtctacctccgattccgggcagcaggttacacagcccagtgaaattgagcaggggtttctcccaaaaggctgggaggtccgccatgcgcctaatgggaggcctttctttatagatcacaatactaagacgacgacttgggaagatccacggctgaaaattcccgctcacctgcgaggaaagacttctctggacacttctaacgatttaggccctctaccacccggttgggaggagagaacacacactgacggcagaattttctacattaaccataacatcaagcgaactcaatgggaagatccacgattagagaatgtggctatcacagggccagccgtgccatattcgcgagactataaacgcaagtacgagtttttccggcgaaagctgaagaagcagaatgacattcctaacaagttcgaaatgaaactgaggcgcgcaaccgtgcttgaggactcctaccggcgaattatgggggttaaacgggctgatttccttaaagctcgcctatggatcgagttcgatggcgaaaaagggctggactacggaggtgttgccagggaatggttcttcttgatcagcaaagagatgtttaatccctactacgggctgttcgagtattcagccacagacaactacactcttcagatcaaccccaactccggcctttgtaacgaggatcacctcagctattttaaatttattggcagagtggccggaatggctgtgtaccatggaaaactcctggacggattcttcatcaggccattctacaaaatgatgctgcataaacctattactcttcacgatatggagagcgtggattctgagtattacaattcccttaggtggattctcgaaaatgaccccactgaactggacctgcgctttattatcgatgaggagctgttcggtcaaacccaccaacacgaacttaagaacgggggtagcgagattgtcgtgacaaataaaaacaaaaaggagtatatttatttagttatccaatggcgctttgtgaatcgaatccagaagcaaatggccgcttttaaagaaggattctttgagctgattccacaagacttaattaaaatattcgacgagaatgaactggaactgctcatgtgtggattaggcgatgtagacgtcaatgattggcgcgaacacactaagtacaaaaacggctactccgccaaccaccaagtgatccagtggttttggaaggccgtgctgatgatggattctgagaaaagaatccgtctgcttcagttcgtgaccggtacaagtcgagtgcccatgaacggttttgccgagctctatggatctaacggccctcagtccttcacagttgagcagtgggggactccagaaaaattaccccgtgctcatacatgctttaacaggctggatctgccaccctacgagtcatttgaggaattatgggacaagctgcagatggccattgagaacacccaggggttcgatggtgttgactag

SEQ ID NO: 162404 - DNA, 2703 bp, Artificial Sequence
  derived and/or modified sequence
atggccacctgcgccgtggaggtgttcggcctgctggaggacgaggagaacagcagaatcgtgagagtgagagtgatcgccggcatcggcctggccaagaaggacatcctgggcgccagcgacccctacgtgagagtgaccctgtacgaccccatgaacggcgtgctgaccagcgtgcagaccaagaccatcaagaagagcctgaaccccaagtggaacgaggagatcctgttcagagtgcacccccagcagcacagactgctgttcgaggtgttcgacgagaacagactgaccagagacgacttcctgggccaggtggacgtgcccctgtaccccctgcccaccgagaaccccagactggagagaccctacaccttcaaggacttcgtgctgcaccccagaagccacaagagcagagtgaagggctacctgagactgaagatgacctacctgcccaagaccagcggcagcgaggacgacaacgccgagcaggccgaggagctggagcccggctgggtggtgctggaccagcccgacgccgcctgccacctgcagcagcagcaggagcccagccccctgccccccggctgggaggagagacaggacatcctgggcagaacctactacgtgaaccacgagagcagaagaacccagtggaagagacccaccccccaggacaacctgaccgacgccgagaacggcaacatccagctgcaggcccagagagccttcaccaccagaagacagatcagcgaggagaccgagagcgtggacaacagagagagcagcgagaactgggagatcatcagagaggacgaggccaccatgtacagcaaccaggccttccccagccccccccccagcagcaacctggacgtgcccacccacctggccgaggagctgaacgccagactgaccatcttcggcaacagcgccgtgagccagcccgccagcagcagcaaccacagcagcagaagaggcagcctgcaggcctacaccttcgaggagcagcccaccctgcccgtgctgctgcccaccagcagcggcctgccccccggctgggaggagaagcaggacgagagaggcagaagctactacgtggaccacaacagcagaaccaccacctggaccaagcccaccgtgcaggccaccgtggagaccagccagctgaccagcagccagagcagcgccggcccccagagccaggccagcaccagcgacagcggccagcaggtgacccagcccagcgagatcgagcagggcttcctgcccaagggctgggaggtgagacacgcccccaacggcagacccttcttcatcgaccacaacaccaagaccaccacctgggaggaccccagactgaagatccccgcccacctgagaggcaagaccagcctggacaccagcaacgacctgggccccctgccccccggctgggaggagagaacccacaccgacggcagaatcttctacatcaaccacaacatcaagagaacccagtgggaggaccccagactggagaacgtggccatcaccggccccgccgtgccctacagcagagactacaagagaaagtacgagttcttcagaagaaagctgaagaagcagaacgacatccccaacaagttcgagatgaagctgagaagagccaccgtgctggaggacagctacagaagaatcatgggcgtgaagagagccgacttcctgaaggccagactgtggatcgagttcgacggcgagaagggcctggactacggcggcgtggccagagagtggttcttcctgatcagcaaggagatgttcaacccctactacggcctgttcgagtacagcgccaccgacaactacaccctgcagatcaaccccaacagcggcctgtgcaacgaggaccacctgagctacttcaagttcatcggcagagtggccggcatggccgtgtaccacggcaagctgctggacggcttcttcatcagacccttctacaagatgatgctgcacaagcccatcaccctgcacgacatggagagcgtggacagcgagtactacaacagcctgagatggatcctggagaacgaccccaccgagctggacctgagattcatcatcgacgaggagctgttcggccagacccaccagcacgagctgaagaacggcggcagcgagatcgtggtgaccaacaagaacaagaaggagtacatctacctggtgatccagtggagattcgtgaacagaatccagaagcagatggccgccttcaaggagggcttcttcgagctgatcccccaggacctgatcaagatcttcgacgagaacgagctggagctgctgatgtgcggcctgggcgacgtggacgtgaacgactggagagagcacaccaagtacaagaacggctacagcgccaaccaccaggtgatccagtggttctggaaggccgtgctgatgatggacagcgagaagagaatcagactgctgcagttcgtgaccggcaccagcagagtgcccatgaacggcttcgccgagctgtacggcagcaacggcccccagagcttcaccgtggagcagtggggcacccccgagaagctgcccagagcccacacctgcttcaacagactggacctgcccccctacgagagcttcgaggagctgtgggacaagctgcagatggccatcgagaacacccagggcttcgacggcgtggactag

SEQ ID NO: 162405 - protein, 81 aa, Artificial Sequence
  derived and/or modified sequence
MLIKVKTLTGKEIEIDIEPTDKVERIKERVEEKEGIPPQQQRLIYSGKQMNDEKTAADYKILGGSVLHLVLALRGGGGLRQ

SEQ ID NO: 162406 - DNA, 246 bp, Artificial Sequence
  derived and/or modified sequence
atgcttatcaaagtaaagacactgacaggaaaggagatagagatagatattgagccgacagataaagttgaaagaatcaaagagagggtggaagaaaaagaaggtatacctccccaacagcagaggcttatatacagtggaaaacagatgaatgacgaaaagaccgccgctgattacaagatcttgggcggaagtgttctacacctggtactggccttacgcggcggaggaggtttgcgccagtag

SEQ ID NO: 162407 - DNA, 708 bp, Artificial Sequence
  derived and/or modified sequence
tgaaccgaaacgcgggagcaaccctgagcctttccggaacccagtgggggggggggggggggtggagccagacagtgacccggaagtagaagtggcccttgcaggcaagagtgctggagggcggcagcggcgaccggagcggtaggagcagcaatttatccgtgtgcagccccaaactggaaagaagatgctaattaaagtgaagacgctgaccggaaaggagattgagattgacattgaacctacagacaaggtggagcgaatcaaggagcgtgtggaggagaaagagggaatccccccacaacagcagaggctcatctacagtggcaagcagatgaatgatgagaagacagcagctgattacaagattttaggtggttcagtccttcacctggtgttggctctgagaggaggaggtggtcttaggcagtgatggaccctccattttacctctttaccctgtcgctcataatgaggcatcatatatcctctcactctctgggacaccatagccactgccccctcccctggatgcccagtaatgtatgtctactggtgggagactgtgaggatcccaggattcagtattcctggcccagagggcccttgctggctactgggtgttagtttgcagtcctgtgtgcttccctctcttatgactgtgtccctggttgtcaataaaatatttcctggcctcctggaatcttt

SEQ ID NO: 162408 - DNA, 246 bp, Artificial Sequence
  derived and/or modified sequence
atgctgatcaaggtgaagaccctgaccgggaaggagattgaaattgatattgagcccacagacaaggtggagcgcatcaaggagcgggtggaggagaaggagggcatccccccccagcagcagaggctcatctacagcggcaagcagatgaatgatgagaagacagctgctgactacaagatcctgggcggctctgtgctgcacctggtgctggccctgcggggcggcggcggcctgcggcagtag

SEQ ID NO: 162409 - DNA, 246 bp, Artificial Sequence
  derived and/or modified sequence
atgctgatcaaggtgaagaccctgaccggcaaggagatcgagatcgatattgagcccaccgataaggtcgagagaatcaaggaacgggtggaggagaaggagggcattccgccccaacagcagaggctcatctacagtgggaaacagatgaacgacgagaaaaccgctgctgattacaagatcctaggtgggtcagttctgcacctagtccttgcactcaggggcggcggcggcctcaggcagtag

SEQ ID NO: 162410 - DNA, 246 bp, Artificial Sequence
  derived and/or modified sequence
atgctcatcaaagttaaaactttaacaggaaaggagattgagatagacatcgagcccacagataaggtggagcgaattaaggaacgtgtggaggaaaaggaaggcatccccccacagcaacaacgcctcatctactctgggaagcagatgaacgacgagaaaaccgctgcagactacaaaatcttgggcggttccgtgctgcacttagtgctggccctgaggggcggaggtggcttacggcaatag

SEQ ID NO: 162411 - DNA, 246 bp, Artificial Sequence
  derived and/or modified sequence
atgctgatcaaggtgaagaccctgaccggcaaggagatcgagatcgacatcgagcccaccgacaaggtggagagaatcaaggagagagtggaggagaaggagggcatccccccccagcagcagagactgatctacagcggcaagcagatgaacgacgagaagaccgccgccgactacaagatcctgggcggcagcgtgctgcacctggtgctggccctgagaggcggcggcggcctgagacagtag

SEQ ID NO: 162412 - protein, 810 aa, Artificial Sequence
  derived and/or modified sequence
MPMDLILVVWFCVCTARTVVGFGMDPDLQMDIVTELDLVNTTLGVAQVSGMHNASKAFLFQDIEREIHAAPHVSEKLIQLFRNKSEFTILATVQQKPSTSGVILSIRELEHSYFELESSGLRDEIRYHYIHNGKPRTEALPYRMADGQWHKVALSVSASHLLLHVDCNRIYERVIDPPDTNLPPGINLWLGQRNQKHGLFKGIIQDGKIIFMPNGYITQCPNLNHTCPTCSDFLSLVQGIMDLQELLAKMTAKLNYAETRLSQLENCHCEKTCQVSGLLYRDQDSWVDGDHCRNCTCKSGAVECRRMSCPPLNCSPDSLPVHIAGQCCKVCRPKCIYGGKVLAEGQRILTKSCRECRGGVLVKITEMCPPLNCSEKDHILPENQCCRVCRGHNFCAEGPKCGENSECKNWNTKATCECKSGYISVQGDSAYCEDIDECAAKMHYCHANTVCVNLPGLYRCDCVPGYIRVDDFSCTEHDECGSGQHNCDENAICTNTVQGHSCTCKPGYVGNGTICRAFCEEGCRYGGTCVAPNKCVCPSGFTGSHCEKDIDECSEGIIECHNHSRCVNLPGWYHCECRSGFHDDGTYSLSGESCIDIDECALRTHTCWNDSACINLAGGFDCLCPSGPSCSGDCPHEGGLKHNGQVWTLKEDRCSVCSCKDGKIFCRRTACDCQNPSADLFCCPECDTRVTSQCLDQNGHKLYRSGDNWTHSCQQCRCLEGEVDCWPLTCPNLSCEYTAILEGECCPRCVSDPCLADNITYDIRKTCLDSYGVSRLSGSVWTMAGSPCTTCKCKNGRVCCSVDFECLQNN

SEQ ID NO: 162413 - DNA, 2433 bp, Artificial Sequence
  derived and/or modified sequence
atgcctatggaccttattctggtcgtgtggttctgcgtctgcaccgcacgcacagtggtggggttcgggatggacccggatctgcagatggacatcgtgactgaactggatcttgttaatacaactctcggagtagctcaagtcagcggcatgcataatgcttccaaggccttcctcttccaggacatcgaacgcgagatccatgccgccccccatgtgtccgaaaagctaattcaactgtttaggaataaatcggagttcaccatcctggcgacagtgcagcaaaaacccagtacatctggggtgatcctgtcgatccgggagctcgaacattcctactttgaactggagtcttcgggcttacgcgacgaaatcagatatcactatatccacaatggaaaacccagaaccgaagcactgccataccgaatggcggacggtcaatggcacaaggtggccctttccgtctccgcgtcccaccttctgctgcatgttgactgtaacagaatctatgagcgggtaatcgaccccccagacaccaacctccccccaggcataaatttgtggctggggcagagaaatcagaaacacggtctattcaagggtataatacaggacggcaagataatctttatgcctaacggatatataactcaatgcccaaatctgaaccacacatgtccaacttgctcagacttcctttcactggtgcagggaatcatggatctgcaggaactattggcgaagatgaccgccaagctcaactatgccgagactcgtctctctcagctcgagaattgccattgcgagaaaacttgccaggtgtctggactcctctatagggatcaggattcttgggtcgatggcgaccactgcaggaattgcacatgtaaatccggggcagttgaatgcagacgtatgagttgccctccgctcaactgttcccctgactctctgcctgtacatatcgctgggcagtgttgtaaagtttgtaggccgaaatgtatctacgggggaaaggtgttggccgaggggcagaggatcttgaccaagagctgtcgggagtgccgaggcggtgtcttagtcaaaatcacagaaatgtgcccacccctgaactgcagcgagaaggaccacatcttacctgaaaatcagtgctgcagggtttgtaggggacataatttttgcgctgaaggtcctaaatgcggggaaaacagtgaatgtaaaaactggaacacgaaggctacatgcgagtgcaagtcaggttacatcagtgtacagggggatagtgcatactgtgaagatatagatgaatgtgctgccaagatgcattactgtcatgctaataccgtgtgcgtcaatctgcccggcctgtaccgttgtgactgtgtgccaggctatatccgcgttgacgatttcagttgcacggagcacgacgagtgcggtagcggccagcataactgtgatgaaaacgcaatctgtaccaatactgtccaaggacacagctgtacatgtaagcccggatacgttggcaatgggactatttgtagagccttctgcgaagagggctgcaggtacggaggaacgtgcgtcgctcccaataaatgcgtgtgtccctcgggattcacaggttcgcattgtgagaaagacatcgacgagtgcagcgagggcattatagagtgccataatcactcccgttgcgttaacctccctggttggtaccactgcgaatgccgctcaggctttcatgacgatgggacatactctctgagcggtgagtcatgcatcgacattgacgaatgcgccctcaggacccatacctgttggaatgacagcgcatgcatcaatctggcgggaggctttgactgtctgtgcccatctggaccgtcttgtagtggtgattgtccccacgagggaggccttaaacataatggccaggtttggactctgaaggaggaccgctgcagcgtctgtagctgcaaagacgggaagatattctgtcgccggaccgcctgcgattgtcaaaatcctagcgcggacttgttttgctgccctgagtgtgatacccgggtgacctcgcagtgtttagatcagaacgggcacaaactatatcgaagcggagacaactggacccattcatgccagcagtgccggtgcctggaaggagaggtcgattgctggcctctgacgtgccctaatctctcgtgcgagtacaccgcaatactggaaggcgagtgctgtccgcgctgcgtgtccgatccttgtttagcagacaacatcacttatgatatccggaaaacttgtctggactcttacggagtttctagactgagcggatccgtgtggacaatggcaggctctccatgtactacctgtaagtgcaaaaatggacgcgtctgttgctctgttgattttgagtgtctgcagaataattag

SEQ ID NO: 162414 - DNA, 2433 bp, Artificial Sequence
  derived and/or modified sequence
atgcccatggacctgatcctggtggtgtggttctgtgtgtgcacagccaggacagtggtgggcttcggcatggaccctgacctgcagatggacatcgtgacagagctggacctggtgaacaccaccctgggcgtggcccaggtgtctggcatgcacaatgccagcaaggccttcctgttccaggacatcgagcgggagatccatgctgccccccacgtgtctgagaagctgatccagctgttcaggaacaagtctgagttcaccatcctggccaccgtgcagcagaagcccagcaccagcggggtcatcctgagcatccgggagctggagcacagctactttgagctggagagcagcggcctgagagatgagatccgctaccactacatccacaacgggaagcccaggacagaggccctgccctacaggatggctgatggccagtggcacaaggtggccctgtctgtgtctgccagccacctgctgctgcacgtggactgcaaccgcatctatgagcgggtgattgatcctccagacaccaacctgcccccaggcatcaacctgtggctgggccagaggaaccagaagcacggcctcttcaagggcatcatccaggacggcaagatcatcttcatgcccaacggctacatcacccagtgccccaacctgaaccacacctgccccacctgcagcgacttcctgagcctggtgcagggcatcatggacctgcaggagctgctggccaagatgacagccaagctgaactatgcagagacccggctgagccagctggagaactgccactgtgagaagacctgccaggtgtctggcctgctgtacagagaccaggacagctgggtggatggagaccactgcaggaactgcacctgcaagtctggagctgtggagtgcaggaggatgagctgcccccccctgaactgcagcccagacagcctgcctgtgcacatcgccggccagtgctgcaaggtgtgccggcccaagtgcatctatggaggcaaggtgctggccgagggccagaggatcctgaccaagagctgcagagaatgtcggggcggcgtgctggtgaagatcacagagatgtgcccccccctgaactgcagcgagaaggaccacatcctgcctgagaaccagtgctgccgggtgtgccggggccacaacttctgtgccgagggccccaagtgtggagaaaattctgagtgcaagaactggaacaccaaggccacctgtgagtgcaagagcggctacatctctgtgcagggcgacagcgcctactgtgaagatattgatgaatgtgccgccaagatgcactactgccacgccaacacagtgtgtgtgaacctgcccggcctgtaccgctgtgactgtgtgcccggctacatccgggtggatgacttcagctgcacagaacatgatgaatgtggcagcggccagcacaactgtgatgaaaatgccatctgcaccaacacagtgcagggccacagctgcacctgcaagccaggctacgtgggcaatggcaccatctgccgggccttctgtgaggagggctgccgctatggaggcacctgtgtggcccccaacaagtgtgtgtgccccagcggcttcaccggcagccactgtgagaaggacattgatgagtgcagcgagggcatcatcgagtgccacaaccacagccgctgtgtgaacctgcccggctggtaccactgtgagtgccgcagcggcttccatgatgatggcacctacagcctgagcggggagagctgcattgatattgatgaatgtgccctgcggacccacacctgctggaatgattctgcctgcatcaacctggccggcggctttgactgcctgtgccccagcggccccagctgcagcggggactgcccccatgagggcggcctgaagcacaacggccaggtgtggaccctgaaggaggaccgctgcagcgtgtgcagctgcaaggatggcaagatcttctgcagaagaacagcctgtgactgccagaaccccagcgctgacctcttctgctgcccagaatgtgacaccagggtgaccagccagtgcctggaccagaatggccacaagctgtacagaagtggggacaactggacccacagctgccagcagtgccgctgcctggagggggaggtggactgctggcccctgacctgccccaacctgagctgtgagtacacagccatcctggagggggagtgctgcccccgctgtgtgtctgacccctgcctggccgacaacatcacctatgacatcaggaagacctgcctggacagctatggagtgtcccggctgagcggctctgtgtggaccatggccggcagcccctgcaccacctgcaagtgcaagaatggccgggtgtgctgcagcgtggactttgaatgtctgcagaacaactag

SEQ ID NO: 162415 - DNA, 2433 bp, Artificial Sequence
  derived and/or modified sequence
atgcccatggacctgatcctggtggtgtggttctgcgtgtgcaccgcaagaaccgtggtgggctttggaatggatccagatctgcagatggacatcgtaacagagctggacctcgtgaacaccactctgggggtcgcccaagtgagtggcatgcacaatgcgagcaaagctttcctatttcaagatatcgagagagagattcatgctgctccgcacgtctcagagaagctaattcaactgtttagaaacaagtctgaattcacaatcctggcaaccgtccagcagaagcccagtaccagtggggtcattttgtcaatacgggaattggagcattcatattttgagcttgaatcctctgggctaagggacgaaattaggtaccattatatccacaatggtaaacccaggactgaggcgctgccatataggatggccgacggccagtggcataaggtggccctgtctgtgtccgccagtcacctgctgcttcatgtggactgcaaccgtatatacgaacgggtcattgacccacctgatactaacctcccccccggaattaacctgtggctcgggcaacggaatcagaagcacgggttgtttaagggaattatccaagatgggaagatcatttttatgccaaatggctacataacccagtgtccgaacctgaatcatacctgtcctacctgctccgacttcctgtctctcgtacaaggtatcatggacctacaggagctgcttgcaaaaatgacagccaaactcaactatgcagagacccgtctgagccaactcgagaattgtcactgcgagaagacatgtcaggtgtccgggcttctgtatcgggaccaagacagttgggtcgatggcgatcactgtcgaaattgtacgtgcaagtccggggctgttgagtgcaggaggatgagttgccccccattgaattgcagcccggactccctgccagttcacatagctgggcagtgttgtaaggtctgtagaccgaagtgtatctacgggggcaaagttttagccgaaggacagaggatccttactaagtcgtgccgagagtgtagaggcggtgtgctcgtgaagatcactgaaatgtgccctcccctgaactgctctgaaaaggaccacattttgcctgaaaaccagtgttgccgcgtgtgtcggggtcataatttctgcgccgaggggccgaagtgcggcgagaattcggagtgtaaaaattggaatactaaagctacgtgcgagtgcaagagtggctacatctctgttcagggcgacagtgcttactgcgaggacatagacgagtgcgcagccaaaatgcactactgccacgccaacacagtatgcgtgaatctccctggcctgtaccgctgtgactgtgtaccagggtatattagggtcgacgatttcagctgcaccgagcatgacgagtgcggctccggtcagcataactgcgatgaaaatgccatatgtaccaatacagttcagggtcactcctgcacatgtaagcctggatacgttggtaatgggacgatctgcagggctttctgcgaggaaggctgtcggtatggggggacatgcgtggcacccaataagtgtgtttgcccatccgggttcactggatctcactgcgagaaggacattgatgaatgcagcgaaggaatcattgagtgccacaaccactcccgctgcgtaaacctaccaggctggtaccactgcgagtgtcgctccggattccacgatgatggaacatatagcctctccggggagagctgcatcgatattgatgaatgtgcactgcgcacacacacctgttggaatgatagcgcatgtatcaacttagctggcgggttcgactgtttgtgtccttccggacctagttgtagtggagactgtccccacgagggtggcctcaaacacaatggccaggtttggactctcaaagaggacagatgcagcgtctgtagttgtaaggacggtaagattttctgcagacgcactgcatgtgattgtcaaaacccctccgccgatttgttttgttgccctgagtgcgatacgcgggtaacatcacaatgcctcgatcaaaatggccacaaattatatagaagtggggacaactggacacattcctgccagcaatgtcgatgcctcgagggagaggtcgactgctggccactgacgtgcccaaatctctcctgtgaatacaccgctatactcgagggtgagtgctgcccccggtgcgtctctgacccatgcctcgccgacaatataacctacgatatccgtaaaacttgtctcgactcgtatggggtgtcacgactctccgggagcgtttggaccatggcaggcagcccatgcacaacctgcaagtgcaagaacggaagagtctgttgcagcgttgactttgagtgcttgcaaaacaattag

SEQ ID NO: 162416 - DNA, 3022 bp, Artificial Sequence
  derived and/or modified sequence
tatgcgagcgcagcacccggcgctgccgagccacctcccccgccgcccgctagcaagtttggcggctccaagccaggcgcgcctcaggatccaggctcatttgcttccacctagcttcggtgccccctgctaggcggggaccctcgagagcgatgccgatggatttgattttagttgtgtggttctgtgtgtgcactgccaggacagtggtgggctttgggatggaccctgaccttcagatggatatcgtcaccgagcttgaccttgtgaacaccacccttggagttgctcaggtgtctggaatgcacaatgccagcaaagcatttttatttcaagacatagaaagagagatccatgcagctcctcatgtgagtgagaaattaattcagctgttccggaacaagagtgaattcaccattttggccactgtacagcagaagccatccacttcaggagtgatactgtccattcgagaactggagcacagctattttgaactggagagcagtggcctgagggatgagattcggtatcactacatacacaatgggaagccaaggacagaggcacttccttaccgcatggcagatggacaatggcacaaggttgcactgtcagttagcgcctctcatctcctgctccatgtcgactgtaacaggatttatgagcgtgtgatagaccctccagataccaaccttcccccaggaatcaatttatggcttggccagcgcaaccaaaagcatggcttattcaaagggatcatccaagatgggaagatcatctttatgccgaatggatatataacacagtgtccaaatctaaatcacacttgcccaacctgcagtgatttcttaagcctggtgcaaggaataatggatttacaagagcttttggccaagatgactgcaaaactaaattatgcagagacaagacttagtcaattggaaaactgtcattgtgagaagacttgtcaagtgagtggactgctctatcgagatcaagactcttgggtagatggtgaccattgcaggaactgcacttgcaaaagtggtgccgtggaatgccgaaggatgtcctgtccccctctcaattgctccccagactccctcccagtgcacattgctggccagtgctgtaaggtctgccgaccaaaatgtatctatggaggaaaagttcttgcagaaggccagcggattttaaccaagagctgtcgggaatgccgaggtggagttttagtaaaaattacagaaatgtgtcctcctttgaactgctcagaaaaggatcacattcttcctgagaatcagtgctgccgtgtctgtagaggtcataacttttgtgcagaaggacctaaatgtggtgaaaactcagagtgcaaaaactggaatacaaaagctacttgtgagtgcaagagtggttacatctctgtccagggagactctgcctactgtgaagatattgatgagtgtgcagctaagatgcattactgtcatgccaatactgtgtgtgtcaaccttcctgggttatatcgctgtgactgtgtcccaggatacattcgtgtggatgacttctcttgtacagaacacgatgaatgtggcagcggccagcacaactgtgatgagaatgccatctgcaccaacactgtccagggacacagctgcacctgcaaaccgggctacgtggggaacgggaccatctgcagagctttctgtgaagagggctgcagatacggtggaacgtgtgtggctcccaacaaatgtgtctgtccatctggattcacaggaagccactgcgagaaagatattgatgaatgttcagagggaatcattgagtgccacaaccattcccgctgcgttaacctgccagggtggtaccactgtgagtgcagaagcggtttccatgacgatgggacctattcactgtccggggagtcctgtattgacattgatgaatgtgccttaagaactcacacctgttggaacgattctgcctgcatcaacctggcagggggctttgactgtctctgcccctctgggccctcctgctctggtgactgtcctcatgaaggggggctgaagcacaatggccaggtgtggaccttgaaagaagacaggtgttctgtctgctcctgcaaggatggcaagatattctgccgacggacagcttgtgattgccagaatccaagtgctgacctattctgttgcccagaatgtgacaccagagtcacaagtcaatgtttagaccaaaatggtcacaagctgtatcgaagtggagacaattggacccatagctgtcagcagtgtcggtgtctggaaggagaggtagattgctggccactcacttgccccaacttgagctgtgagtatacagctatcttagaaggggaatgttgtccccgctgtgtcagtgacccctgcctagctgataacatcacctatgacatcagaaaaacttgcctggacagctatggtgtttcacggcttagtggctcagtgtggacgatggctggatctccctgcacaacctgtaaatgcaagaatggaagagtctgttgttctgtggattttgagtgtcttcaaaataattgaagtatttacagtggactcaacgcagaagaatggacgaaatgaccatccaacgtgattaaggataggaatcggtagtttggtttttttgtttgttttgtttttttaaccacagataattgccaaagtttccacctgaggacggtgtttggaggttgccttttggacctaccactttgctcattcttgctaacctagtctaggtgacctacagtgccgtgcatttaagtcaatggttgttaaaagaagtttcccgtgttgtaaatcatgtttcccttatcagatcatttgcaaatacatttaaatgatctcatggtaaatgttgatgtattttttggtttattttgtgtactaacataatagagagagactcagctccttttatttattttgttgatttatggatcaaattctaaaataaagttgcctgttgtgacttt

SEQ ID NO: 162417 - DNA, 2433 bp, Artificial Sequence
  derived and/or modified sequence
atgcccatggaccttatactcgttgtctggttctgtgtttgtacagccaggacagtggtcggcttcggcatggatccggatcttcagatggatattgtgaccgagttagatctcgtaaacacaaccctgggagtggcccaggtatcaggcatgcacaatgcttctaaggcctttctctttcaggacattgagcgagagatccatgccgcaccacatgtttccgaaaagttgatacagttgtttcgtaacaagtccgaatttacaatcctggccacagtccaacaaaaacccagcacctcaggagtcatcctgagcatacgcgagctggagcattcatatttcgagctagagagctccgggctgcgcgacgaaatcagatatcattacatccacaacggcaagcccagaaccgaggccctgccttacagaatggccgatggacagtggcataaggtcgctttgtcagtatccgcctcgcatcttctgctgcacgtggactgtaataggatctacgaaagagtgatcgatccgcctgatacaaacctcccccctggcatcaacctgtggctggggcagcgaaaccagaaacatggattattcaagggcattattcaggacgggaagattatctttatgcctaacggttacattactcagtgccctaacctcaatcacacgtgtcctacttgtagtgactttctgtccctcgtgcagggtatcatggacctacaagaattactggcgaagatgaccgctaaactgaactacgccgagacgagactctcccagctcgaaaattgtcactgtgagaaaacctgccaagtgtccggacttctgtaccgcgatcaagattcctgggtggacggtgatcactgtcgcaattgcacctgtaagtccggagctgtagaatgtagacggatgtcctgtccaccccttaattgtagcccggacagcttgcctgttcacatcgccggacagtgttgcaaagtgtgtcgaccgaaatgcatctacggcggtaaggtactcgccgagggtcagcgcattctgacgaagagttgtagggagtgtagaggcggtgtgctggtaaaaatcactgaaatgtgcccacccctgaactgctccgaaaaggaccacatacttcctgaaaatcagtgttgtcgcgtgtgtaggggacataatttctgcgctgagggaccgaagtgtggcgaaaactcggaatgcaagaactggaacaccaaagctacttgcgaatgtaagtcaggttatatctccgtacaaggtgactcggcgtactgcgaggacatcgatgagtgtgcggctaagatgcactactgccacgctaacacagtgtgtgttaatctgccagggctttacagatgtgattgcgtcccaggttatataagagtggatgatttttcttgtacagaacatgacgagtgcggctctggtcagcacaactgtgacgaaaacgctatttgcaccaatactgtgcaagggcactcttgcacatgtaaacctggctatgtcggtaacgggacaatttgccgggcattttgcgaagagggttgtcgctacggaggaacgtgcgtagcccctaacaaatgcgtatgcccaagtggatttactggttcccactgtgagaaggacatcgacgaatgtagtgagggcataatagaatgtcataatcactctagatgcgtgaatctcccagggtggtatcattgtgaatgcagatccggatttcatgacgacgggacgtattcgcttagtggcgagtcttgtatcgacattgatgagtgtgcattgcgcacacacacctgctggaacgactctgcatgtatcaaccttgctggcggttttgattgcctatgtcctagcggcccttcatgttcaggcgactgcccccatgaagggggactgaagcataacggccaagtgtggacactgaaggaggacagatgtagcgtgtgttcctgcaaggatggcaaaatcttctgtaggcgcacagcctgtgattgccagaacccatcagcggatctgttttgctgccccgaatgtgacacacgggtgactagccagtgtctcgatcaaaacggtcacaaactgtaccgttctggtgacaactggacacattcatgccagcaatgccgttgtttggaaggggaggtggactgctggcccctgacatgccccaacctgagctgcgaatacactgctatcctcgagggggagtgctgtccacgctgcgtttcggatccatgtcttgctgataatattacatatgacattcgtaagacttgtctggacagctatggggtgtctcggctgagtggctctgtatggaccatggccggatctccctgcaccacatgtaaatgcaagaacggaagggtttgctgcagcgtcgacttcgaatgcctgcaaaataactag

SEQ ID NO: 162418 - DNA, 2433 bp, Artificial Sequence
  derived and/or modified sequence
atgcccatggacctgatcctggtggtgtggttctgcgtgtgcaccgccagaaccgtggtgggcttcggcatggaccccgacctgcagatggacatcgtgaccgagctggacctggtgaacaccaccctgggcgtggcccaggtgagcggcatgcacaacgccagcaaggccttcctgttccaggacatcgagagagagatccacgccgccccccacgtgagcgagaagctgatccagctgttcagaaacaagagcgagttcaccatcctggccaccgtgcagcagaagcccagcaccagcggcgtgatcctgagcatcagagagctggagcacagctacttcgagctggagagcagcggcctgagagacgagatcagataccactacatccacaacggcaagcccagaaccgaggccctgccctacagaatggccgacggccagtggcacaaggtggccctgagcgtgagcgccagccacctgctgctgcacgtggactgcaacagaatctacgagagagtgatcgacccccccgacaccaacctgccccccggcatcaacctgtggctgggccagagaaaccagaagcacggcctgttcaagggcatcatccaggacggcaagatcatcttcatgcccaacggctacatcacccagtgccccaacctgaaccacacctgccccacctgcagcgacttcctgagcctggtgcagggcatcatggacctgcaggagctgctggccaagatgaccgccaagctgaactacgccgagaccagactgagccagctggagaactgccactgcgagaagacctgccaggtgagcggcctgctgtacagagaccaggacagctgggtggacggcgaccactgcagaaactgcacctgcaagagcggcgccgtggagtgcagaagaatgagctgcccccccctgaactgcagccccgacagcctgcccgtgcacatcgccggccagtgctgcaaggtgtgcagacccaagtgcatctacggcggcaaggtgctggccgagggccagagaatcctgaccaagagctgcagagagtgcagaggcggcgtgctggtgaagatcaccgagatgtgcccccccctgaactgcagcgagaaggaccacatcctgcccgagaaccagtgctgcagagtgtgcagaggccacaacttctgcgccgagggccccaagtgcggcgagaacagcgagtgcaagaactggaacaccaaggccacctgcgagtgcaagagcggctacatcagcgtgcagggcgacagcgcctactgcgaggacatcgacgagtgcgccgccaagatgcactactgccacgccaacaccgtgtgcgtgaacctgcccggcctgtacagatgcgactgcgtgcccggctacatcagagtggacgacttcagctgcaccgagcacgacgagtgcggcagcggccagcacaactgcgacgagaacgccatctgcaccaacaccgtgcagggccacagctgcacctgcaagcccggctacgtgggcaacggcaccatctgcagagccttctgcgaggagggctgcagatacggcggcacctgcgtggcccccaacaagtgcgtgtgccccagcggcttcaccggcagccactgcgagaaggacatcgacgagtgcagcgagggcatcatcgagtgccacaaccacagcagatgcgtgaacctgcccggctggtaccactgcgagtgcagaagcggcttccacgacgacggcacctacagcctgagcggcgagagctgcatcgacatcgacgagtgcgccctgagaacccacacctgctggaacgacagcgcctgcatcaacctggccggcggcttcgactgcctgtgccccagcggccccagctgcagcggcgactgcccccacgagggcggcctgaagcacaacggccaggtgtggaccctgaaggaggacagatgcagcgtgtgcagctgcaaggacggcaagatcttctgcagaagaaccgcctgcgactgccagaaccccagcgccgacctgttctgctgccccgagtgcgacaccagagtgaccagccagtgcctggaccagaacggccacaagctgtacagaagcggcgacaactggacccacagctgccagcagtgcagatgcctggagggcgaggtggactgctggcccctgacctgccccaacctgagctgcgagtacaccgccatcctggagggcgagtgctgccccagatgcgtgagcgacccctgcctggccgacaacatcacctacgacatcagaaagacctgcctggacagctacggcgtgagcagactgagcggcagcgtgtggaccatggccggcagcccctgcaccacctgcaagtgcaagaacggcagagtgtgctgcagcgtggacttcgagtgcctgcagaacaactag

SEQ ID NO: 162419 - protein, 237 aa, Artificial Sequence
  derived and/or modified sequence
MPARLETCISDLDCASSSGSDLSGFLTDEEDCARLQQAASASGPPAPARRGAPNISRASEVPGAQDDEQERRRRRGRTRVRSEALLHSLRRSRRVKANDRERNRMHNLNAALDALRSVLPSFPDDTKLTKIETLRFAYNYIWALAETLRLADQGLPGGGARERLLPPQCVPCLPGPPSPASDAESWGSGAAAASPLSDPSSPAASEDFTYRPGDPVFSFPSLPKDLLHTTPCFIPYH

SEQ ID NO: 162420 - DNA, 1717 bp, Artificial Sequence
  derived and/or modified sequence
cacacgagctgatctgatcgccggcgacatcactcaggagaccggccgggcgcgtggcccctgcaggcgaggcgaggaggccaggccaagttctccgtgcgcccctgcacccttccaggctctcgcacccgcaactggcacagagtaacaaccccaggctgttgggaacgtaagtgcgccctggcggctctgccctcagtccgggctgcagcgctctgagcgcctttctatctgtccgtcggtcctgcacagcgcaacgatgccagcccgccttgagacctgcatctccgacctcgactgcgccagcagcagcggcagtgacctatccggcttcctcaccgacgaggaagactgtgccagactccaacaggcagcctccgcttcggggccgcccgcgccggcccgcaggggcgcgcccaatatctcccgggcgtctgaggttccaggggcacaggacgacgagcaggagaggcggcggcgccgcggccggacgcgggtccgctccgaggcgctgctgcactcgctgcgcaggagccggcgcgtcaaggccaacgatcgcgagcgcaaccgcatgcacaacttgaacgcggccctggacgcactgcgcagcgtgctgccctcgttccccgacgacaccaagctcaccaaaatcgagacgctgcgcttcgcctacaactacatctgggctctggccgagacactgcgcctggcggatcaagggctgcccggaggcggtgcccgggagcgcctcctgccgccgcagtgcgtcccctgcctgcccggtcccccaagccccgccagcgacgcggagtcctggggctcaggtgccgccgccgcctccccgctctctgaccccagtagcccagccgcctccgaagacttcacctaccgccccggcgaccctgttttctccttcccaagcctgcccaaagacttgctccacacaacgccctgtttcattccttaccactaggccctttgtagacactgttactttccccctcccctagtcagcaggcaatagatggggccccagctgccgcctcgggaccccctctccaggcggagggaggaagcgggagctttaaagcagtcggggatacctgagccgcttgttaggtcgccgcaccctcgcggcggatgtctcttggtctgtttctccggccctcagcccagcgcccctcctgcccgcccctagacggcctttccttttgcactttctgaactccacaaaacctcctttgtgactggctcagaactgaccccagccaccacttcagtgtgatttagaaaagggacagatcagcccctgaagacgaggtgaaaagtcaattttacaatttgtagaactctaatgaagaaaaacgagcatgaaaattcggtttgagccggctgacaatacaatgaaaaggcttaaaaagcagagacaaggagtgggcttcatgcattatggatcccgacccccaccactgcagactcgctctaggaagaactggagactcttgcttagctattcaggcacagggctggagagtactttaatttattcaagatgcttcattcatatgaaaatgtatttttgtacataaagagtttattctattatgagctatcaaagtttacatttttgtactgcagacgcttcatgtaaataaaaactaaaaataaaaaaaaaaaaaaaaaaaaaaaaaaaaaaaaaaaaaaaaaaaaaaaaaaa

SEQ ID NO: 162421 - DNA, 714 bp, Artificial Sequence
  derived and/or modified sequence
atgcctgccagacttgaaacatgcattagcgatctggactgcgcgtccagtagcggctctgatctgagcgggttcctgaccgacgaagaagactgcgcacgcctccagcaggctgccagcgcatctggacccccagcccctgcccgcaggggtgctcctaacattagtagggcctctgaagtgcctggggcacaagatgacgaacaggagagaaggcgaaggcgcggacgaacccgcgtcagaagcgaggcgctgctacacagtctgagacgttcccgtcgcgtgaaggccaacgatcgtgagaggaatcgcatgcacaatctgaatgcagcgttagacgccctgcgatccgtgctcccatccttcccagatgatactaagctcaccaaaattgaaaccctgagatttgcttacaactacatttgggccctggcggaaacactcagactcgcggaccagggtctgccgggggggggtgcgagggagcggctgctgcccccacagtgtgtgccctgcttaccaggaccccctagccccgcgtccgacgccgaatcgtgggggagtggcgcggctgctgccagcccgttaagcgatccttcttcccccgccgcttcagaagacttcacctataggcccggggatcccgttttttcctttccgtccttacctaaggatctcctacatactaccccctgctttatcccgtaccattag

SEQ ID NO: 162422 - DNA, 714 bp, Artificial Sequence
  derived and/or modified sequence
atgcctgcccggctggagacctgcatcagtgacctggactgtgccagcagcagcggcagtgacctgagcggcttcctgacagatgaggaggactgtgcccggctgcagcaggccgccagcgccagcggccccccagccccagccaggagaggagcccccaacatcagccgggccagcgaggtgcctggggcccaggatgatgagcaggagaggagaagaagaagaggaagaaccagggtgcgctctgaggccctgctgcacagcctgcggcgcagcagaagagtgaaggccaatgaccgggagaggaacaggatgcacaacctgaatgctgccctggatgccctgcggtctgtgctgcccagcttcccagatgacaccaagctgaccaagattgagaccctgcgctttgcctacaactacatctgggccctggccgagaccctgcggctggccgaccagggcctgcccggcggcggggcccgggagcggctgctgcccccccagtgtgtgccctgcctgcccggcccccccagccctgccagtgatgctgagagctggggcagcggggctgctgctgccagccccctgagtgaccccagcagccctgctgccagcgaggacttcacctacagacctggggaccctgtgttctccttccccagcctgcccaaggacctgctgcacaccaccccctgcttcatcccctaccactag

SEQ ID NO: 162423 - DNA, 714 bp, Artificial Sequence
  derived and/or modified sequence
atgcccgcccggctggagacctgcatcagcgacctggactgcgcctcttcaagtggaagcgacttgtctgggttcctgactgatgaagaggattgcgctcggcttcaacaggccgcttcagcttccgggcctcctgcccctgcaagacgcggagctccaaatatctcgcgggcatcagaggtgcctggggctcaggatgacgagcaagaacgccgacgccgccggggtagaacacgggttagatccgaagctctgctgcactcccttaggcggtcgaggagggtaaaggccaacgatagggaacggaaccggatgcataacctgaatgctgctctcgacgctctcagaagcgtattgcccagtttccccgatgacacaaagctcacaaaaatcgaaaccctgaggttcgcgtacaactacatctgggcattggccgaaaccctcaggctcgccgatcaggggttacccggaggtggtgctcgtgagagactgttgccaccgcaatgcgtaccctgccttcccgggccaccaagcccagcaagcgacgctgagagctggggcagcggagctgctgccgccagtcccctgagtgacccctcctcccccgctgcctcagaggattttacctacaggcctggggaccccgttttttcatttccaagtctccctaaagatctgctacacacaacgccgtgtttcatcccataccactag

SEQ ID NO: 162424 - DNA, 1649 bp, Artificial Sequence
  derived and/or modified sequence
cacacgagctgatctgatcgccggcgacatcactcaggagaccggccgggcgcgtggcccctgcaggcgaggcgaggaggccaggccaagttctccgtgcgcccctgcacccttccaggctctcgcacccgcaactggcacagagtaacaaccccaggctgttgggaacgtaagtgcgccctggcggctctgccctcagtccgggctgcagcgctctgagcgcctttctatctgtccgtcggtcctgcacagcgcaacgatgccagcccgccttgagacctgcatctccgacctcgactgcgccagcagcagcggcagtgacctatccggcttcctcaccgacgaggaagactgtgccagactccaacaggcagcctccgcttcggggccgcccgcgccggcccgcaggggcgcgcccaatatctcccgggcgtctgaggttccaggggcacaggacgacgagcaggagaggcggcggcgccgcggccggacgcgggtccgctccgaggcgctgctgcactcgctgcgcaggagccggcgcgtcaaggccaacgatcgcgagcgcaaccgcatgcacaacttgaacgcggccctggacgcactgcgcagcgtgctgccctcgttccccgacgacaccaagctcaccaaaatcgagacgctgcgcttcgcctacaactacatctgggctctggccgagacactgcgcctggcggatcaagggctgcccggaggcggtgcccgggagcgcctcctgccgccgcagtgcgtcccctgcctgcccggtcccccaagccccgccagcgacgcggagtcctggggctcaggtgccgccgccgcctccccgctctctgaccccagtagcccagccgcctccgaagacttcacctaccgccccggcgaccctgttttctccttcccaagcctgcccaaagacttgctccacacaacgccctgtttcattccttaccactaggccctttgtagacactgttactttccccctcccctagtcagcaggcaatagatggggccccagctgccgcctcgggaccccctctccaggcggagggaggaagcgggagctttaaagcagtcggggatacctgagccgcttgttaggtcgccgcaccctcgcggcggatgtctcttggtctgtttctccggccctcagcccagcgcccctcctgcccgcccctagacggcctttccttttgcactttctgaactccacaaaacctcctttgtgactggctcagaactgaccccagccaccacttcagtgtgatttagaaaagggacagatcagcccctgaagacgaggtgaaaagtcaattttacaatttgtagaactctaatgaagaaaaacgagcatgaaaattcggtttgagccggctgacaatacaatgaaaaggcttaaaaagcagagacaaggagtgggcttcatgcattatggatcccgacccccaccactgcagactcgctctaggaagaactggagactcttgcttagctattcaggcacagggctggagagtactttaatttattcaagatgcttcattcatatgaaaatgtatttttgtacataaagagtttattctattatgagctatcaaagtttacatttttgtactgcagacgcttcatgt

SEQ ID NO: 162425 - DNA, 714 bp, Artificial Sequence
  derived and/or modified sequence
atgcctgcacgcctggagacctgcattagcgatctagactgcgcctcttcctccggctccgacctgtctggctttctaacagacgaagaggattgcgcgcgactgcagcaggccgcaagcgctagcggccctcccgcaccagcgaggaggggggctcccaacatttcccgagcctcggaggttccaggcgcacaggacgatgaacaggaaagacgccgtcgtcgaggaagaacacgtgtgcgtagcgaagccttgctgcacagcctgcggcgttcccgacgggtgaaggcaaatgaccgggaaaggaaccgcatgcacaaccttaacgccgcactggacgctttgcggtccgtgttgccttcattcccagatgacacaaaattgaccaaaattgaaaccctccgcttcgcttataattatatttgggcccttgccgaaacattacgcctggctgaccaggggctgcccggtgggggagctagggagagactcttaccaccccagtgtgtcccctgtctgcccggacctcctagccccgctagtgacgctgaaagctggggcagcggtgccgcagccgcaagtccgctctctgacccatcctccccagctgcgtctgaggactttacctatagacctggggaccctgtcttcagcttccctagtctgcccaaagatctgctgcacaccacaccctgtttcattccctatcattag

SEQ ID NO: 162426 - DNA, 714 bp, Artificial Sequence
  derived and/or modified sequence
atgcccgccagactggagacctgcatcagcgacctggactgcgccagcagcagcggcagcgacctgagcggcttcctgaccgacgaggaggactgcgccagactgcagcaggccgccagcgccagcggcccccccgcccccgccagaagaggcgcccccaacatcagcagagccagcgaggtgcccggcgcccaggacgacgagcaggagagaagaagaagaagaggcagaaccagagtgagaagcgaggccctgctgcacagcctgagaagaagcagaagagtgaaggccaacgacagagagagaaacagaatgcacaacctgaacgccgccctggacgccctgagaagcgtgctgcccagcttccccgacgacaccaagctgaccaagatcgagaccctgagattcgcctacaactacatctgggccctggccgagaccctgagactggccgaccagggcctgcccggcggcggcgccagagagagactgctgcccccccagtgcgtgccctgcctgcccggcccccccagccccgccagcgacgccgagagctggggcagcggcgccgccgccgccagccccctgagcgaccccagcagccccgccgccagcgaggacttcacctacagacccggcgaccccgtgttcagcttccccagcctgcccaaggacctgctgcacaccaccccctgcttcatcccctaccactag

SEQ ID NO: 162427 - protein, 825 aa, Artificial Sequence
  derived and/or modified sequence
MPSTSFPVPSKFPLGPAAAVFGRGETLGPAPRAGGTMKSAEEEHYGYASSNVSPALPLPTAHSTLPAPCHNLQTSTPGIIPPADHPSGYGAALDGGPAGYFLSSGHTRPDGAPALESPRIEITSCLGLYHNNNQFFHDVEVEDVLPSSKRSPSTATLSLPSLEAYRDPSCLSPASSLSSRSCNSEASSYESNYSYPYASPQTSPWQSPCVSPKTTDPEEGFPRGLGACTLLGSPRHSPSTSPRASVTEESWLGARSSRPASPCNKRKYSLNGRQPPYSPHHSPTPSPHGSPRVSVTDDSWLGNTTQYTSSAIVAAINALTTDSSLDLGDGVPVKSRKTTLEQPPSVALKVEPVGEDLGSPPPPADFAPEDYSSFQHIRKGGFCDQYLAVPQHPYQWAKPKPLSPTSYMSPTLPALDWQLPSHSGPYELRIEVQPKSHHRAHYETEGSRGAVKASAGGHPIVQLHGYLENEPLMLQLFIGTADDRLLRPHAFYQVHRITGKTVSTTSHEAILSNTKVLEIPLLPENSMRAVIDCAGILKLRNSDIELRKGETDIGRKNTRVRLVFRVHVPQPSGRTLSLQVASNPIECSQRSAQELPLVEKQSTDSYPVVGGKKMVLSGHNFLQDSKVIFVEKAPDGHHVWEMEAKTDRDLCKPNSLVVEIPPFRNQRITSPVHVSFYVCNGKRKRSQYQRFTYLPANVPIIKTEPTDDYEPAPTCGPVSQGLSPLPRPYYSQQLAMPPDPSSCLVAGFPPCPQRSTLMPAAPGVSPKLHDLSPAAYTKGVASPGHCHLGLPQPAGEAPAVQDVPRPVATHPGSPGQPPPALLPQQ

SEQ ID NO: 162428 - protein, 353 aa, Artificial Sequence
  derived and/or modified sequence
MLQLFIGTADDRLLRPHAFYQVHRITGKTVSTTSHEAILSNTKVLEIPLLPENSMRAVIDCAGILKLRNSDIELRKGETDIGRKNTRVRLVFRVHVPQPSGRTLSLQVASNPIECSQRSAQELPLVEKQSTDSYPVVGGKKMVLSGHNFLQDSKVIFVEKAPDGHHVWEMEAKTDRDLCKPNSLVVEIPPFRNQRITSPVHVSFYVCNGKRKRSQYQRFTYLPANVPIIKTEPTDDYEPAPTCGPVSQGLSPLPRPYYSQQLAMPPDPSSCLVAGFPPCPQRSTLMPAAPGVSPKLHDLSPAAYTKGVASPGHCHLGLPQPAGEAPAVQDVPRPVATHPGSPGQPPPALLPQQ

SEQ ID NO: 162429 - protein, 605 aa, Artificial Sequence
  derived and/or modified sequence
MMDLELPPPGLPSQQDMDLIDILWRQDIDLGVSREVFDFSQRRKEYELEKQKKLEKERQEQLQKEQEKAFFAQLQLDEETGEFLPIQPAQHIQSETSGSANYSQVAHIPKSDALYFDDCMQLLAQTFPFVDDNEVSSATFQSLVPDIPGHIESPVFIATNQAQSPETSVAQVAPVDLDGMQQDIEQVWEELLSIPELQCLNIENDKLVETTMVPSPEAKLTEVDNYHFYSSIPSMEKEVGNCSPHFLNAFEDSFSSILSTEDPNQLTVNSLNSDATVNTDFGDEFYSAFIAEPSISNSMPSPATLSHSLSELLNGPIDVSDLSLCKAFNQNHPESTAEFNDSDSGISLNTSPSVASPEHSVESSSYGDTLLGLSDSEVEELDSAPGSVKQNGPKTPVHSSGDMVQPLSPSQGQSTHVHDAQCENTPEKELPVSPGHRKTPFTKDKHSSRLEAHLTRDELRAKALHIPFPVEKIINLPVVDFNEMMSKEQFNEAQLALIRDIRRRGKNKVAAQNCRKRKLENIVELEQDLDHLKDEKEKLLKEKGENDKSLHLLKKQLSTLYLEVFSMLRDEDGKPYSPSEYSLQQTRDGNVFLVPKSKKPDVKKN

SEQ ID NO: 162430 - protein, 234 aa, Artificial Sequence
  derived and/or modified sequence
MDLIDILWRQDIDLGVSREVFDFSQRRKEYELEKQKKLEKERQEQLQKEQEKAFFAQLQLDEETGEFLPIQPAQHIQSETSGSANYSQVAHIPKSDALYFDDCMQLLAQTFPFVDDNEVSSATFQSLVPDIPGHIESPVFIATNQAQSPETSVAQVAPVDLDGMQQDIEQVWEELLSIPELQCLNIENDKLVETTMVPSPEAKLTEVDNYHFYSSIPSMEKEVGNCSPHFLNAF

SEQ ID NO: 162431 - DNA, 2884 bp, Artificial Sequence
  derived and/or modified sequence
aaatcagggaggcgcagctcctacaccaacgcctttccggggctccgggtgtgtttgttccaactgtttaaactgtttcaaagcgtccgaactccagcgaccttcgcaaacaactctttatctcgcgggcgagagcgctgcccttatttgcgggggagggcaaactgaacgccggcaccggggagctaacggagacctcctctaggtcccccgcctgctgggaccccagctggcagtcccttcccgcccccggaccgcgagcttcttgcgtcagccccggcgcgggtgggggattttcggaagctcagcccgcgcggccggcgggggaaggaagggcccggactcttgccccgcccttgtggggcgggaggcggagcggggcaggggcccgccggcgtgtagccgattaccgagtgccggggagcccggaggagccgccgacgcagccgccaccgccgccgccgccgccaccagagccgccctgtccgcgccgcgcctcggcagccggaacagggccgccgtcggggagccccaacacacggtccacagctcatcatgatggacttggagctgccgccgccgggactcccgtcccagcaggacatggatttgattgacatactttggaggcaagatatagatcttggagtaagtcgagaagtatttgacttcagtcagcgacggaaagagtatgagctggaaaaacagaaaaaacttgaaaaggaaagacaagaacaactccaaaaggagcaagagaaagcctttttcgctcagttacaactagatgaagagacaggtgaatttctcccaattcagccagcccagcacatccagtcagaaaccagtggatctgccaactactcccaggttgcccacattcccaaatcagatgctttgtactttgatgactgcatgcagcttttggcgcagacattcccgtttgtagatgacaatgaggtttcttcggctacgtttcagtcacttgttcctgatattcccggtcacatcgagagcccagtcttcattgctactaatcaggctcagtcacctgaaacttctgttgctcaggtagcccctgttgatttagacggtatgcaacaggacattgagcaagtttgggaggagctattatccattcctgagttacagtgtcttaatattgaaaatgacaagctggttgagactaccatggttccaagtccagaagccaaactgacagaagttgacaattatcatttttactcatctataccctcaatggaaaaagaagtaggtaactgtagtccacattttcttaatgcttttgaggattccttcagcagcatcctctccacagaagaccccaaccagttgacagtgaactcattaaattcagatgccacagtcaacacagattttggtgatgaattttattctgctttcatagctgagcccagtatcagcaacagcatgccctcacctgctactttaagccattcactctctgaacttctaaatgggcccattgatgtttctgatctatcactttgcaaagctttcaaccaaaaccaccctgaaagcacagcagaattcaatgattctgactccggcatttcactaaacacaagtcccagtgtggcatcaccagaacactcagtggaatcttccagctatggagacacactacttggcctcagtgattctgaagtggaagagctagatagtgcccctggaagtgtcaaacagaatggtcctaaaacaccagtacattcttctggggatatggtacaacccttgtcaccatctcaggggcagagcactcacgtgcatgatgcccaatgtgagaacacaccagagaaagaattgcctgtaagtcctggtcatcggaaaaccccattcacaaaagacaaacattcaagccgcttggaggctcatctcacaagagatgaacttagggcaaaagctctccatatcccattccctgtagaaaaaatcattaacctccctgttgttgacttcaacgaaatgatgtccaaagagcagttcaatgaagctcaacttgcattaattcgggatatacgtaggaggggtaagaataaagtggctgctcagaattgcagaaaaagaaaactggaaaatatagtagaactagagcaagatttagatcatttgaaagatgaaaaagaaaaattgctcaaagaaaaaggagaaaatgacaaaagccttcacctactgaaaaaacaactcagcaccttatatctcgaagttttcagcatgctacgtgatgaagatggaaaaccttattctcctagtgaatactccctgcagcaaacaagagatggcaatgttttccttgttcccaaaagtaagaagccagatgttaagaaaaactagatttaggaggatttgaccttttctgagctagtttttttgtactattatactaaaagctcctactgtgatgtgaaatgctcatactttataagtaattctatgcaaaatcatagccaaaactagtatagaaaataatacgaaactttaaaaagcattggagtgtcagtatgttgaatcagtagtttcactttaactgtaaacaatttcttaggacaccatttgggctagtttctgtgtaagtgtaaatactacaaaaacttatttatactgttcttatgtcatttgttatattcatagatttatatgatgatatgacatctggctaaaaagaaattattgcaaaactaaccactatgtacttttttataaatactgtatggacaaaaaatggcattttttatattaaattgtttagctctggcaaaaaaaaaaaattttaagagctggtactaataaaggattattatgactgttaaattaaaaaaaaaaaaaaaaaaaaaaaaaaaaaaaa

SEQ ID NO: 162432 - DNA, 1818 bp, Artificial Sequence
  derived and/or modified sequence
atgatggacctggaactgcccccgcccggcctgcccagtcaacaggacatggacctgatcgacatcctctggcggcaagacattgatctcggtgtttcccgggaggtctttgatttcagtcagcggaggaaggagtacgagctggaaaaacagaaaaagctcgagaaagagagacaggagcagctgcagaaggagcaggagaaagctttcttcgctcagctgcagcttgacgaagagaccggggagtttctgcctatccaacctgcccaacacatccagagcgagaccagcggctctgccaattattcccaggtcgctcacatcccaaaaagcgacgctctgtattttgacgactgcatgcaactgctcgcccagactttcccattcgttgacgacaatgaagttagttctgccacgtttcagtcactagtgccggacattcccgggcacatcgagtcacctgttttcatcgccaccaatcaggctcaaagtcctgagacaagcgtggctcaagtcgccccagtggatctagatggaatgcaacaggacatcgagcaggtctgggaagagctcttgtcaatccctgaactacaatgcctgaacatcgagaatgacaagttagtggagactaccatggtgccctcccccgaggccaagttaactgaagttgacaactaccacttctattcctcaatcccaagcatggagaaagaggtcgggaactgtagccctcacttcctgaatgcttttgaagacagcttttcctccattctgtctaccgaagatccaaaccagctcacagtgaattccctcaactcagatgctaccgttaatacggacttcggggatgaattctattctgcttttatcgctgagccaagtatttcaaactctatgccttcgcccgcaactctttcccactcgttgtctgaactgctcaacggaccaatagacgttagcgacttgagcttgtgtaaggcgttcaatcagaaccacccagaatccactgctgaattcaacgatagcgatagtggcatctctctgaacacctctccttccgtagcctctcccgaacactccgtcgagtcctcatcctacggagatacactactcggactttcagattctgaggtcgaggagcttgacagcgcaccgggctccgtgaagcaaaacggacccaagactcccgtgcactctagtggcgacatggtacagcctctgagtccaagtcagggccagtccactcacgtccatgatgctcagtgtgaaaatactcctgagaaagagctgcccgtgagcccaggccataggaaaacgccttttactaaggacaagcattcaagccggttggaagcccatctgactcgggatgagcttagagcaaaagctttgcatatcccatttcccgtggagaagattatcaatctgccagtggtggatttcaacgaaatgatgagcaaggagcagtttaatgaggcccagctggccctgattagagacatccgcaggcgtggtaaaaataaagtggctgcccagaattgcagaaagcggaagctggagaacatagtggagctcgaacaagatctggaccacctgaaggatgaaaaagagaagcttctgaaggagaaaggggaaaacgacaagtcccttcacttgctgaaaaaacaactgtcaaccttatatctggaagtattttcgatgcttagggatgaagacggcaaaccctatagcccatccgagtactccctccagcaaaccagggatgggaacgtgtttttagtgcccaagagcaaaaaacctgacgtcaagaaaaattag

SEQ ID NO: 162433 - DNA, 1818 bp, Artificial Sequence
  derived and/or modified sequence
atgatggacctggagctgcccccacctggcctgcccagccagcaggacatggacctgattgacatcctgtggaggcaggacatcgacctgggcgtgtcccgggaggtgtttgacttcagccagaggaggaaggagtatgagctggagaagcagaagaagctggagaaggagcggcaggagcagctgcagaaggagcaggagaaggccttctttgcccagctgcagctggatgaggagaccggggagttcctgcccatccagcctgcccagcacatccagagcgagaccagcggcagcgccaactacagccaggtggcccacatccccaagagtgatgccctgtactttgatgactgcatgcagctgctggcccagaccttcccctttgtggatgacaatgaggtgtcctctgccaccttccagagcctggtgcctgacatccctggccacatcgagagccctgtgttcatcgccaccaaccaggcccagagccctgagacctctgtggcccaggtggcccctgtggacctggatggcatgcagcaggacatcgagcaggtgtgggaggagctgctgagcatccctgagctgcagtgcctgaacattgaaaatgacaagctggtggagaccaccatggtgcccagccctgaggccaagctgacagaggtggacaactaccacttctacagcagcatccccagcatggagaaggaggtgggcaactgcagcccccacttcctgaatgcctttgaagattccttcagcagcatcctgagcacagaggaccccaaccagctgactgtgaacagcctgaacagtgatgccaccgtgaacacagactttggagatgagttctacagcgccttcatcgccgagcccagcatcagcaacagcatgcccagccctgccaccctgagccacagcctgtctgagctgctgaatggccccattgatgtgtctgacctgagcctgtgcaaggccttcaaccagaaccaccctgagagcacagctgagttcaatgacagcgacagcggcatcagcctgaacaccagccccagcgtggccagccctgagcacagcgtggagagcagcagctatggagacaccctgctgggcctgagtgacagcgaggtggaggagctggacagcgcccctggctctgtgaagcagaatggccccaagacccctgtgcacagcagcggggacatggtgcagcccctgagccccagccagggccagagcacccacgtgcatgatgcccagtgtgagaacaccccagagaaggagctgcctgtgtccccaggccacaggaagacccccttcaccaaggacaagcacagcagccggctggaggcccacctgaccagagatgagctgcgggccaaggccctgcacatccccttccctgtggagaagatcatcaacctgcctgtggtggacttcaatgagatgatgagcaaggagcagttcaatgaggcccagctggccctgatccgggacatcagaagaagaggcaagaacaaggtggccgcccagaactgcaggaagaggaagctggagaacatcgtggagctggagcaggacctggaccacctgaaggatgagaaggagaagctgctgaaggagaagggagaaaatgacaagagcctgcacctgctgaagaagcagctgagcaccctgtacctggaggtgttctccatgctgagagatgaagatggcaagccctacagccccagcgagtacagcctgcagcagaccagagatggaaatgtgttcctggtgcccaagagcaagaagccagatgtgaagaagaactag

SEQ ID NO: 162434 - DNA, 1818 bp, Artificial Sequence
  derived and/or modified sequence
atgatggacctggagctgcccccccccggcctgcccagccagcaggacatggaccttattgacattttgtggaggcaggatatcgacctgggcgtatcccgcgaggtcttcgatttcagccagcggcggaaggaatacgaactggagaaacagaagaaactggagaaagaacggcaagaacaactgcaaaaggagcaggagaaggccttttttgcacagctgcagctggacgaggagacaggggaattcctgcctatccagcccgctcagcatatccagtctgagaccagtggtagcgccaattactcccaggtagcacatattcctaagagcgacgccttatacttcgacgactgtatgcaactcctggcccagacattcccgtttgtggacgataatgaagtgagctctgccacattccagagtttggtcccagatatccctgggcatatcgagtctcccgtgtttatcgctacaaatcaagctcaatcccccgagaccagtgtcgcacaggttgcaccagttgacctggacggcatgcagcaggacatcgaacaagtttgggaagaactgctgtccatccctgagcttcagtgtctgaacattgaaaatgacaagctagtcgaaacaaccatggtacctagtcctgaagctaaactgaccgaggtggataactatcatttctacagcagcattccgtctatggaaaaagaggttggtaactgctccccccactttttaaatgccttcgaggacagtttttcctccatattgagtaccgaggaccctaatcagctgacagtaaattctcttaatagcgatgccactgtcaatacggattttggagacgagttctactctgccttcatcgccgaaccctctatcagtaacagtatgccctccccagctacgctaagccacagtctgtcggagctcctaaatgggccaatcgatgtaagcgatctgtccctttgtaaggcctttaaccagaatcatccagagtcaaccgctgaatttaacgattcagactctggaatctctctgaataccagcccttctgttgccagccccgaacactccgtggagagctctagttatggcgacacactgctggggttgtcagattcagaggtggaggagctggactctgcgcctgggtccgtaaaacaaaatgggcctaagacaccagtccactctagtggagacatggtgcagcccctgagcccttctcagggccagtccacccacgtgcacgacgcacagtgtgagaacaccccggagaaggaactgccagtttcaccgggtcaccggaagaccccctttaccaaagacaaacactcatcccgactcgaggctcacctgactcgagacgagctgagagcaaaggccctccacattcctttcccagttgaaaaaatcattaatctgccagtggtggattttaatgagatgatgtcgaaagaacagtttaacgaggcccaactggcactgattcgggatatacgacgacggggcaaaaataaggtggcggctcagaattgcagaaaaagaaaattagaaaacatcgtagagctggaacaggaccttgaccacttaaaagacgaaaaggagaaactgctgaaggagaaaggcgagaacgataagtcgctgcatctactgaagaaacagttgagcactttgtacctggaggtcttcagtatgttacgggacgaagatggtaaaccatacagtccatccgaatattccctccagcaaaccagggacgggaacgtgtttttagtaccaaagtctaagaaacccgatgtgaaaaaaaattag

SEQ ID NO: 162435 - DNA, 2853 bp, Artificial Sequence
  derived and/or modified sequence
aaatcagggaggcgcagctcctacaccaacgcctttccggggctccgggtgtgtttgttccaactgtttaaactgtttcaaagcgtccgaactccagcgaccttcgcaaacaactctttatctcgcgggcgagagcgctgcccttatttgcgggggagggcaaactgaacgccggcaccggggagctaacggagacctcctctaggtcccccgcctgctgggaccccagctggcagtcccttcccgcccccggaccgcgagcttcttgcgtcagccccggcgcgggtgggggattttcggaagctcagcccgcgcggccggcgggggaaggaagggcccggactcttgccccgcccttgtggggcgggaggcggagcggggcaggggcccgccggcgtgtagccgattaccgagtgccggggagcccggaggagccgccgacgcagccgccaccgccgccgccgccgccaccagagccgccctgtccgcgccgcgcctcggcagccggaacagggccgccgtcggggagccccaacacacggtccacagctcatcatgatggacttggagctgccgccgccgggactcccgtcccagcaggacatggatttgattgacatactttggaggcaagatatagatcttggagtaagtcgagaagtatttgacttcagtcagcgacggaaagagtatgagctggaaaaacagaaaaaacttgaaaaggaaagacaagaacaactccaaaaggagcaagagaaagcctttttcgctcagttacaactagatgaagagacaggtgaatttctcccaattcagccagcccagcacatccagtcagaaaccagtggatctgccaactactcccaggttgcccacattcccaaatcagatgctttgtactttgatgactgcatgcagcttttggcgcagacattcccgtttgtagatgacaatgaggtttcttcggctacgtttcagtcacttgttcctgatattcccggtcacatcgagagcccagtcttcattgctactaatcaggctcagtcacctgaaacttctgttgctcaggtagcccctgttgatttagacggtatgcaacaggacattgagcaagtttgggaggagctattatccattcctgagttacagtgtcttaatattgaaaatgacaagctggttgagactaccatggttccaagtccagaagccaaactgacagaagttgacaattatcatttttactcatctataccctcaatggaaaaagaagtaggtaactgtagtccacattttcttaatgcttttgaggattccttcagcagcatcctctccacagaagaccccaaccagttgacagtgaactcattaaattcagatgccacagtcaacacagattttggtgatgaattttattctgctttcatagctgagcccagtatcagcaacagcatgccctcacctgctactttaagccattcactctctgaacttctaaatgggcccattgatgtttctgatctatcactttgcaaagctttcaaccaaaaccaccctgaaagcacagcagaattcaatgattctgactccggcatttcactaaacacaagtcccagtgtggcatcaccagaacactcagtggaatcttccagctatggagacacactacttggcctcagtgattctgaagtggaagagctagatagtgcccctggaagtgtcaaacagaatggtcctaaaacaccagtacattcttctggggatatggtacaacccttgtcaccatctcaggggcagagcactcacgtgcatgatgcccaatgtgagaacacaccagagaaagaattgcctgtaagtcctggtcatcggaaaaccccattcacaaaagacaaacattcaagccgcttggaggctcatctcacaagagatgaacttagggcaaaagctctccatatcccattccctgtagaaaaaatcattaacctccctgttgttgacttcaacgaaatgatgtccaaagagcagttcaatgaagctcaacttgcattaattcgggatatacgtaggaggggtaagaataaagtggctgctcagaattgcagaaaaagaaaactggaaaatatagtagaactagagcaagatttagatcatttgaaagatgaaaaagaaaaattgctcaaagaaaaaggagaaaatgacaaaagccttcacctactgaaaaaacaactcagcaccttatatctcgaagttttcagcatgctacgtgatgaagatggaaaaccttattctcctagtgaatactccctgcagcaaacaagagatggcaatgttttccttgttcccaaaagtaagaagccagatgttaagaaaaactagatttaggaggatttgaccttttctgagctagtttttttgtactattatactaaaagctcctactgtgatgtgaaatgctcatactttataagtaattctatgcaaaatcatagccaaaactagtatagaaaataatacgaaactttaaaaagcattggagtgtcagtatgttgaatcagtagtttcactttaactgtaaacaatttcttaggacaccatttgggctagtttctgtgtaagtgtaaatactacaaaaacttatttatactgttcttatgtcatttgttatattcatagatttatatgatgatatgacatctggctaaaaagaaattattgcaaaactaaccactatgtacttttttataaatactgtatggacaaaaaatggcattttttatattaaattgtttagctctggcaaaaaaaaaaaattttaagagctggtactaataaaggattattatgactgttaaatta

SEQ ID NO: 162436 - DNA, 2651 bp, Artificial Sequence
  derived and/or modified sequence
actttctcggccggggaggggttcgggctcgggcacccggagttggcccctcgtaacgccgcgggaaagtgcgggcgagggcagtggactctgaggccggagtcggcggcacccggggcttctagttcggacgcggtgccccctggtggcgctcaccgcgcgcgtggccttggcttccgtgacagcgctcggttggccgtcacagcagccctcggttggccctttcctgctttatagcgtgcaaacctcgccgcgccagggccaagggacaggttggagctgttgatctgttgcgcaattgctattttccccagagcggctttgtctttggatttagcgtttcagaattgcaattccaaaatgtgtaagacgggatattctcttctgtgctgtcaagggacatggatttgattgacatactttggaggcaagatatagatcttggagtaagtcgagaagtatttgacttcagtcagcgacggaaagagtatgagctggaaaaacagaaaaaacttgaaaaggaaagacaagaacaactccaaaaggagcaagagaaagcctttttcgctcagttacaactagatgaagagacaggtgaatttctcccaattcagccagcccagcacatccagtcagaaaccagtggatctgccaactactcccaggttgcccacattcccaaatcagatgctttgtactttgatgactgcatgcagcttttggcgcagacattcccgtttgtagatgacaatgaggtttcttcggctacgtttcagtcacttgttcctgatattcccggtcacatcgagagcccagtcttcattgctactaatcaggctcagtcacctgaaacttctgttgctcaggtagcccctgttgatttagacggtatgcaacaggacattgagcaagtttgggaggagctattatccattcctgagttacagtgtcttaatattgaaaatgacaagctggttgagactaccatggttccaagtccagaagccaaactgacagaagttgacaattatcatttttactcatctataccctcaatggaaaaagaagtaggtaactgtagtccacattttcttaatgcttttgaggattccttcagcagcatcctctccacagaagaccccaaccagttgacagtgaactcattaaattcagatgccacagtcaacacagattttggtgatgaattttattctgctttcatagctgagcccagtatcagcaacagcatgccctcacctgctactttaagccattcactctctgaacttctaaatgggcccattgatgtttctgatctatcactttgcaaagctttcaaccaaaaccaccctgaaagcacagcagaattcaatgattctgactccggcatttcactaaacacaagtcccagtgtggcatcaccagaacactcagtggaatcttccagctatggagacacactacttggcctcagtgattctgaagtggaagagctagatagtgcccctggaagtgtcaaacagaatggtcctaaaacaccagtacattcttctggggatatggtacaacccttgtcaccatctcaggggcagagcactcacgtgcatgatgcccaatgtgagaacacaccagagaaagaattgcctgtaagtcctggtcatcggaaaaccccattcacaaaagacaaacattcaagccgcttggaggctcatctcacaagagatgaacttagggcaaaagctctccatatcccattccctgtagaaaaaatcattaacctccctgttgttgacttcaacgaaatgatgtccaaagagcagttcaatgaagctcaacttgcattaattcgggatatacgtaggaggggtaagaataaagtggctgctcagaattgcagaaaaagaaaactggaaaatatagtagaactagagcaagatttagatcatttgaaagatgaaaaagaaaaattgctcaaagaaaaaggagaaaatgacaaaagccttcacctactgaaaaaacaactcagcaccttatatctcgaagttttcagcatgctacgtgatgaagatggaaaaccttattctcctagtgaatactccctgcagcaaacaagagatggcaatgttttccttgttcccaaaagtaagaagccagatgttaagaaaaactagatttaggaggatttgaccttttctgagctagtttttttgtactattatactaaaagctcctactgtgatgtgaaatgctcatactttataagtaattctatgcaaaatcatagccaaaactagtatagaaaataatacgaaactttaaaaagcattggagtgtcagtatgttgaatcagtagtttcactttaactgtaaacaatttcttaggacaccatttgggctagtttctgtgtaagtgtaaatactacaaaaacttatttatactgttcttatgtcatttgttatattcatagatttatatgatgatatgacatctggctaaaaagaaattattgcaaaactaaccactatgtacttttttataaatactgtatggacaaaaaatggcattttttatattaaattgtttagctctggcaaaaaaaaaaaattttaagagctggtactaataaaggattattatgactgttaaatta

SEQ ID NO: 162437 - DNA, 979 bp, Artificial Sequence
  derived and/or modified sequence
actttctcggccggggaggggttcgggctcgggcacccggagttggcccctcgtaacgccgcgggaaagtgcgggcgagggcagtggactctgaggccggagtcggcggcacccggggcttctagttcggacgcggtgccccctggtggcgctcaccgcgcgcgtggccttggcttccgtgacagcgctcggttggccgtcacagcagccctcggttggccctttcctgctttatagcgtgcaaacctcgccgcgccagggccaagggacaggacatggatttgattgacatactttggaggcaagatatagatcttggagtaagtcgagaagtatttgacttcagtcagcgacggaaagagtatgagctggaaaaacagaaaaaacttgaaaaggaaagacaagaacaactccaaaaggagcaagagaaagcctttttcgctcagttacaactagatgaagagacaggtgaatttctcccaattcagccagcccagcacatccagtcagaaaccagtggatctgccaactactcccaggttgcccacattcccaaatcagatgctttgtactttgatgactgcatgcagcttttggcgcagacattcccgtttgtagatgacaatgaggtttcttcggctacgtttcagtcacttgttcctgatattcccggtcacatcgagagcccagtcttcattgctactaatcaggctcagtcacctgaaacttctgttgctcaggtagcccctgttgatttagacggtatgcaacaggacattgagcaagtttgggaggagctattatccattcctgagttacagtgtcttaatattgaaaatgacaagctggttgagactaccatggttccaagtccagaagccaaactgacagaagttgacaattatcatttttactcatctataccctcaatggaaaaagaagtaggtaactgtagtccacattttcttaatgcttttga

SEQ ID NO: 162438 - DNA, 975 bp, Artificial Sequence
  derived and/or modified sequence
atagcgtgcaaacctcgccgcgccagggccaagggacaggttggagctgttgatctgttgcgcaattgctattttccccagagcggctttgtctttggatttagcgtttcagaattgcaattccaaaatgtgacatggatttgattgacatactttggaggcaagatatagatcttggagtaagtcgagaagtatttgacttcagtcagcgacggaaagagtatgagctggaaaaacagaaaaaacttgaaaaggaaagacaagaacaactccaaaaggagcaagagaaagcctttttcgctcagttacaactagatgaagagacaggtgaatttctcccaattcagccagcccagcacatccagtcagaaaccagtggatctgccaactactcccaggttgcccacattcccaaatcagatgctttgtactttgatgactgcatgcagcttttggcgcagacattcccgtttgtagatgacaatgaggtttcttcggctacgtttcagtcacttgttcctgatattcccggtcacatcgagagcccagtcttcattgctactaatcaggctcagtcacctgaaacttctgttgctcaggtagcccctgttgatttagacggtatgcaacaggacattgagcaagtttgggaggagctattatccattcctgagttacagtgtcttaatattgaaaatgacaagctggttgagactaccatggttccaagtccagaagccaaactgacagaagttgacaattatcatttttactcatctataccctcaatggaaaaagaagtaggtaactgtagtccacattttcttaatgcttttgaggattccttcagcagcatcctctccacagaagaccccaaccagttgacagtgaactcattaaattcagatgccacagtcaacacagattttggtgatgaattttattctgctttcatagctgagcccagtatcagca

SEQ ID NO: 162439 - DNA, 1818 bp, Artificial Sequence
  derived and/or modified sequence
atgatggacctggaacttccacctccagggctgccttcccagcaggacatggacctaattgatatcctgtggcggcaggatattgatctcggtgtctcccgagaagtgttcgatttttcccagagacggaaagagtacgagttagagaaacagaaaaaacttgaaaaggagcgacaggagcagcttcagaaggagcaggaaaaggccttcttcgcccagctgcaattagacgaagagaccggagaattcctacccattcagcctgcgcagcatattcagtctgagacatccgggtcggcaaattactcacaggtagctcatatacccaaatcagacgccctctacttcgatgactgcatgcagctcctggcacagacatttccttttgtagatgacaatgaggtgtcctcggctacattccagtcactggttccagacatccccggacacattgagtctcctgtcttcatcgcaacaaaccaagctcagtctccagagacatctgtcgcacaagtagccccagtggacctggacggaatgcagcaggacattgagcaggtatgggaggaactgctctccattcccgagcttcagtgtctcaacattgagaatgacaagctcgtcgagaccacaatggtaccatcacctgaagccaaactgaccgaggtcgacaattaccatttttactccagcatcccttctatggaaaaggaagtgggcaattgttccccacacttcctgaacgctttcgaagactccttcagtagcatccttagcacagaggatcctaatcagctcacagtaaacagtctcaactccgatgcaaccgtaaacactgactttggggacgagttctactctgcatttattgccgaacccagtattagcaattccatgccctccccggctacattgtcccattctctctctgagctgctgaacggccctatagatgtctctgatctaagcttatgcaaagctttcaaccaaaaccatccagaatctacggccgaattcaatgactccgacagcggcatttccctgaatacaagcccgagtgtcgcatctccagagcactccgtggagtctagcagttacggcgataccctgctcggcctcagtgactctgaggtagaagaactcgactcggccccaggatccgtaaagcaaaacggcccaaagactcccgtccatagctctggggatatggtacagccgctgagccctagccaggggcaaagcacccacgtccatgatgctcagtgcgagaacacccctgaaaaagaactccccgtatcacccggtcacaggaaaacccccttcactaaggacaagcattcttcaaggctggaggcacatttaacacgggatgagcttcgggctaaagctctgcatatccccttccccgttgagaagattattaacttaccggtggttgactttaacgagatgatgagtaaagagcagttcaacgaggcgcagctcgcactaatccgggatatcaggcgcagagggaagaacaaagtggcggctcagaactgtcgaaagcgcaaactggaaaacatcgtagaattagagcaagacctggatcatcttaaggacgagaaagagaaactattaaaagagaaaggagaaaacgataagtccctccacctgcttaagaagcagttgagcaccttatacttggaagtcttcagcatgctgagggatgaggacggaaagccctacagcccctccgagtacagtcttcagcagaccagagacggaaacgttttcctcgttccgaagagcaaaaagccggacgtgaagaagaactag

SEQ ID NO: 162440 - DNA, 1818 bp, Artificial Sequence
  derived and/or modified sequence
atgatggacctggagctgcccccccccggcctgcccagccagcaggacatggacctgatcgacatcctgtggagacaggacatcgacctgggcgtgagcagagaggtgttcgacttcagccagagaagaaaggagtacgagctggagaagcagaagaagctggagaaggagagacaggagcagctgcagaaggagcaggagaaggccttcttcgcccagctgcagctggacgaggagaccggcgagttcctgcccatccagcccgcccagcacatccagagcgagaccagcggcagcgccaactacagccaggtggcccacatccccaagagcgacgccctgtacttcgacgactgcatgcagctgctggcccagaccttccccttcgtggacgacaacgaggtgagcagcgccaccttccagagcctggtgcccgacatccccggccacatcgagagccccgtgttcatcgccaccaaccaggcccagagccccgagaccagcgtggcccaggtggcccccgtggacctggacggcatgcagcaggacatcgagcaggtgtgggaggagctgctgagcatccccgagctgcagtgcctgaacatcgagaacgacaagctggtggagaccaccatggtgcccagccccgaggccaagctgaccgaggtggacaactaccacttctacagcagcatccccagcatggagaaggaggtgggcaactgcagcccccacttcctgaacgccttcgaggacagcttcagcagcatcctgagcaccgaggaccccaaccagctgaccgtgaacagcctgaacagcgacgccaccgtgaacaccgacttcggcgacgagttctacagcgccttcatcgccgagcccagcatcagcaacagcatgcccagccccgccaccctgagccacagcctgagcgagctgctgaacggccccatcgacgtgagcgacctgagcctgtgcaaggccttcaaccagaaccaccccgagagcaccgccgagttcaacgacagcgacagcggcatcagcctgaacaccagccccagcgtggccagccccgagcacagcgtggagagcagcagctacggcgacaccctgctgggcctgagcgacagcgaggtggaggagctggacagcgcccccggcagcgtgaagcagaacggccccaagacccccgtgcacagcagcggcgacatggtgcagcccctgagccccagccagggccagagcacccacgtgcacgacgcccagtgcgagaacacccccgagaaggagctgcccgtgagccccggccacagaaagacccccttcaccaaggacaagcacagcagcagactggaggcccacctgaccagagacgagctgagagccaaggccctgcacatccccttccccgtggagaagatcatcaacctgcccgtggtggacttcaacgagatgatgagcaaggagcagttcaacgaggcccagctggccctgatcagagacatcagaagaagaggcaagaacaaggtggccgcccagaactgcagaaagagaaagctggagaacatcgtggagctggagcaggacctggaccacctgaaggacgagaaggagaagctgctgaaggagaagggcgagaacgacaagagcctgcacctgctgaagaagcagctgagcaccctgtacctggaggtgttcagcatgctgagagacgaggacggcaagccctacagccccagcgagtacagcctgcagcagaccagagacggcaacgtgttcctggtgcccaagagcaagaagcccgacgtgaagaagaactag

SEQ ID NO: 162441 - protein, 207 aa, Artificial Sequence
  derived and/or modified sequence
MTMDGDSSTTDASQLGISADYIGGSHYVIQPHDDTEDSMNDHEDTNGSKESFREQDIYLPIANVARIMKNAIPQTGKIAKDAKECVQECVSEFISFITSEASERCHQEKRKTINGEDILFAMSTLGFDSYVEPLKLYLQKFREAMKGEKGIGGAVTATDGLSEELTEEAFTNQLPAGLITTDGQQQNVMVYTTSYQQISGVQQIQFS

SEQ ID NO: 162442 - DNA, 3482 bp, Artificial Sequence
  derived and/or modified sequence
ggagggaggggaggccgagtcctggaagcggagctccgcgctgggactggttccttcgcagccattttctgtccaaccaaacagccgattggagacgggagccaaccagggctgcattggaggttgaaatcacaaagattagacacctttttagataggtgttcttcagcaccactgacaacacggttctgacagtatttcatgacaatggatggtgacagttctacaacagatgcttctcaactaggaatctctgcagactatattggaggaagtcattatgttatacagcctcatgatgatactgaggacagcatgaatgatcatgaagacacaaatggttcaaaagaaagtttcagagaacaagatatatatcttccaatagcaaacgtggctaggataatgaaaaatgccatacctcaaacgggaaagattgcaaaagatgccaaagaatgtgttcaagaatgtgtaagtgagttcatcagttttataacatctgaagcaagtgaaaggtgccatcaagagaaacggaaaacaatcaatggagaagatattctctttgctatgtctactttaggctttgacagttatgtggaacctctgaaattataccttcagaaattcagagaggctatgaaaggagaaaagggaattggtggagcagtcacagctacagatggactaagtgaagagcttacagaggaggcatttactaaccagttaccagctggcttaataaccacagacggtcaacaacaaaatgttatggtttacacaacatcatatcaacagatttctggtgttcagcaaattcagttttcatgatctgaagaaatgatggaatggggagtgtagagaaatgagagtctgtatgattctggaacagagacatcagaaggaaagactggtgaaaagatgtatctttgtatattaatagctgtaatgtagcttcctgatgcttgactaattgaggtgttaattctgacttgagaatctttttcatgaatgattttaaagaaaaatttggattttaaaggtattaaaatatttttgttttgtacgagagtttgttgctctgtatgactcctgtatgcattgtatattgcaatttattactgtcagagatttgtagacagtttcttattttcatattgaatcatgttacttttgtaattcaagtaagcggctgggttaattcatgatgtttgcccttttaataaaatataagggtagagttcattttgaatgcaagttgcctttattataaatttgagtttgtcttggttataccttgcatgataacctagctagatttctagcatttgctgtatttattaaaattattatttttttggtaaaacattaatagtttaagcagcatcatttttttaaaaaatgtaattgaataagtgtgaatgcagaagcaaatattgtctgccctgttaaacttggtgcccattaacagtgtttacactgttcatcgtgcctgttaatgtagttttagttactggagcttttttaagactagatttggttttgagttacatttttaagaatgtgggaatatatttaagtttaatgtagtcctagtgctcttgaaatggtgcccctttcatttggtacatgattttttttcaaatcatatcttcaagtactatagtattctcttacagaagaggagttttatagtctgatggtaaatgtcttcattttacctttttaattgaaatgtcaagtttcctgttacactatggaaaccaagaaacatcagacatcattgcgtgtacagaccttttgcatgggtgagtggatgaaatggagaacagagtgagtgctgtgaacggtgtgaaatagaagccaacttctagtatgctgtcttcatctctgcaataaactaaacgtaaataatgtaactttgtataatttagtagtatgtacttggattgtttctttttgaaaagtgaggatttgtattttctcatctattctttttggtgttaattaacttgagggatttcttttttaagtttttaatatcaaaaattgctattgtatagtttgcctaaaaggaagttggagtgaatatcatctttgaaggacactcaaatttataaggtagaagcaatttcccagatataggctgaacagaaacatttactttgccagaaggagcctttaggagtatatgtgggctaatcagaggttaataatgtcctcatctcctactctccatttaaaaaacaaacttcattgtagtaaattcaaataggaaaaaatgggggagtagttaagcaaaatcaacagtcatcctactatgttgaaagaaccaatgttaatattttgataaatatcatttgtccttttactttgctaaatatgtatatttttataaaaatgggctcatattgtgcataccattttgtaacctgcttttttcacttaacaatatattgggaacatcttttccaggtcatgcatagtcttctgcatcatttttattggtttattattctgctgtatgactcaatcataattcatttaatcttctattggatattttgactatttacatcttttcacagttataaacagcacttcactgaatcccatgtacatccatgactgttttcttaaattctttgaattgctgggttaccaaatatgcaaaattttaaggcttttgatacttcgttatgagtgtatttttgagatattttccacttgatccaagcagtgtgtcactatataactgataaaagcacttggtctttgattatcagatactgtctctaaaattattttaaagattaatatttgttcaagtagagaatgaagataaaaaaggaatttgaggccaggtatggggtgtctcatgcctataattccagcactttgggaggccaaggcaggcagatcactttgaggtcaggagtttgagaccagcctggccaacatggagaaccccccgtctctacaaaaaatacaaaattagcagggtgtggtggtgcacacctgtagtcccttactccctggtggctgaggcattatcccttgaacctgggaggcagagcctaaagtgagccgagatcgcgccactgcactccagcctgggtgacacagcaagactcttgtctcaaacaaacaggaatttgagtaaattttaaattagtatatactacaacaaatttccaaacttcataatttgctagtagtgctaactaaaattttacaccaggtaaaatcaggtcaccttttttatgtattgacttcattgttggacttcatactctgatgggaaagaaaatggacattctgaatgtgtcaggtgcataatatcctaatttatgcttgtcagagctggggtctctgtcttccttggcccatgttgcatttaactgaatgtcatgttttctcctctggaacttcttatgtatgcaagctcccatgttaacctatcataaaaatgttttttataattttgt

SEQ ID NO: 162443 - DNA, 624 bp, Artificial Sequence
  derived and/or modified sequence
atgacgatggatggcgacagttccacaaccgatgctagtcaattaggaattagtgcagactacatcggtggctcacactacgtaattcagccacacgacgataccgaagactccatgaacgaccatgaagacacaaatgggagcaaggagtccttccgggagcaggatatctacttgcctattgccaatgtcgcgaggatcatgaagaatgccatcccccagaccgggaaaatcgccaaggacgcaaaggagtgcgtgcaggagtgcgtctccgaattcatctctttcatcaccagtgaggccagcgagcggtgccaccaggagaagagaaaaaccattaacggtgaggatattctattcgccatgtccacactcgggtttgactcatacgtcgagccactgaagttgtacctgcagaagttccgggaggccatgaagggtgaaaagggcatcgggggagccgttaccgcgaccgacggactgagtgaggaactgaccgaggaagctttcacaaaccagctgcccgcgggtctgattactaccgacggccagcagcagaatgtgatggtatacacaacaagttaccagcaaatttcaggcgtgcaacagatccagttcagctag

SEQ ID NO: 162444 - DNA, 624 bp, Artificial Sequence
  derived and/or modified sequence
atgaccatggatggtgactcctccaccacagacgcatctcagcttggcatcagcgcagactatatcggcggaagccactacgtgattcaaccacatgacgacaccgaagatagcatgaacgatcatgaggatacaaatggcagcaaggagtctttcagggaacaagacatttacctcccaatcgctaatgtcgcccggatcatgaaaaacgcaatccctcagaccggaaagatagccaaagacgcaaaagaatgcgtgcaggaatgcgtatcagagttcatatcctttattacaagcgaggcgagcgagagatgtcaccaagagaaacggaaaaccatcaatggcgaggatattctgttcgcaatgtctacgctcggcttcgattcttatgtggaacctctgaagctgtacctgcaaaagtttagagaggcaatgaagggggagaaaggtatcggcggcgcggttacagccaccgacggactctccgaagagctaactgaggaggctttcactaatcagcttcctgctggcttgattactaccgacggtcagcagcagaacgtcatggtgtacactacttcctatcagcaaatcagcggcgtgcagcagattcagttttcttag

SEQ ID NO: 162445 - DNA, 624 bp, Artificial Sequence
  derived and/or modified sequence
atgaccatggatggagacagcagcaccacagatgccagccagctgggcatctctgctgactacatcggcggcagccactacgtgatccagccccatgatgacacagaggacagcatgaatgaccacgaggacaccaacggcagcaaggagagcttccgggagcaggacatctacctgcccatcgccaacgtggcccgcatcatgaagaatgccatcccccagacaggcaagatcgccaaggatgccaaggaatgtgtgcaggagtgtgtgtctgagttcatctccttcatcaccagcgaggccagcgagcgctgccaccaggagaagaggaagaccatcaacggggaggacatcctgtttgccatgagcaccctgggctttgacagctatgtggagcccctgaagctgtacctgcagaagttccgggaggccatgaagggggagaagggcattggaggagctgtgacagccacagatggcctgtctgaggagctgacagaggaggccttcaccaaccagctgcctgctggcctcatcaccacagatggccagcagcagaatgtgatggtgtacaccaccagctaccagcagatctctggagtgcagcagatccagttctcctag

SEQ ID NO: 162446 - DNA, 624 bp, Artificial Sequence
  derived and/or modified sequence
atgaccatggacggcgacagcagcaccaccgacgccagccagctgggcattagcgcggactatatcggaggctcgcactatgtcattcagcctcacgatgatactgaagatagcatgaacgaccatgaagataccaacggctcaaaagaatccttccgcgagcaagacatttatcttcctatcgctaatgttgcgaggattatgaaaaatgccataccacagacaggaaaaatagccaaggatgcaaaagagtgcgtccaggagtgcgtctccgagtttatcagtttcatcacctctgaagcttccgagcggtgtcaccaggaaaagcgaaagacaattaacggggaggacatcctcttcgcaatgagcacactgggctttgattcttatgtggagcctctgaaattgtatctgcaaaagttcagagaagccatgaagggggaaaagggcatcgggggcgccgtcacagccacagacgggctgtccgaggaactcactgaagaggctttcaccaatcaattgcctgccgggctgatcactactgatggccagcagcagaacgtcatggtctacactaccagctatcaacagatctcgggcgttcagcagatacagttctcctag

SEQ ID NO: 162447 - DNA, 624 bp, Artificial Sequence
  derived and/or modified sequence
atgaccatggacggcgacagcagcaccaccgacgccagccagctgggaatttcggctgactacataggcggtagccactatgtgattcagcctcacgacgacaccgaggactcaatgaacgaccacgaagacacaaatggatccaaagaatcatttcgagaacaggacatctacttgccgatcgcgaatgtagcccgtattatgaagaatgccataccgcagactggtaagatcgctaaggacgcaaaagagtgtgttcaggaatgtgtatccgaatttataagctttattacgtctgaggcttccgagcgctgtcaccaggaaaaaaggaaaaccattaacggagaggacatcctcttcgcaatgtctactttagggtttgatagctatgtagagcctcttaaactatatttacagaagtttagagaagccatgaagggagagaagggcattggcggtgctgtgaccgctactgacggtctgtcggaggagctcacggaggaggcctttactaaccaattgcctgctggactcatcacaactgacggtcagcagcaaaacgtgatggtgtatacgacttcttaccagcagataagcggagttcagcagatccagttcagctag

SEQ ID NO: 162448 - DNA, 3512 bp, Artificial Sequence
  derived and/or modified sequence
gtcgcgccgagggaagcggcccgcggcggagggaggggaggccgagtcctggaagcggagctccgcgctgggactggttccttcgcagccattttctgtccaaccaaacagccgattggagacgggagccaaccagggctgcattggaggttgaaatcacaaagattagacacctttttagataggtgttcttcagcaccactgacaacacggttctgacagtatttcatgacaatggatggtgacagttctacaacagatgcttctcaactaggaatctctgcagactatattggaggaagtcattatgttatacagcctcatgatgatactgaggacagcatgaatgatcatgaagacacaaatggttcaaaagaaagtttcagagaacaagatatatatcttccaatagcaaacgtggctaggataatgaaaaatgccatacctcaaacgggaaagattgcaaaagatgccaaagaatgtgttcaagaatgtgtaagtgagttcatcagttttataacatctgaagcaagtgaaaggtgccatcaagagaaacggaaaacaatcaatggagaagatattctctttgctatgtctactttaggctttgacagttatgtggaacctctgaaattataccttcagaaattcagagaggctatgaaaggagaaaagggaattggtggagcagtcacagctacagatggactaagtgaagagcttacagaggaggcatttactaaccagttaccagctggcttaataaccacagacggtcaacaacaaaatgttatggtttacacaacatcatatcaacagatttctggtgttcagcaaattcagttttcatgatctgaagaaatgatggaatggggagtgtagagaaatgagagtctgtatgattctggaacagagacatcagaaggaaagactggtgaaaagatgtatctttgtatattaatagctgtaatgtagcttcctgatgcttgactaattgaggtgttaattctgacttgagaatctttttcatgaatgattttaaagaaaaatttggattttaaaggtattaaaatatttttgttttgtacgagagtttgttgctctgtatgactcctgtatgcattgtatattgcaatttattactgtcagagatttgtagacagtttcttattttcatattgaatcatgttacttttgtaattcaagtaagcggctgggttaattcatgatgtttgcccttttaataaaatataagggtagagttcattttgaatgcaagttgcctttattataaatttgagtttgtcttggttataccttgcatgataacctagctagatttctagcatttgctgtatttattaaaattattatttttttggtaaaacattaatagtttaagcagcatcatttttttaaaaaatgtaattgaataagtgtgaatgcagaagcaaatattgtctgccctgttaaacttggtgcccattaacagtgtttacactgttcatcgtgcctgttaatgtagttttagttactggagcttttttaagactagatttggttttgagttacatttttaagaatgtgggaatatatttaagtttaatgtagtcctagtgctcttgaaatggtgcccctttcatttggtacatgattttttttcaaatcatatcttcaagtactatagtattctcttacagaagaggagttttatagtctgatggtaaatgtcttcattttacctttttaattgaaatgtcaagtttcctgttacactatggaaaccaagaaacatcagacatcattgcgtgtacagaccttttgcatgggtgagtggatgaaatggagaacagagtgagtgctgtgaacggtgtgaaatagaagccaacttctagtatgctgtcttcatctctgcaataaactaaacgtaaataatgtaactttgtataatttagtagtatgtacttggattgtttctttttgaaaagtgaggatttgtattttctcatctattctttttggtgttaattaacttgagggatttcttttttaagtttttaatatcaaaaattgctattgtatagtttgcctaaaaggaagttggagtgaatatcatctttgaaggacactcaaatttataaggtagaagcaatttcccagatataggctgaacagaaacatttactttgccagaaggagcctttaggagtatatgtgggctaatcagaggttaataatgtcctcatctcctactctccatttaaaaaacaaacttcattgtagtaaattcaaataggaaaaaatgggggagtagttaagcaaaatcaacagtcatcctactatgttgaaagaaccaatgttaatattttgataaatatcatttgtccttttactttgctaaatatgtatatttttataaaaatgggctcatattgtgcataccattttgtaacctgcttttttcacttaacaatatattgggaacatcttttccaggtcatgcatagtcttctgcatcatttttattggtttattattctgctgtatgactcaatcataattcatttaatcttctattggatattttgactatttacatcttttcacagttataaacagcacttcactgaatcccatgtacatccatgactgttttcttaaattctttgaattgctgggttaccaaatatgcaaaattttaaggcttttgatacttcgttatgagtgtatttttgagatattttccacttgatccaagcagtgtgtcactatataactgataaaagcacttggtctttgattatcagatactgtctctaaaattattttaaagattaatatttgttcaagtagagaatgaagataaaaaaggaatttgaggccaggtatggggtgtctcatgcctataattccagcactttgggaggccaaggcaggcagatcactttgaggtcaggagtttgagaccagcctggccaacatggagaaccccccgtctctacaaaaaatacaaaattagcagggtgtggtggtgcacacctgtagtcccttactccctggtggctgaggcattatcccttgaacctgggaggcagagcctaaagtgagccgagatcgcgccactgcactccagcctgggtgacacagcaagactcttgtctcaaacaaacaggaatttgagtaaattttaaattagtatatactacaacaaatttccaaacttcataatttgctagtagtgctaactaaaattttacaccaggtaaaatcaggtcaccttttttatgtattgacttcattgttggacttcatactctgatgggaaagaaaatggacattctgaatgtgtcaggtgcataatatcctaatttatgcttgtcagagctggggtctctgtcttccttggcccatgttgcatttaactgaatgtcatgttttctcctctggaacttcttatgtatgcaagctcccatgttaacctatcataaaaatgttttttataattttgtaaa

SEQ ID NO: 162449 - DNA, 1727 bp, Artificial Sequence
  derived and/or modified sequence
tcccgccctcccgcgcgggccgaggccgggccccgcgcctgcgaggccgctcccgcagcgggccgggccggggagcgggcgcggggccgcggcgcggctctttgtgcgccgggctgaggagcggcgggacgcgggccaggccacctcaccctcgccgccgttgagctccgggcccggggccgaggaggggccgcggggctgcgtcggggccccgctctcgacggcgtcccgggccggctccattttgtgcggggagccggccgaggggcgggagacgcggcccgggccctggccccgtagccccggcggcggcgcgagtccccgggggcgccctcctcccgcccgcggggctgtggcggggcccggcgctttgtctgcccgcacatcccgggggccgcgcggcgggtgggaggcaggcgttgggcgcggggccggggcggccgggcgagtcaggggatgcgctctgggggcggcctcctggcactcgcagggctgacaggtcgccgggaccaggccgtggggccggggccacccaggcacctgcgtggggaggaaggcatggctttagcttccccgcagcctggtttgcgcgtaaagaatgcagccatctggcggtttgcggtccctgtacttgccccgaaggttgaaatcacaaagattagacacctttttagataggtgttcttcagcaccactgacaacacggttctgacagtatttcatgacaatggatggtgacagttctacaacagatgcttctcaactaggaatctctgcagactatattggaggaagtcattatgttatacagcctcatgatgatactgaggacagcatgaatgatcatgaagacacaaatggttcaaaagaaagtttcagagaacaagatatatatcttccaatagcaaacgtggctaggataatgaaaaatgccatacctcaaacgggaaagattgcaaaagatgccaaagaatgtgttcaagaatgtgtaagtgagttcatcagttttataacatctgaagcaagtgaaaggtgccatcaagagaaacggaaaacaatcaatggagaagatattctctttgctatgtctactttaggctttgacagttatgtggaacctctgaaattataccttcagaaattcagagaggctatgaaaggagaaaagggaattggtggagcagtcacagctacagatggactaagtgaagagcttacagaggaggcatttactaaccagttaccagctggcttaataaccacagacggtcaacaacaaaatgttatggtttacacaacatcatatcaacagatttctggtgttcagcaaattcagttttcatgatctgaagaaatgatggaatggggagtgtagagaaatgagagtctgtatgattctggaacagagacatcagaaggaaagactggtgaaaagatgtatctttgtatattaatagctgtaatgtagcttcctgatgcttgactaattgaggtgttaattctgacttgagaatctttttcatgaatgattttaaagaaaaatttggattttaaaggtattaaaatatttttgttttgtacgagagtttgttgctctgtatgactcctgtatgcattgtatattgcaatttattactgtcagagatttgtagacagtttcttattttcatattgaatcatgttacttttgtaattcaagtaagcggctgggttaattcatgatgttt

SEQ ID NO: 162450 - DNA, 624 bp, Artificial Sequence
  derived and/or modified sequence
atgacaatggacggtgattccagcaccacggacgccagccaactggggattagtgctgactatatcggcggttcccactacgtcattcaacctcacgacgacacagaggactccatgaatgatcacgaggataccaacggctccaaggaatctttcagggagcaagacatctacctccctattgcgaatgtcgctcggataatgaaaaacgcgattccccagactggaaagatcgcgaaggacgccaaagaatgcgtgcaggaatgcgtgtcggagtttattagcttcatcacaagcgaggctagtgagcgttgtcaccaggagaaacgaaagacaatcaatggtgaggacatactgtttgcgatgtccactcttggttttgacagttacgtcgaacccctcaagctctacctccaaaagttccgagaagccatgaagggggagaaagggatagggggtgcagtgactgctactgatggcctatccgaggagctcacagaggaagcatttacgaatcagctgcccgctggcctgattaccactgacgggcagcagcaaaacgtgatggtatatactacctcctaccagcagatctctggcgtgcagcaaatccagttcagttag

SEQ ID NO: 162451 - DNA, 624 bp, Artificial Sequence
  derived and/or modified sequence
atgacaatggatggcgactctagtacaacagatgcctcccagttaggcatcagcgctgattacatcggaggatcccactacgtgatccagccccacgacgacacagaagactcaatgaacgaccacgaggacactaatggaagcaaagaaagctttcgtgagcaagatatatacctccctatagcaaatgtggctcgcataatgaagaatgctattccccagacagggaagatcgctaaggatgccaaagaatgtgtacaggaatgcgtgtctgagttcatctccttcattacaagcgaagcaagcgaacgctgccaccaagaaaaacgaaaaaccatcaacggagaagacatcctgttcgcaatgtctactctaggatttgatagttacgttgagccactcaaactgtatctccagaaattccgcgaggccatgaaaggggaaaaggggataggcggtgcagtgaccgctacagatggcctatccgaagaactgaccgaggaagccttcactaaccagctgccagctggactcatcacaacggacggacagcagcaaaacgttatggtttacaccaccagctaccagcagatttccggtgtacagcagattcagttttcttag

SEQ ID NO: 162452 - DNA, 624 bp, Artificial Sequence
  derived and/or modified sequence
atgaccatggacggcgacagcagcaccaccgacgccagccagctgggcatcagcgccgactacatcggcggcagccactacgtgatccagccccacgacgacaccgaggacagcatgaacgaccacgaggacaccaacggcagcaaggagagcttcagagagcaggacatctacctgcccatcgccaacgtggccagaatcatgaagaacgccatcccccagaccggcaagatcgccaaggacgccaaggagtgcgtgcaggagtgcgtgagcgagttcatcagcttcatcaccagcgaggccagcgagagatgccaccaggagaagagaaagaccatcaacggcgaggacatcctgttcgccatgagcaccctgggcttcgacagctacgtggagcccctgaagctgtacctgcagaagttcagagaggccatgaagggcgagaagggcatcggcggcgccgtgaccgccaccgacggcctgagcgaggagctgaccgaggaggccttcaccaaccagctgcccgccggcctgatcaccaccgacggccagcagcagaacgtgatggtgtacaccaccagctaccagcagatcagcggcgtgcagcagatccagttcagctag

SEQ ID NO: 162453 - protein, 190 aa, Artificial Sequence
  derived and/or modified sequence
MLRVPEPRPGEAKAEGAAPPTPSKPLTSFLIQDILRDGAPEEAETLAETEPERHLGSYLLDSENTSGALPRLPQTPKQPQKRSRAAFSHTQVIELERKFSHQKYLSAPERAHLAKNLKLTETQVKIWFQNRRYKTKRKQLSSELGDLEKHSSLPALKEEAFSRASLVSVYNSYPYYPYLYCVGSWSPAFW

SEQ ID NO: 162454 - protein, 234 aa, Artificial Sequence
  derived and/or modified sequence
MLRVPEPRPGEAKAEGAAPPTPSKPLTSFLIQDILRDGAQRQGGRTSSQRQRDPEPEPEPEPEGGRSRAGAQNDQLSTGPRAAPEEAETLAETEPERHLGSYLLDSENTSGALPRLPQTPKQPQKRSRAAFSHTQVIELERKFSHQKYLSAPERAHLAKNLKLTETQVKIWFQNRRYKTKRKQLSSELGDLEKHSSLPALKEEAFSRASLVSVYNSYPYYPYLYCVGSWSPAFW

SEQ ID NO: 162455 - DNA, 3281 bp, Artificial Sequence
  derived and/or modified sequence
gcggtgcgggccgggcgggtgcattcaggccaaggcggggccgccgggatgctcagggttccggagccgcggcccggggaggcgaaagcggagggggccgcgccgccgaccccgtccaagccgctcacgtccttcctcatccaggacatcctgcgggacggcgcgcagcggcaaggcggccgcacgagcagccagagacagcgcgacccggagccggagccagagccagagccagagggaggacgcagccgcgccggggcgcagaacgaccagctgagcaccgggccccgcgccgcgccggaggaggccgagacgctggcagagaccgagccagaaaggcacttggggtcttatctgttggactctgaaaacacttcaggcgcccttccaaggcttccccaaacccctaagcagccgcagaagcgctcccgagctgccttctcccacactcaggtgatcgagttggagaggaagttcagccatcagaagtacctgtcggcccctgaacgggcccacctggccaagaacctcaagctcacggagacccaagtgaagatatggttccagaacagacgctataagactaagcgaaagcagctctcctcggagctgggagacttggagaagcactcctctttgccggccctgaaagaggaggccttctcccgggcctccctggtctccgtgtataacagctatccttactacccatacctgtactgcgtgggcagctggagcccagctttttggtaatgccagctcaggtgacaaccattatgatcaaaaactgccttccccagggtgtctctatgaaaagcacaaggggccaaggtcagggagcaagaggtgtgcacaccaaagctattggagatttgcgtggaaatctcagattcttcactggtgagacaatgaaacaacagagacagtgaaagttttaatacctaagtcattcctccagtgcatactgtaggtcattttttttgcttctggctacctgtttgaaggggagagagggaaaatcaagtggtattttccagcactttgtatgattttggatgagttgtacacccaaggattctgttctgcaactccatcctcctgtgtcactgaatatcaactctgaaagagcaaacctaacaggagaaaggacaaccaggatgaggatgtcaccaactgaattaaacttaagtccagaagcctcctgttggccttggaatatggccaaggctctctctgtccctgtaaaagagaggggcaaatagagagtctccaagagaacgccctcatgctcagcacatatttgcatgggagggggagatgggtgggaggagatgaaaatatcagcttttcttattcctttttattccttttaaaatggtatgccaacttaagtatttacagggtggcccaaatagaacaagatgcactcgctgtgattttaagacaagctgtataaacagaactccactgcaagagggggggccgggccaggagaatctccgcttgtccaagacaggggcctaaggagggtctccacactgctgctaggggctgttgcatttttttattagtagaaagtggaaaggcctcttctcaacttttttcccttgggctggagaatttagaatcagaagtttcctggagttttcaggctatcatatatactgtatcctgaaaggcaacataattcttccttccctccttttaaaattttgtgttcctttttgcagcaattactcactaaagggcttcattttagtccagatttttagtctggctgcacctaacttatgcctcgcttatttagcccgagatctggtctttttttttttttttttttttttttttccgtctccccaaagctttatctgtcttgactttttaaaaaagtttgggggcagattctgaattggctaaaagacatgcatttttaaaactagcaactcttatttctttcctttaaaaatacatagcattaaatcccaaatcctatttaaagacctgacagcttgagaaggtcactactgcatttataggaccttctggtggttctgctgttacgtttgaagtctgacaatccttgagaatctttgcatgcagaggaggtaagaggtattggattttcacagaggaagaacacagcgcagaatgaagggccaggcttactgagctgtccagtggagggctcatgggtgggacatggaaaagaaggcagcctaggccctggggagcccagtccactgagcaagcaagggactgagtgagccttttgcaggaaaaggctaagaaaaaggaaaaccattctaaaacacaacaagaaactgtccaaatgctttgggaactgtgtttattgcctataatgggtccccaaaatgggtaacctagacttcagagagaatgagcagagagcaaaggagaaatctggctgtccttccattttcattctgttatctcaggtgagctggtagaggggagacattagaaaaaaatgaaacaacaaaacaattactaatgaggtacgctgaggcctgggagtctcttgactccactacttaattccgtttagtgagaaacctttcaattttcttttattagaagggccagcttactgttggtggcaaaattgccaacataagttaatagaaagttggccaatttcaccccattttctgtggtttgggctccacattgcaatgttcaatgccacgtgctgctgacaccgaccggagtactagccagcacaaaaggcagggtagcctgaattgctttctgctctttacatttcttttaaaataagcatttagtgctcagtccctactgagtactctttctctcccctcctctgaatttaattctttcaacttgcaatttgcaaggattacacatttcactgtgatgtatattgtgttgcaaaaaaaaaaaaaaagtgtctttgtttaaaattacttggtttgtgaatccatcttgctttttccccattggaactagtcattaacccatctctgaactggtagaaaaacatctgaagagctagtctatcagcatctgacaggtgaattggatggttctcagaaccatttcacccagacagcctgtttctatcctgtttaataaattagtttgggttctctacatgcataacaaaccctgctccaatctgtcacataaaagtctgtgacttgaagtttagtcagcacccccaccaaactttatttttctatgtgttttttgcaacatatgagtgttttgaaaataaagtacccatgtctttattagattta

SEQ ID NO: 162456 - DNA, 705 bp, Artificial Sequence
  derived and/or modified sequence
atgctgagagtgcccgagcccagacccggcgaggccaaggccgagggcgccgccccccccacccccagcaagcccctgaccagcttcctgatccaggacatcctgagagacggcgcccagagacagggcggcagaaccagcagccagagacagagagaccccgagcccgagcccgagcccgagcccgagggcggcagaagcagagccggcgcccagaacgaccagctgagcaccggccccagagccgcccccgaggaggccgagaccctggccgagaccgagcccgagagacacctgggcagctacctgctggacagcgagaacaccagcggcgccctgcccagactgccccagacccccaagcagccccagaagagaagcagagccgccttcagccacacccaggtgatcgagctggagagaaagttcagccaccagaagtacctgagcgcccccgagagagcccacctggccaagaacctgaagctgaccgagacccaggtgaagatctggttccagaacagaagatacaagaccaagagaaagcagctgagcagcgagctgggcgacctggagaagcacagcagcctgcccgccctgaaggaggaggccttcagcagagccagcctggtgagcgtgtacaacagctacccctactacccctacctgtactgcgtgggcagctggagccccgccttctggtag

SEQ ID NO: 162457 - DNA, 705 bp, Artificial Sequence
  derived and/or modified sequence
atgttgcgcgtccccgagcctaggcccggggaagcaaaagccgaaggcgcagctccgcccacaccatccaagccactaacatccttcctaattcaagacattctacgcgacggcgcgcagcggcaaggaggtcgcacatcctctcagaggcaaagagacccagaaccagagcctgagcccgaaccagaaggtggtcggtctcgggctggcgctcaaaacgatcaactgtctacgggccctagggccgcccccgaagaggctgagacgctcgccgagactgaacccgaaagacacctgggctcctacctgctggattctgaaaataccagcggagccttgcctcgtcttccccagacacctaagcaaccccaaaaacggtcccgggcagcattcagccacacacaggtcatcgagctcgaaagaaagttcagtcatcaaaagtatctctctgcaccagagagggcccatctggcgaaaaacctgaaattgactgagactcaggttaagatttggttccagaatcgtaggtacaagaccaaacgcaaacagctcagcagtgaacttggggacctggaaaagcactcctcccttcctgccctcaaggaggaagccttcagcagggcgtcactggtctctgtgtacaatagctatccatactacccatatctgtattgtgtgggctcctggtctcccgccttctggtag

SEQ ID NO: 162458 - DNA, 705 bp, Artificial Sequence
  derived and/or modified sequence
atgctgcgggtgcctgagcccaggcctggagaggccaaggccgagggcgccgccccacccacccccagcaagcccctgaccagcttcctgatccaggacatcctgagagatggagcccagaggcagggcggccgcaccagcagccagaggcagagggaccctgagcctgagcctgagcctgagcctgagggcggccgcagcagagctggggcccagaatgaccagctgagcacaggcccccgggccgcccctgaggaggccgagaccctggccgagacagagcctgagcggcacctgggcagctacctgctggacagcgagaacaccagcggggccctgccccggctgccccagacccccaagcagccccagaagaggagcagagctgccttcagccacacccaggtgattgagctggagaggaagttcagccaccagaagtacctgagcgcccctgagcgggcccacctggccaagaacctgaagctgacagagacccaggtgaagatctggttccagaacagacgctacaagaccaagaggaagcagctgagcagcgagctgggggacctggagaagcacagcagcctgcctgccctgaaggaggaggccttcagccgggccagcctggtgtctgtgtacaacagctacccctactacccctacctgtactgtgtgggctcctggagccctgccttctggtag

SEQ ID NO: 162459 - DNA, 705 bp, Artificial Sequence
  derived and/or modified sequence
atgctgcgggtgcccgagccccggcccggcgaggccaaggccgagggagccgccccacccaccccgagcaagcctttgacctcattcctcatccaggatatcctgcgggatggcgcccagaggcagggtgggcgcacttcctcccaaagacagcgggacccagaaccagaacccgagcctgagcccgaagggggccgctcccgagcaggcgcccagaatgaccaactaagcactggtccacgagcagctcccgaggaagcagagaccttggccgaaaccgaaccggagcgccatcttggcagctatttgcttgactccgagaatacatcgggggccctcccacgcctgcctcagaccccaaagcagccacagaagaggagccgcgcagccttctcgcatacccaggtgatcgaattggagcgtaagttttctcaccagaaatatctgtccgccccagagcgggctcatctggcaaaaaatctgaagctcacggaaacccaggtaaaaatatggtttcagaatcgccgctacaaaacgaagcgcaaacaactttcatccgagcttggcgacctcgaaaaacactccagtctacccgctcttaaggaggaagcattcagtcgcgcctcattagtcagcgtttacaactcttatccttactatccttatctatactgcgtgggatcatggagcccagctttttggtag

SEQ ID NO: 162460 - DNA, 3271 bp, Artificial Sequence
  derived and/or modified sequence
ccgggcgggtgcattcaggccaaggcggggccgccgggatgctcagggttccggagccgcggcccggggaggcgaaagcggagggggccgcgccgccgaccccgtccaagccgctcacgtccttcctcatccaggacatcctgcgggacggcgcgcagcggcaaggcggccgcacgagcagccagagacagcgcgacccggagccggagccagagccagagccagagggaggacgcagccgcgccggggcgcagaacgaccagctgagcaccgggccccgcgccgcgccggaggaggccgagacgctggcagagaccgagccagaaaggcacttggggtcttatctgttggactctgaaaacacttcaggcgcccttccaaggcttccccaaacccctaagcagccgcagaagcgctcccgagctgccttctcccacactcaggtgatcgagttggagaggaagttcagccatcagaagtacctgtcggcccctgaacgggcccacctggccaagaacctcaagctcacggagacccaagtgaagatatggttccagaacagacgctataagactaagcgaaagcagctctcctcggagctgggagacttggagaagcactcctctttgccggccctgaaagaggaggccttctcccgggcctccctggtctccgtgtataacagctatccttactacccatacctgtactgcgtgggcagctggagcccagctttttggtaatgccagctcaggtgacaaccattatgatcaaaaactgccttccccagggtgtctctatgaaaagcacaaggggccaaggtcagggagcaagaggtgtgcacaccaaagctattggagatttgcgtggaaatctcagattcttcactggtgagacaatgaaacaacagagacagtgaaagttttaatacctaagtcattcctccagtgcatactgtaggtcattttttttgcttctggctacctgtttgaaggggagagagggaaaatcaagtggtattttccagcactttgtatgattttggatgagttgtacacccaaggattctgttctgcaactccatcctcctgtgtcactgaatatcaactctgaaagagcaaacctaacaggagaaaggacaaccaggatgaggatgtcaccaactgaattaaacttaagtccagaagcctcctgttggccttggaatatggccaaggctctctctgtccctgtaaaagagaggggcaaatagagagtctccaagagaacgccctcatgctcagcacatatttgcatgggagggggagatgggtgggaggagatgaaaatatcagcttttcttattcctttttattccttttaaaatggtatgccaacttaagtatttacagggtggcccaaatagaacaagatgcactcgctgtgattttaagacaagctgtataaacagaactccactgcaagagggggggccgggccaggagaatctccgcttgtccaagacaggggcctaaggagggtctccacactgctgctaggggctgttgcatttttttattagtagaaagtggaaaggcctcttctcaacttttttcccttgggctggagaatttagaatcagaagtttcctggagttttcaggctatcatatatactgtatcctgaaaggcaacataattcttccttccctccttttaaaattttgtgttcctttttgcagcaattactcactaaagggcttcattttagtccagatttttagtctggctgcacctaacttatgcctcgcttatttagcccgagatctggtctttttttttttttttttttttttttttccgtctccccaaagctttatctgtcttgactttttaaaaaagtttgggggcagattctgaattggctaaaagacatgcatttttaaaactagcaactcttatttctttcctttaaaaatacatagcattaaatcccaaatcctatttaaagacctgacagcttgagaaggtcactactgcatttataggaccttctggtggttctgctgttacgtttgaagtctgacaatccttgagaatctttgcatgcagaggaggtaagaggtattggattttcacagaggaagaacacagcgcagaatgaagggccaggcttactgagctgtccagtggagggctcatgggtgggacatggaaaagaaggcagcctaggccctggggagcccagtccactgagcaagcaagggactgagtgagccttttgcaggaaaaggctaagaaaaaggaaaaccattctaaaacacaacaagaaactgtccaaatgctttgggaactgtgtttattgcctataatgggtccccaaaatgggtaacctagacttcagagagaatgagcagagagcaaaggagaaatctggctgtccttccattttcattctgttatctcaggtgagctggtagaggggagacattagaaaaaaatgaaacaacaaaacaattactaatgaggtacgctgaggcctgggagtctcttgactccactacttaattccgtttagtgagaaacctttcaattttcttttattagaagggccagcttactgttggtggcaaaattgccaacataagttaatagaaagttggccaatttcaccccattttctgtggtttgggctccacattgcaatgttcaatgccacgtgctgctgacaccgaccggagtactagccagcacaaaaggcagggtagcctgaattgctttctgctctttacatttcttttaaaataagcatttagtgctcagtccctactgagtactctttctctcccctcctctgaatttaattctttcaacttgcaatttgcaaggattacacatttcactgtgatgtatattgtgttgcaaaaaaaaaaaaaaagtgtctttgtttaaaattacttggtttgtgaatccatcttgctttttccccattggaactagtcattaacccatctctgaactggtagaaaaacatctgaagagctagtctatcagcatctgacaggtgaattggatggttctcagaaccatttcacccagacagcctgtttctatcctgtttaataaattagtttgggttctctacatgcataacaaaccctgctccaatctgtcacataaaagtctgtgacttgaagtttagtcagcacccccaccaaactttatttttctatgtgttttttgcaacatatgagtgttttgaaaataaagtacccatgtctttattagattta

SEQ ID NO: 162461 - DNA, 705 bp, Artificial Sequence
  derived and/or modified sequence
atgttgagagtacctgaacccaggcctggggaagccaaagctgagggtgcagctccacctacgcccagcaagccattaaccagcttcctgatccaggacatcctgagagacggcgctcagagacagggaggtcggacctcgtcacagcgccagcgcgatcctgaacctgaacctgaaccggagcccgagggcggtagatccagagcaggagcccagaatgaccagctttccacaggtccccgtgctgcccctgaggaggccgagactctggcagagacggaacccgaacgccatcttggctcttacctgcttgactccgagaacactagcggggcattgcctaggcttcctcagactccaaagcagcctcagaagcgctcacgggctgcttttagtcatacacaggtgattgagctggaaaggaaatttagccatcagaaatatctgtccgccccagagagagcccacctagcaaagaacctcaagctgacagaaacccaggtcaaaatatggtttcagaaccgtaggtacaagacaaaacggaagcaactaagctctgaactcggggacttggaaaagcactcatcactgcctgcgcttaaagaggaggcgttctcacgcgcatcactggtgtcagtgtacaacagttacccctattacccatatttatattgtgttggctcctggagccctgctttctggtag

SEQ ID NO: 162462 - protein, 264 aa, Artificial Sequence
  derived and/or modified sequence
MESGFTSKDTYLSHFNPRDYLEKYYKFGSRHSAESQILKHLLKNLFKIFCLDGVKGDLLIDIGSGPTIYQLLSACESFKEIVVTDYSDQNLQELEKWLKKEPEAFDWSPVVTYVCDLEGNRVKGPEKEEKLRQAVKQVLKCDVTQSQPLGAVPLPPADCVLSTLCLDAACPDLPTYCRALRNLGSLLKPGGFLVIMDALKSSYYMIGEQKFSSLPLGREAVEAAVKEAGYTIEWFEVISQSYSSTMANNEGLFSLVARKLSRPL

SEQ ID NO: 162463 - DNA, 795 bp, Artificial Sequence
  derived and/or modified sequence
atggaaagtgggttcacgtcaaaggacacctatctgtcccactttaacccgagggattacctcgagaagtactacaagtttggctcccggcattccgcagaatcacagatcctgaaacatctcttgaagaacctgtttaagattttttgtctagatggggtgaaaggggatctgctgatagacataggctctgggccaacaatttaccagctcttgagcgcctgcgaatccttcaaagagattgtggtcaccgattacagtgatcagaacctccaggagttggaaaaatggttgaaaaaggagcccgaagcattcgactggtctcctgtcgtgacatatgtgtgtgatctggaaggaaaccgcgtgaaggggcctgaaaaggaggagaaacttcggcaggccgtgaagcaggtcctgaagtgcgatgtgacccagagccagcctctcggcgcagtgccactgccgcccgccgattgcgtacttagtactctttgcctggacgctgcctgccccgatctccccacctattgtcgagcactaagaaatctcgggagcttgctcaagcccggtggcttcctggtgatcatggatgctcttaaatcgagctactacatgattggggagcaaaaattcagtagtcttccattggggagggaggctgtggaggcagctgtgaaagaagccggctatactatcgaatggttcgaggtgatcagccaatcctactcctcaactatggccaacaacgaaggactgttttctctagttgccaggaaactgagtagacccctatag

SEQ ID NO: 162464 - DNA, 795 bp, Artificial Sequence
  derived and/or modified sequence
atggagagcgggtttactagcaaggacacttacctctctcacttcaatcctagagactacctggaaaaatactataaattcgggagccgccacagcgcggagtctcagatcttgaagcacctcctgaaaaacttattcaaaattttttgtttggacggcgttaaaggggacctcctcatagacattggatcagggcctacaatctatcagctgttgagtgcttgcgaaagcttcaaagaaattgtggtgactgactactctgatcagaatctgcaggagttagaaaaatggcttaaaaaagagccagaggcattcgactggtcccccgtagtgacctatgtttgtgacctggagggcaaccgggttaaaggtcctgagaaggaggagaaactgcgtcaagccgtaaagcaggtattgaagtgcgacgttacccagagccagcccctcggggctgttccgttaccccccgccgactgcgtgctctcaaccctgtgtctcgatgcagcctgtcctgatctgccaacatattgcagagcccttaggaacctgggaagcctgttgaagcctggcggattcctggtcatcatggatgccctgaaatcctcttactacatgatcggcgaacaaaagtttagttcgttacccctgggtagggaggcagtggaagctgccgtgaaagaggccggttacactatagagtggttcgaagtcatcagtcagagttattcgagtacgatggccaacaatgagggactgttcagtctggtggcgagaaaactgtcccgaccactgtag

SEQ ID NO: 162465 - DNA, 795 bp, Artificial Sequence
  derived and/or modified sequence
atggagagcggcttcaccagcaaggacacctacctgagccacttcaacccccgggactacctggagaagtactacaagtttggcagccgccacagcgctgagagccagatcctgaagcacctgctgaagaacctcttcaagatcttctgcctggatggagtgaagggggacctgctgattgacatcggcagcggccccaccatctaccagctgctgagcgcctgtgagagcttcaaggagatcgtggtgacagactacagcgaccagaacctgcaggagctggagaagtggctgaagaaggagcctgaggcctttgactggagccctgtggtgacctacgtgtgtgacctggagggcaacagagtgaagggccctgagaaggaggagaagctgcggcaggccgtgaagcaggtgctgaagtgtgatgtgacccagagccagcccctgggcgctgtgcccctgcccccagctgactgtgtgctgagcaccctgtgcctggatgctgcctgcccagacctgcccacctactgccgggccctgaggaacctgggcagcctgctgaagccaggcggcttcctggtgatcatggatgccctgaagagcagctactacatgattggagagcagaagttcagcagcctgcccctgggccgggaggccgtggaggccgctgtgaaggaggccggctacaccatcgagtggtttgaagtcatcagccagagctacagcagcaccatggccaacaatgaaggcctcttcagcctggtggccaggaagctgagccggcccctgtag

SEQ ID NO: 162466 - DNA, 795 bp, Artificial Sequence
  derived and/or modified sequence
atggagagcggcttcaccagcaaggacacctacctgagccacttcaatccgcgggattacttggagaaatactacaaattcggctccagacatagtgccgagagccagatactgaaacaccttcttaagaacctgttcaaaatcttctgtttggatggagttaaaggggatctcctcatcgacatcggatccggccctacaatataccaattgctgagcgcatgcgaaagcttcaaagaaatagtggtaacagattactcggaccagaatctgcaggaactggaaaaatggttaaagaaagaacccgaagccttcgattggagcccagtggttacatatgtgtgcgatttagagggcaacagggtaaaaggtcccgaaaaagaagagaagctcagacaggctgtgaaacaggtactcaagtgtgacgttacacagtctcaaccactgggcgcggtgcccctgcctcctgcagactgcgtactgtcaaccctgtgcctcgacgcggcttgcccagaccttcccacctattgtcgagcactgcgtaacctgggatccctcctgaagcctggcggtttcctggtcatcatggatgccctcaagtccagttattacatgatcggtgaacagaaattttcctctctgcccctcggacgggaagccgtcgaagccgctgttaaggaggctggatatacaatcgagtggttcgaggtaatatcacagtcatactctagcactatggcaaacaatgagggcctgttctcactcgtcgctaggaagctatccaggcccctgtag

SEQ ID NO: 162467 - DNA, 795 bp, Artificial Sequence
  derived and/or modified sequence
atggagagcggcttcaccagcaaggacacctacctgagccacttcaacccccgtgattatttggagaagtattataaattcggcagtagacactctgccgaatctcaaatcctcaagcacctcctcaaaaacttgttcaagattttttgccttgatggggtgaagggggatcttctaatcgatattgggagtggccctacaatctatcagctgctatccgcctgtgagtccttcaaagagatcgtcgttacagactattccgaccagaacttgcaggagcttgagaagtggttaaaaaaggagcctgaagctttcgactggagccccgtggtgacatacgtatgcgatcttgagggtaatagggtaaaagggcctgaaaaggaggaaaagctgagacaggccgtgaagcaggtattaaaatgtgacgttactcagagtcagcccctaggcgctgtgccgcttcccccagccgattgtgtgctgtcaactctctgtttagacgctgcctgccccgacttacccacctactgccgggccctgcgcaatctcgggagcttattaaagcccggagggttcctggtcatcatggacgcacttaaatcttcatattacatgatcggcgaacagaaattttcaagcctgcccttgggtagggaagccgtggaggccgcagttaaggaagctggctatactatagaatggttcgaagtcattagccagtcatactcgtcaactatggcgaataatgaaggactgttttcactggtagccagaaaactctctaggcccttgtag

SEQ ID NO: 162468 - DNA, 1610 bp, Artificial Sequence
  derived and/or modified sequence
gccagacactgggtcatggcagtggtcggtgaagctgcagttgcctagggcagggatggagagagagtctgggcatgaggagagggtctcgggatgtttggctggactagattttacagaaagccttatccaggcttttaaaattactctttccagacttcatctgagactccttcttcagccaacattccttagccctgaatacatttcctatcctcatctttcccttcttttttttcctttcttttacatgtttaaatttaaaccattcttcgtgaccccttttcttgggagattcatggcaagaacgagaagaatgatggtgcttgttaggggatgtcctgtctctctgaactttggggtcctatgcattaaataattttcctgacgagctcaagtgctccctctggtctacaatccctggcggctggccttcatcccttgggcaagcattgcatacagctcatggccctccctctaccataccctccacccccgttcgcctaagctcccttctccgggaatttcatcatttcctagaacagccagaacatttgtggtctatttctctgttagtgtttaaccaaccatctgttctaaaagaagggctgaactgatggaaggaatgctgttagcctgagactcaggaagacaacttctgcagggtcactccctggcttctggaggaaagagaaggagggcagtgctccagtggtacagaagtgagacataatggaatcaggcttcacctccaaggacacctatctaagccattttaaccctcgggattacctagaaaaatattacaagtttggttctaggcactctgcagaaagccagattcttaagcaccttctgaaaaatcttttcaagatattctgcctagacggtgtgaagggagacctgctgattgacatcggctctggccccactatctatcagctcctctctgcttgtgaatcctttaaggagatcgtcgtcactgactactcagaccagaacctgcaggagctggagaagtggctgaagaaagagccagaggcctttgactggtccccagtggtgacctatgtgtgtgatcttgaagggaacagagtcaagggtccagagaaggaggagaagttgagacaggcggtcaagcaggtgctgaagtgtgatgtgactcagagccagccactgggggccgtccccttacccccggctgactgcgtgctcagcacactgtgtctggatgccgcctgcccagacctccccacctactgcagggcgctcaggaacctcggcagcctactgaagccagggggcttcctggtgatcatggatgcgctcaagagcagctactacatgattggtgagcagaagttctccagcctccccctgggccgggaggcagtagaggctgctgtgaaagaggctggctacacaatcgaatggtttgaggtgatctcgcaaagttattcttccaccatggccaacaacgaaggacttttctccctggtggcgaggaagctgagcagacccctgtgatgcctgtgacctcaattaaagcaattcctttgacctgtccagttgactttagtccttgtttctaactgccaagtcatgtgctg

SEQ ID NO: 162469 - DNA, 1867 bp, Artificial Sequence
  derived and/or modified sequence
taggcgctgtgctggggtcgcggcggcgcgggcgctgggggagaggagtgtggtcttcagcatagagtgagcttctagtgacacgagctggagggaaagaggaagtgcatcaggacggctcgtccaatggacaagaagggctgaactgatggaaggaatgctgttagcctgagactcaggaagacaacttctgcagggtcactccctggcttctggaggaaagagaaggagggcagtgctccagtggtacagaagtgagacataatggaatcaggcttcacctccaaggacacctatctaagccattttaaccctcgggattacctagaaaaatattacaagtttggttctaggcactctgcagaaagccagattcttaagcaccttctgaaaaatcttttcaagatattctgcctagacggtgtgaagggagacctgctgattgacatcggctctggccccactatctatcagctcctctctgcttgtgaatcctttaaggagatcgtcgtcactgactactcagaccagaacctgcaggagctggagaagtggctgaagaaagagccagaggcctttgactggtccccagtggtgacctatgtgtgtgatcttgaagggaacagagtcaagggtccagagaaggaggagaagttgagacaggcggtcaagcaggtgctgaagtgtgatgtgactcagagccagccactgggggccgtccccttacccccggctgactgcgtgctcagcacactgtgtctggatgccgcctgcccagacctccccacctactgcagggcgctcaggaacctcggcagcctactgaagccagggggcttcctggtgatcatggatgcgctcaagagcagctactacatgattggtgagcagaagttctccagcctccccctgggccgggaggcagtagaggctgctgtgaaagaggctggctacacaatcgaatggtttgaggtgatctcgcaaagttattcttccaccatggccaacaacgaaggacttttctccctggtggcgaggaagctgagcagacccctgtgatgcctgtgacctcaattaaagcaattcctttgacctgtccagttgactttagtccttgtttctaactgccaagtcatgtgctgagtagaggctcagtggttggggcccaatggttcatctaggacgggactagagaggtcagtctacaagcaatccattgaccacttacttggtgctgcacacaaatgttggtgctatgggacccaaagatgagcaattagtattccagtcttcattgcctgtgcttacaaaagaagacctcacttccctaaacatctagttatggcggctcaagcccgtacctgcctacagagaagtgtctgcagttactcactattagtttcctaagggggcactgctggctccttctctcccaggaatgggcttctcctattctttaactcttgccttctccctggagaggctaccaaaccctggcctctgccgctgttcaggctgccatgtgggtatagctgtttgctagactccactctggcctcaggggccagagaacagctgtccagcatttctgttcatcccagcaatccaaaaaaaaatttttttaagctacaaagatcactccattttcaaattcagactctgccacttattagctgtttctcattaggcaagttatataaccttgcagtgcctcactttcctcatctataaaatgagattaaaatagtctttttattaagagaattaaagtgaattgtggccaggcactgtggctcatgcctgtaatcccagcgctttgggaggctgaggcagacagattgcttgagctcagaagttcgagactggc

SEQ ID NO: 162470 - DNA, 795 bp, Artificial Sequence
  derived and/or modified sequence
atggaaagcggcttcacgtctaaagatacgtatctgtcccattttaatcccagagattatttggaaaaatattataaatttggatctcggcactccgcggagagccagattctgaaacacttgttgaaaaacttattcaaaatcttctgtctggatggagtcaagggagacctgcttatcgatattgggtcaggaccgacaatttaccaattgctctccgcctgcgagagtttcaaagaaatcgtcgtgacagactatagcgatcaaaatctacaggagctggaaaaatggctgaagaaagagcccgaagcattcgactggagccctgtcgttacgtatgtctgtgacctcgaggggaatcgcgtgaagggcccagagaaagaggaaaagctccgacaggcggttaaacaggtattgaagtgcgatgttacccagagtcagccattaggggctgttcccctgccaccagcagattgcgttttgtccaccctttgcctggacgctgcctgccccgacctgcctacctactgccgcgctctgaggaatctgggctcactactaaagcctggaggttttctggtaatcatggatgcactcaagtcttcgtactatatgattggtgagcagaaattctcatcgctgccgcttggtcgtgaagccgtcgaggcagcagttaaagaggcgggttacacaatcgagtggttcgaggtgatttctcagtcgtattcatccaccatggctaataatgagggcctatttagtctggtggcaaggaaacttagtaggcctctgtag

SEQ ID NO: 162471 - DNA, 795 bp, Artificial Sequence
  derived and/or modified sequence
atggagagtgggttcacatctaaggatacatatctgtcccattttaatccgagagactacctggagaagtactacaagtttgggtcacgacactcagcagaaagtcaaatcttgaagcatctactcaaaaatctgttcaaaattttttgtctcgacggcgtcaagggcgaccttctcatcgacatcggttcaggccctactatttaccagctcctctccgcctgcgaaagtttcaaagagatagtagtgacagactatagcgaccagaacttgcaagagttggaaaagtggctgaagaaggaacccgaagcttttgactggtctccggtggtcacttacgtctgtgatcttgagggaaacagggtcaaggggccagagaaggaagagaagctgcggcaagctgtgaagcaggtcctcaaatgcgacgtcacacagtcacagccgttgggtgccgtgccactccccccagccgactgcgtcctgtctacactgtgccttgatgccgcttgccccgatcttcccacctattgtagagcgttacgtaacctcggatccctcttgaaaccaggcggttttctcgttattatggacgcattgaagagtagctattacatgatcggggaacagaaattctccagcctccccctaggtagagaggctgtcgaggccgcagtcaaagaggccggttataccattgagtggttcgaggtgatatctcagagttatagctctacaatggccaataacgaaggcttatttagtttggtcgcccgaaaactcagcagaccactctag

SEQ ID NO: 162472 - DNA, 795 bp, Artificial Sequence
  derived and/or modified sequence
atggagagcggcttcaccagcaaggacacctacctgagccacttcaaccccagagactacctggagaagtactacaagttcggcagcagacacagcgccgagagccagatcctgaagcacctgctgaagaacctgttcaagatcttctgcctggacggcgtgaagggcgacctgctgatcgacatcggcagcggccccaccatctaccagctgctgagcgcctgcgagagcttcaaggagatcgtggtgaccgactacagcgaccagaacctgcaggagctggagaagtggctgaagaaggagcccgaggccttcgactggagccccgtggtgacctacgtgtgcgacctggagggcaacagagtgaagggccccgagaaggaggagaagctgagacaggccgtgaagcaggtgctgaagtgcgacgtgacccagagccagcccctgggcgccgtgcccctgccccccgccgactgcgtgctgagcaccctgtgcctggacgccgcctgccccgacctgcccacctactgcagagccctgagaaacctgggcagcctgctgaagcccggcggcttcctggtgatcatggacgccctgaagagcagctactacatgatcggcgagcagaagttcagcagcctgcccctgggcagagaggccgtggaggccgccgtgaaggaggccggctacaccatcgagtggttcgaggtgatcagccagagctacagcagcaccatggccaacaacgagggcctgttcagcctggtggccagaaagctgagcagacccctgtag

SEQ ID NO: 162473 - protein, 1695 aa, Artificial Sequence
  derived and/or modified sequence
MNVQPCSRCGYGVYPAEKISCIDQIWHKACFHCEVCKMMLSVNNFVSHQKKPYCHAHNPKNNTFTSVYHTPLNLNVRTFPEAISGIHDQEDGEQCKSVFHWDMKSKDKEGAPNRQPLANERAYWTGYGEGNAWCPGALPDPEIVRMVEARKSLGEEYTEDYEQPRGKGSFPAMITPAYQRAKKANQLASQVEYKRGHDERISRFSTVVDTPELLRSKAGAQLQSDVRYTEDYEQQRGKGSFPAMITPAYQIAKRANELASDVRYHQQYQKEMRGMAGPAIGAEGILTRECADQYGQGYPEEYEEHRGKGSFPAMITPAYQNAKKAHELASDIKYRQDFNKMKGAAHYHSLPAQDNLVLKQAQSVNKLVSENKYKENYQNHMRGRYEGVGMDRRTLHAMKVGSLASNVAYKADYKHDIVDYNYPATLTPSYQTAMKLVPLKDANYRQSIDKLKYSSVTDTPQIVQAKINAQQLSHVNYRADYEKNKLNYTLPQDVPQLVKAKTNAKLFSEVKYKEGWEKTKGKGFEMKLDAMSLLAAKASGELASNIKYKEEYEKTKGKAMGTADSRLLHSLQIAKMSSEVEYKKGFEESKTRFHLPMDMVNIRHAKKAQTLASDLDYRKKLHEYTVLPEDMKTQWAKKAYGLQSELQYKADLAWMKGVGWLTEGSLNLEQAKKAGQLVSEKNYRQRVDELKFTSVTDSSQMEHAKKSQELQSGVAYKAGNEQSVHQYTISKDEPLFLQARANAANLSEKLYKSSWENQKAKGFELRLDSLTFLAAKAKRDLASEVKYKEDYERSRGKLIGAKDVQGDSQMSHSLQMSKLQSELEYKKGFEDTKSQCHVSLDMVHLVHARKAQHLATDVGYKTAEHHFTALPTDMKVEWAKKAYGLQSDNQYRADVKWMKGMGWVATGSLNVEQAKKAGELISEKKYRQHPDALKFTSIKDTPEMVQARISYTQAVDRLYREQGENIKHHYTPTADLPEVLLAKLNAMNISETRYKESWSKLRDGGYKLRLDALPFQAAKASGEIISDYKYKEAFEKMKGQMLGSRSLEDDISLAHSVYATSLQSDVNYKKGFEHSKAQFHLPLDMAALVHAKKAQTLASNQDYKHPLPQYTSLAEDLRLSCAKKAHKLQSENLYRSDLNFMRGVACVIPGTLEIEGRKKASELISESKYRQHPHSFKYTAVTDTPNLLHAKFSNQITNERLYKAAGEDARHEYTMTLGLPEFIRAKTNAANLSDARYKESWRNLRAQGYKLTIEALPFQAARASGDIASDFLYRHDFVKERGKLIGPQSVRDDPRIQHCRRMGQLQSELQYRRGATSSQAQFHLPMDMVHLVHAKNAQALASDHDYRTQYHKFTALPEDLKMAWAKKAHALQSELRYKSDLIGMKGIGWLALRSPQMESAKKAGELISETKYRKKPDSIKFTTVVDSPDLVHAKNSYMHCNERMYRSGDAESLHRYTLIPDHPDFTRARLNALHLSDKVYRNSWEQTRAGSYDFRLDAIPFQTARASREIASDFRYKEAFLRDRGLQIGYRSVDDDPRMKHFLNVGRLQSDNEYKKDFAKSRSQFHSSTDQPGLLQAKRSQQLASDVHYRQPLPQPTCDPEQLGLRHAQKAHQLQSDVKYKSDLNLTRGVGWTPPGSYKVEMARRAAELANARGLGLQGAYRGAEAVEAGDHQSGEVNPDATEILHVKKKKALLL

SEQ ID NO: 162474 - protein, 1703 aa, Artificial Sequence
  derived and/or modified sequence
MNVQPCSRCGYGVYPAEKISCIDQIWHKACFHCEVCKMMLSVNNFVSHQKKPYCHAHNPKNNTFTSVYHTPLNLNVRTFPEAISGIHDQEDGEQCKSVFHWDMKSKDKEGAPNRQPLANERAYWTGYGEGNAWCPGALPDPEIVRMVEARKSLGEEYTEDYEQPRGKGSFPAMITPAYQRAKKANQLASQVEYKRGHDERISRFSTVVDTPELLRSKAGAQLQSDVRYTEDYEQQRGKGSFPAMITPAYQIAKRANELASDVRYHQQYQKEMRGMAGPAIGAEGILTRECADQYGQGYPEEYEEHRGKGSFPAMITPAYQNAKKAHELASDIKYRQDFNKMKGAAHYHSLPAQDNLVLKQAQSVNKLVSENKYKENYQNHMRGRYEGVGMDRRTLHAMKVGSLASNVAYKADYKHDIVDYNYPATLTPSYQTAMKLVPLKDANYRQSIDKLKYSSVTDTPQIVQAKINAQQLSHVNYRADYEKNKLNYTLPQDVPQLVKAKTNAKLFSEVKYKEGWEKTKGKGFEMKLDAMSLLAAKASGELASNVHLLLSLKIKYKEEYEKTKGKAMGTADSRLLHSLQIAKMSSEVEYKKGFEESKTRFHLPMDMVNIRHAKKAQTLASDLDYRKKLHEYTVLPEDMKTQWAKKAYGLQSELQYKADLAWMKGVGWLTEGSLNLEQAKKAGQLVSEKNYRQRVDELKFTSVTDSSQMEHAKKSQELQSGVAYKAGNEQSVHQYTISKDEPLFLQARANAANLSEKLYKSSWENQKAKGFELRLDSLTFLAAKAKRDLASEVKYKEDYERSRGKLIGAKDVQGDSQMSHSLQMSKLQSELEYKKGFEDTKSQCHVSLDMVHLVHARKAQHLATDVGYKTAEHHFTALPTDMKVEWAKKAYGLQSDNQYRADVKWMKGMGWVATGSLNVEQAKKAGELISEKKYRQHPDALKFTSIKDTPEMVQARISYTQAVDRLYREQGENIKHHYTPTADLPEVLLAKLNAMNISETRYKESWSKLRDGGYKLRLDALPFQAAKASGEIISDYKYKEAFEKMKGQMLGSRSLEDDISLAHSVYATSLQSDVNYKKGFEHSKAQFHLPLDMAALVHAKKAQTLASNQDYKHPLPQYTSLAEDLRLSCAKKAHKLQSENLYRSDLNFMRGVACVIPGTLEIEGRKKASELISESKYRQHPHSFKYTAVTDTPNLLHAKFSNQITNERLYKAAGEDARHEYTMTLGLPEFIRAKTNAANLSDARYKESWRNLRAQGYKLTIEALPFQAARASGDIASDFLYRHDFVKERGKLIGPQSVRDDPRIQHCRRMGQLQSELQYRRGATSSQAQFHLPMDMVHLVHAKNAQALASDHDYRTQYHKFTALPEDLKMAWAKKAHALQSELRYKSDLIGMKGIGWLALRSPQMESAKKAGELISETKYRKKPDSIKFTTVVDSPDLVHAKNSYMHCNERMYRSGDAESLHRYTLIPDHPDFTRARLNALHLSDKVYRNSWEQTRAGSYDFRLDAIPFQTARASREIASDFRYKEAFLRDRGLQIGYRSVDDDPRMKHFLNVGRLQSDNEYKKDFAKSRSQFHSSTDQPGLLQAKRSQQLASDVHYRQPLPQPTCDPEQLGLRHAQKAHQLQSDVKYKSDLNLTRGVGWTPPGSYKVEMARRAAELANARGLGLQGAYRGAEAVEAGDHQSGEVNPDATEILHVKKKKALLL

SEQ ID NO: 162475 - DNA, 5088 bp, Artificial Sequence
  derived and/or modified sequence
atgaatgtccagccatgttctcggtgcggctatggggtgtacccagctgagaaaatctcttgcatcgatcagatttggcataaggcctgctttcactgtgaagtgtgcaagatgatgctcagtgtaaacaactttgtgtcccaccaaaaaaaaccctactgtcacgcccacaatccaaaaaataacacctttaccagcgtctaccacacgccactgaacctcaacgtgcgaaccttcccagaagcgatttccggaattcatgaccaggaagatggcgaacagtgtaaatctgtgttccactgggatatgaagtccaaggacaaagagggagcacctaatcgacagcctcttgccaacgaacgggcttattggaccggatatggcgaggggaatgcctggtgccccggggcactgcctgatccagagatcgtcaggatggttgaggccaggaagtcactgggtgaagagtacacagaagactatgagcagccacgaggcaagggctcatttcccgccatgattacacctgcgtatcagcgcgctaaaaaggccaatcagctggcttctcaggttgaatataaacggggccatgacgagaggatatcacgcttcagtaccgtggtagacaccccagaactgcttcgctcgaaagcgggcgctcaactccagtcagatgttagatacaccgaagactatgaacaacaacgtggcaaaggcagctttcctgcaatgataacacccgcctatcagattgccaagagagccaacgaactggcttccgacgtcaggtatcaccaacagtaccagaaggagatgcgtgggatggccggccccgcgattggagcagaagggatcctgaccagagagtgtgctgaccaatatgggcaaggttatcccgaggagtacgaggaacataggggaaagggcagctttccagccatgatcacccctgcctaccagaacgccaagaaggcccacgagctggccagcgacatcaaatataggcaggattttaataaaatgaagggggcagcacattaccacagtctgcctgctcaagataacttggtgttgaagcaagctcagtctgttaacaagctggtgtctgaaaataaatacaaggagaattaccagaaccatatgcgcggcaggtacgagggagtgggcatggaccgccgtacccttcatgccatgaaggtcggatccttagcctccaatgtagcctacaaagccgattacaaacacgatattgtcgattataactatccagccactctgaccccttcttatcaaacagccatgaaactcgtgccgctcaaagacgccaattatagacagtctatagacaaattgaaatacagttccgtgactgatactcctcagatcgtgcaagccaaaataaatgctcagcagctgagtcacgttaactatcgggctgattatgagaaaaataaactgaattataccttgccgcaggatgttccgcagctggtcaaggctaaaaccaacgcgaaattgttctccgaggttaaatataaggaggggtgggagaaaaccaaagggaaaggattcgagatgaaactcgacgcgatgtccttgttggctgcgaaggcgagtggggagttggctagcaatatcaaatacaaagaagagtacgaaaaaaccaagggcaaggctatgggtacagcagactcccgattactgcacagtctacaaattgccaaaatgagctccgaggtggaatataaaaaaggcttcgaggaaagcaaaacacggtttcaccttccgatggatatggtgaacattaggcacgcaaaaaaagcccaaactctcgcttccgacttggactaccgaaaaaaactccacgagtacaccgtgttgcccgaagatatgaagacacagtgggctaagaaggcatacggactgcagagtgagctacaatacaaggccgacctggcatggatgaaaggagtcggttggctgacagaaggctccctgaatctggaacaggccaaaaaggctggccagctggtcagcgagaagaactaccgccagcgtgttgacgagcttaaatttacgtccgtgacagactcctctcagatggaacacgcgaaaaaatcacaggaactccagtccggtgttgcctataaggctgggaatgagcagtctgtccaccaatacactatcagtaaggacgagcccttattccttcaggctagagctaatgccgccaatctttccgagaaactctataaatctagctgggagaatcaaaaggccaaaggatttgaactgcggctggattcccttacttttctggccgccaaggctaagagggacctcgcaagtgaggttaagtataaagaggactatgaacggagcagggggaagctcatcggggccaaggacgtccagggagatagccagatgtcacactccctccaaatgtccaagcttcagtctgaattggagtacaagaagggtttcgaagacacgaaatcgcagtgtcatgtgagcctggacatggtccacttagtgcacgctcgcaaggcgcaacatctggcgacagacgtcggatataagaccgcagaacatcacttcacagcccttccaaccgatatgaaggtggagtgggcaaaaaaggcttatggactgcagagtgacaaccagtatcgcgctgatgtgaagtggatgaaggggatgggttgggtcgctacagggagtctcaacgtggaacaggcaaagaaggcaggggagctgatcagtgaaaagaagtacagacaacaccccgatgctctcaaatttactagcatcaaggacacccctgaaatggtccaggccagaattagctacacgcaggcagtggataggctgtacagggaacaaggagaaaacatcaaacatcattacactcctacggccgatctcccagaggtgctgctggcgaagctaaacgcaatgaacatttccgaaactcggtataaggagagttggagtaagcttagagacggcgggtataagctgcgtctggacgcactgccattccaggccgcgaaagccagcggagagattatatctgactataagtacaaggaggctttcgagaagatgaagggacagatgctggggagccgctctctggaggacgacataagtctcgcccacagcgtctatgctaccagtttacagtccgatgttaattacaagaaagggttcgaacactccaaagcccaatttcatctgcccttagatatggcagctctcgtccacgccaaaaaagctcagacacttgcctccaaccaggactataagcatccgctaccccagtacacttcactggctgaagatctgcggctgtcttgtgcaaagaaagcgcataagttgcagtccgagaacctctacaggagcgacctcaattttatgcggggggtggcctgtgttattccgggaactttagagattgagggccgaaagaaagctagcgaactgattagtgagagcaagtaccggcagcatcctcacagcttcaaatacacagcggtgacagatacacccaacctgcttcacgccaaattttctaaccagataacgaacgagagactatacaaagcggctggagaagacgctcgacacgaatatactatgactttgggactgcctgagtttatccgagctaagacaaatgctgctaatctttctgatgctcgttataaggaaagttggcgaaacttgcgcgctcaaggttacaagttgactatcgaagccctgcccttccaggccgcccgcgcatctggagacatagcgagcgactttttgtacaggcatgacttcgtgaaggaacggggtaagttgatcggaccacagagtgttcgcgacgacccacgcatccagcactgtcggcgaatgggccaactgcagagcgagctccagtatcgccgcggagccaccagctcacaggctcagttccatcttcctatggacatggtacacctggtgcacgcgaagaatgcccaggctctggcttccgatcacgactaccgcacccagtatcacaaatttaccgcactcccagaggacttgaagatggcttgggcaaaaaaagcccatgctctacagagcgagttgaggtacaagtccgatttgatcgggatgaaaggtattgggtggctcgcgctacgctctccccaaatggagtccgcaaaaaaagccggcgagttaatttctgagactaagtacaggaaaaaacctgatagtatcaaatttaccacagtggtggacagcccagatttagtacatgcgaaaaactcttatatgcactgcaacgagcggatgtatcgttccggcgatgcagaatcattgcatcgatacaccctgataccagaccatcctgatttcacaagggctagactgaacgcactccatctgtcggacaaagtgtatagaaacagctgggagcaaacacgggccgggtcctatgatttccgtctagatgcaatcccgttccagactgctcgagccagtcgagaaatagccagtgacttcagatataaggaggctttcctgagggatagggggctgcaaattggctatagatccgtggacgacgacccacggatgaagcactttctgaatgtgggtcggctgcaatccgacaatgagtacaagaaagatttcgctaagtctcgcagtcagtttcactcttcgaccgaccagccagggctcctacaggcaaaacgcagccagcagctggcctcagatgtccactaccgccagccactaccccaacccacatgtgatcccgaacagctagggctacgacacgcccagaaggcacaccagttgcaaagtgacgtaaaatacaagagcgatctcaatttaacccgtggagtaggatggacaccgcctggatcctacaaggtggaaatggctagaagggccgctgagttggctaatgcgcggggcttagggctccagggggcatatcgcggcgctgaagccgtggaagcaggggaccaccaaagtggggaggttaatccagacgcaaccgaaatcctgcatgtaaagaagaaaaaggcacttctgttatag

SEQ ID NO: 162476 - DNA, 5112 bp, Artificial Sequence
  derived and/or modified sequence
atgaatgttcagccttgttccaggtgtggctacggcgtgtaccctgccgaaaaaatatcatgcatcgaccagatctggcacaaagcctgttttcactgcgaagtgtgcaagatgatgctatcagtgaacaactttgtaagccaccaaaaaaaaccttactgtcacgcccacaatcccaagaataacacgttcacttccgtctaccacacccctctgaatctaaacgtccgcacctttccagaggccatctcaggcatccacgatcaggaggatggtgaacagtgcaaatccgtctttcattgggacatgaagtcaaaagataaggagggtgcccctaacagacagccacttgctaacgagagagcctattggacaggctacggagagggcaacgcttggtgtcccggcgcactgcccgacccagaaatcgtcaggatggtagaagcgcggaagagcttaggagaggaatatactgaggactatgagcaaccaaggggcaaagggtcttttcctgcgatgattacaccagcttatcagcgggccaagaaggctaatcagctcgccagccaggttgagtataagcgcggtcatgacgagcgtatctcacgcttctcaactgtagtggacacgccagagctgttgcggagcaaggcaggtgcgcagctgcagtctgacgtcagatacacggaagactatgaacagcagagaggaaagggttctttccccgcaatgataacacccgcataccaaatagcaaagcgcgcaaatgaactggcctccgacgtgagataccaccagcagtaccaaaaggaaatgcgcgggatggcgggacccgctattggcgctgaaggaatcctaacaagggagtgcgccgaccagtatggccagggatatccagaggaatatgaggaacaccgcgggaagggttcattcccggcgatgattacccctgcatatcagaacgctaaaaaggcccacgagttggcgagtgacattaagtacagacaggacttcaacaagatgaagggcgcggcacactatcattcattacccgctcaagacaatctcgtgctaaagcaggcgcagagcgtcaacaagctcgtttccgaaaataaatacaaggagaactaccagaaccatatgcggggtcgttatgagggggtcggcatggatcggaggacccttcacgcaatgaaggtgggcagcctggcctccaacgtggcctacaaggcagattataaacatgatattgtcgattacaattacccagctaccctgacacctagttaccagactgcgatgaagctcgtgcccctgaaagacgccaactatcgtcagtcgatcgataaattgaagtattcatccgtgacagataccccacagatagtgcaggccaagataaacgcccagcagctcagccatgtgaattaccgggccgactatgagaagaacaagctgaactatacactgccccaggacgtgcctcaactcgtgaaagctaagactaacgctaaactatttagcgaggtcaaatacaaagaaggatgggagaagacaaagggaaaaggcttcgaaatgaagctggatgctatgagtctgctcgccgccaaagccagcggcgagctggctagtaatgtacacttgttattgtcactcaaaatcaaatataaagaggagtatgaaaagaccaaaggcaaagctatggggacagccgatagtaggctgcttcactctctgcagattgcaaaaatgtcatccgaggtggagtacaagaagggatttgaagaatccaagacaagatttcacctgcctatggatatggtgaatattcgccacgccaaaaaggcacagacgctggcctcagacctggattacagaaagaagctccatgagtatacagtcctgcccgaggatatgaaaacacaatgggcaaagaaggcttatgggttgcaatcagagcttcagtacaaggccgatctggcctggatgaagggggtggggtggctgaccgaagggtcacttaatctggagcaggctaaaaaggccggacagctcgtatccgaaaaaaactaccgccaacgcgtggacgaactgaagtttaccagtgtgactgactcatctcaaatggaacacgcaaagaaatcgcaagagttacagtccggtgtggcctataaagctggaaatgaacaaagtgtacatcagtataccattagcaaagacgagccactgtttctgcaggccagagccaacgctgcgaatctctctgagaaactttacaaatcgagttgggagaatcagaaagccaagggatttgagcttcggctcgactcgctaacttttcttgctgctaaggcaaagcgcgacttggcgtcggaggtgaaatataaggaagattacgaacgctcccggggaaaattgattggcgccaaggacgtgcaaggagactctcaaatgtctcactctctgcagatgtctaagttgcaaagcgagctggagtacaagaaaggctttgaggataccaaatcacagtgtcacgtttctttagacatggtgcatctggtacacgcacggaaggcgcagcaccttgccaccgacgtgggatataagactgccgagcaccatttcaccgctctgccaacagacatgaaggtggagtgggctaaaaaggcatacggcctgcagagcgacaaccagtaccgtgccgatgtgaaatggatgaaaggcatgggatgggttgccaccgggagccttaacgtggagcaagccaaaaaggccggtgagcttatcagcgaaaaaaaataccggcaacaccctgacgcgctgaagttcacaagcatcaaagacactccagagatggtgcaagctagaatctcctatactcaggcggtggaccgtctgtaccgggaacagggtgaaaacatcaagcaccattatactcccaccgccgatctgcccgaggttctcctggccaagctgaacgcaatgaatattagcgaaactaggtataaggaatcatggtccaaactacgagacggcgggtacaagctgaggctcgatgcccttccgtttcaagctgcaaaagcctccggggagattatttcagactacaagtacaaggaggccttcgagaagatgaaaggccaaatgttgggctcacgtagtcttgaggacgatatctccttggcccacagtgtgtacgctacatccctacaatcggatgtgaattacaagaaaggctttgaacattcgaaggcccagttccacttgcccctcgacatggctgcgctcgtccatgccaagaaagcccagactctagcgagcaaccaggactataaacaccctctgccgcagtatacctcactggccgaggacctacggctgtcctgcgctaagaaggcccacaagcttcagagtgagaacctgtaccgtagcgacctgaacttcatgcgaggggtcgcatgcgtcattccggggaccctggagatcgagggaaggaagaaggccagcgagttaatctctgagagcaaatacagacagcatcctcactctttcaagtataccgctgtgaccgacacccctaaccttctgcatgctaagttttcgaatcaaataactaacgaaagattgtataaagccgctggagaggacgccaggcatgaatacaccatgacattagggcttccagagtttattcgcgccaagaccaacgcagcaaacttgagtgatgcgcgatataaagaatcgtggcggaacctacgggctcaggggtataagttaactatcgaggcacttcctttccaggctgcaagggcttcaggagacatagcatctgactttctgtaccgccatgatttcgtgaaagaacgcgggaaactcatagggccccaatcagtgagagatgacccaaggatacagcattgtaggagaatgggccaactgcagtctgagttacagtacagacgtggggccacatcatctcaggcccagttccacctgccgatggacatggttcacctggtccacgcaaagaacgctcaggcgctggcaagcgaccacgactaccggactcagtaccacaagttcactgcactgccggaagatctgaaaatggcatgggccaaaaaagcccacgccttacaaagtgagctgcgttacaaaagcgacctcattggcatgaagggaatcggttggttggccttacgatcgccacagatggagagcgccaagaaggctggggaacttattagcgagactaagtaccgaaagaaaccagatagtataaaatttactaccgtcgtcgactcccccgatttggtgcacgctaaaaattcctatatgcattgtaatgagcggatgtataggtccggagacgcagaaagtctacatcgctacacactgatccccgatcacccagattttactagagcacgacttaatgcccttcatttgagcgataaggtctatcggaactcatgggagcaaacgcgggccgggtcttacgacttccggctggacgcaattccttttcagactgccagagcctcaagggaaatcgcaagcgatttccgctacaaggaagccttcttgagggaccgcggcctgcaaattggataccggagtgttgacgacgacccacggatgaagcacttccttaacgttggacgtctgcagtccgacaatgagtacaagaaagattttgccaagagtcgctctcaattccactcctcaacagaccaacccggtctgcttcaggcaaaaaggagccagcagttggcttcagacgtccactacagacagcccttaccgcagcccacctgtgatccggagcaactaggtctacgccatgcacaaaaggctcaccagttgcagtcagacgtcaagtacaaatcagatttaaatcttactcgaggagtaggatggacaccacccggatcgtataaagttgagatggctagaagggcagccgagttggctaacgcacgcggcctgggactacagggggcctataggggcgccgaagcagtggaagctggcgatcaccagagcggagaagtgaatcccgacgcaactgagatccttcacgtgaaaaaaaagaaggcattactgctgtag

SEQ ID NO: 162477 - DNA, 5088 bp, Artificial Sequence
  derived and/or modified sequence
atgaatgtgcagccctgcagccgctgtggctatggagtgtacccagctgagaagatcagctgcatcgaccagatctggcacaaggcctgcttccactgtgaggtgtgcaagatgatgctgtctgtgaacaactttgtgagccaccagaagaagccctactgccacgcccacaaccccaagaacaacaccttcacctctgtgtaccacacccccctgaacctgaatgtgaggaccttccctgaggccatcagcggcatccatgaccaggaggatggagagcagtgcaagtctgtgttccactgggacatgaagagcaaggacaaggagggcgcccccaaccggcagcccctggccaatgaaagagcctactggacaggctatggagagggcaatgcctggtgccctggggccctgcctgaccctgagatcgtgaggatggtggaggccaggaagagcctgggggaggagtacacagaagattatgagcagccccggggcaagggcagcttccctgccatgatcaccccagcctaccagagggccaagaaggccaaccagctggccagccaggtggagtacaagaggggccatgatgagcgcatcagccgcttcagcacagtggtggacaccccagagctgctgcggagcaaggccggggcccagctgcagagtgatgtgcgctacacagaggactatgagcagcagaggggcaagggcagcttccctgccatgatcaccccagcctaccagatcgccaagagggccaatgagctggccagtgatgtgcgctaccaccagcagtaccagaaggagatgaggggcatggccggccctgccatcggggctgagggcatcctgaccagagaatgtgccgaccagtatggccagggctacccagaggagtatgaggagcaccggggcaagggcagcttccctgccatgatcaccccagcctaccagaatgccaagaaggcccacgagctggccagtgacatcaagtaccggcaggacttcaacaagatgaagggggccgcccactaccacagcctgcctgcccaggacaacctggtgctgaagcaggcccagagcgtgaacaagctggtgtctgagaacaagtacaaggagaactaccagaaccacatgaggggccgctatgaaggagtgggcatggacaggaggaccctgcacgccatgaaggtgggcagcctggccagcaatgtggcctacaaggctgactacaagcatgacatcgtggactacaactacccagccaccctgacccccagctaccagacagccatgaagctggtgcccctgaaggatgccaactaccggcagagcattgacaagctgaagtacagctctgtgacagacaccccccagatcgtgcaggccaagatcaatgcccagcagctgagccacgtgaactacagagctgactatgagaagaacaagctgaactacaccctgccccaggatgtgccccagctggtgaaggccaagaccaatgccaagctgttcagcgaggtgaagtacaaggagggctgggagaagaccaagggcaagggctttgagatgaagctggatgccatgagcctgctggccgccaaggccagcggggagctggccagcaacatcaagtacaaggaggagtatgagaagaccaagggcaaggccatgggcacagctgacagccggctgctgcacagcctgcagatcgccaagatgagcagcgaggtggagtacaagaagggctttgaggagagcaagacccgcttccacctgcccatggacatggtgaacatcagacatgccaagaaggcccagaccctggccagtgacctggactacaggaagaagctgcacgagtacacagtgctgcctgaggacatgaagacccagtgggccaagaaggcctacggcctgcagagcgagctgcagtacaaggctgacctggcctggatgaagggcgtgggctggctgacagagggcagcctgaacctggagcaggccaagaaggccggccagctggtgtctgagaagaactaccggcagagggtggatgagctgaagttcacctctgtgacagacagcagccagatggagcacgccaagaagagccaggagctgcagagcggcgtggcctacaaggctggaaatgagcagagcgtgcaccagtacaccatcagcaaggatgagcccctcttcctgcaggcccgggccaatgctgccaacctgtctgagaagctgtacaagagctcctgggagaaccagaaggccaagggctttgagctgcggctggacagcctgaccttcctggccgccaaggccaagagggacctggccagcgaggtgaagtacaaggaggactatgaaagaagccggggcaagctgattggagccaaggatgtgcagggcgacagccagatgagccacagcctgcagatgagcaagctgcagagcgagctggagtacaagaagggctttgaggacaccaagagccagtgccacgtgtccctggacatggtgcacctggtgcacgccaggaaggcccagcacctggccacagatgtgggctacaagacagctgagcaccacttcaccgccctgcccacagacatgaaggtggagtgggccaagaaggcctacggcctgcagagcgacaaccagtacagagcagatgtgaagtggatgaagggcatgggctgggtggccaccggcagcctgaatgtggagcaggccaagaaggccggggagctgatcagcgagaagaagtaccggcagcacccagatgccctgaagttcaccagcatcaaggacaccccagagatggtgcaggcccgcatctcctacacccaggccgtggaccggctgtaccgggagcagggcgagaacatcaagcaccactacacccccacagctgacctgcctgaggtgctgctggccaagctgaatgccatgaacatcagcgagacccgctacaaggagagctggagcaagctgagagatggcggctacaagctgcggctggatgccctgcccttccaggccgccaaggccagcggggagatcatcagtgactacaagtacaaggaggcctttgagaagatgaagggccagatgctgggcagccgcagcctggaggatgacatcagcctggcccacagcgtgtatgccaccagcctgcagagtgatgtgaactacaagaagggctttgagcacagcaaggcccagttccacctgcccctggacatggccgccctggtgcacgccaagaaggcccagaccctggccagcaaccaggactacaagcaccccctgccccagtacaccagcctggccgaggacctgcggctgagctgtgccaagaaggcccacaagctgcagagtgaaaatctctacagaagtgacctgaacttcatgagaggagtggcctgcgtcatccctggcaccctggagattgagggcaggaagaaggccagcgagctgatcagcgagagcaagtaccggcagcacccccacagcttcaagtacacagctgtgacagacacccccaacctgctgcacgccaagttcagcaaccagatcaccaatgaaagactctacaaggctgctggagaagatgcccggcatgagtacaccatgaccctgggcctgcctgagttcatccgggccaagaccaatgctgccaacctgagtgatgcccgctacaaggagagctggaggaacctgcgggcccagggctacaagctgaccatcgaggccctgcccttccaggccgcccgggccagcggggacatcgccagtgacttcctgtacagacatgactttgtgaaggagcggggcaagctgattggcccccagagcgtgagagatgacccccgcatccagcactgcaggaggatgggccagctgcagagcgagctgcagtaccgccgcggggccaccagcagccaggcccagttccacctgcccatggacatggtgcacctggtgcacgccaagaatgcccaggccctggccagtgaccatgactaccgcacccagtaccacaagttcaccgccctgcctgaggacctgaagatggcctgggccaagaaggcccacgccctgcagagcgagctgcgctacaagagtgacctgattggcatgaagggcatcggctggctggccctgcggagcccccagatggagagcgccaagaaggccggggagctgatcagcgagaccaagtacaggaagaagccagacagcatcaagttcaccaccgtggtggacagcccagacctggtgcacgccaagaacagctacatgcactgcaatgaaagaatgtacagaagtggagatgctgagagcctgcaccgctacaccctcatcccagaccacccagacttcacccgggcccggctgaatgccctgcacctgagtgacaaggtgtacagaaattcctgggagcagaccagggctggcagctatgacttccggctggatgccatccccttccagacagcccgggccagccgggagatcgccagtgacttccgctacaaggaggccttcctgcgggaccggggcctgcagatcggctacagatctgtggatgatgaccccaggatgaagcacttcctgaatgtgggccgcctgcagagcgacaatgagtacaagaaggactttgccaagagccgcagccagttccacagcagcacagaccagcccggcctgctgcaggccaagaggagccagcagctggccagtgatgtgcactaccggcagcccctgccccagcccacctgtgaccctgagcagctgggcctgcggcatgcccagaaggcccaccagctgcagagtgatgtgaagtacaagagtgacctgaacctgacccggggcgtgggctggaccccacctggcagctacaaggtggagatggcccggcgggctgctgagctggccaatgcccggggcctgggcctgcagggcgcctacagaggagctgaggccgtggaggccggggaccaccagagcggggaggtgaacccagatgccacagagatcctgcacgtgaagaagaagaaggccctgctgctgtag

SEQ ID NO: 162478 - DNA, 5112 bp, Artificial Sequence
  derived and/or modified sequence
atgaatgtgcagccctgcagccgctgtggctatggagtgtacccagctgagaagatcagctgcatcgaccagatctggcacaaggcctgcttccactgtgaggtgtgcaagatgatgctgtctgtgaacaactttgtgagccaccagaagaagccctactgccacgcccacaaccccaagaacaacaccttcacctctgtgtaccacacccccctgaacctgaatgtgaggaccttccctgaggccatcagcggcatccatgaccaggaggatggagagcagtgcaagtctgtgttccactgggacatgaagagcaaggacaaggagggcgcccccaaccggcagcccctggccaatgaaagagcctactggacaggctatggagagggcaatgcctggtgccctggggccctgcctgaccctgagatcgtgaggatggtggaggccaggaagagcctgggggaggagtacacagaagattatgagcagccccggggcaagggcagcttccctgccatgatcaccccagcctaccagagggccaagaaggccaaccagctggccagccaggtggagtacaagaggggccatgatgagcgcatcagccgcttcagcacagtggtggacaccccagagctgctgcggagcaaggccggggcccagctgcagagtgatgtgcgctacacagaggactatgagcagcagaggggcaagggcagcttccctgccatgatcaccccagcctaccagatcgccaagagggccaatgagctggccagtgatgtgcgctaccaccagcagtaccagaaggagatgaggggcatggccggccctgccatcggggctgagggcatcctgaccagagaatgtgccgaccagtatggccagggctacccagaggagtatgaggagcaccggggcaagggcagcttccctgccatgatcaccccagcctaccagaatgccaagaaggcccacgagctggccagtgacatcaagtaccggcaggacttcaacaagatgaagggggccgcccactaccacagcctgcctgcccaggacaacctggtgctgaagcaggcccagagcgtgaacaagctggtgtctgagaacaagtacaaggagaactaccagaaccacatgaggggccgctatgaaggagtgggcatggacaggaggaccctgcacgccatgaaggtgggcagcctggccagcaatgtggcctacaaggctgactacaagcatgacatcgtggactacaactacccagccaccctgacccccagctaccagacagccatgaagctggtgcccctgaaggatgccaactaccggcagagcattgacaagctgaagtacagctctgtgacagacaccccccagatcgtgcaggccaagatcaatgcccagcagctgagccacgtgaactacagagctgactatgagaagaacaagctgaactacaccctgccccaggatgtgccccagctggtgaaggccaagaccaatgccaagctgttcagcgaggtgaagtacaaggagggctgggagaagaccaagggcaagggctttgagatgaagctggatgccatgagcctgctggccgccaaggccagcggggagctggccagcaatgtgcacctgctgctgagcctgaagatcaagtacaaggaggagtatgagaagaccaagggcaaggccatgggcacagctgacagccggctgctgcacagcctgcagatcgccaagatgagcagcgaggtggagtacaagaagggctttgaggagagcaagacccgcttccacctgcccatggacatggtgaacatcagacatgccaagaaggcccagaccctggccagtgacctggactacaggaagaagctgcacgagtacacagtgctgcctgaggacatgaagacccagtgggccaagaaggcctacggcctgcagagcgagctgcagtacaaggctgacctggcctggatgaagggcgtgggctggctgacagagggcagcctgaacctggagcaggccaagaaggccggccagctggtgtctgagaagaactaccggcagagggtggatgagctgaagttcacctctgtgacagacagcagccagatggagcacgccaagaagagccaggagctgcagagcggcgtggcctacaaggctggaaatgagcagagcgtgcaccagtacaccatcagcaaggatgagcccctcttcctgcaggcccgggccaatgctgccaacctgtctgagaagctgtacaagagctcctgggagaaccagaaggccaagggctttgagctgcggctggacagcctgaccttcctggccgccaaggccaagagggacctggccagcgaggtgaagtacaaggaggactatgaaagaagccggggcaagctgattggagccaaggatgtgcagggcgacagccagatgagccacagcctgcagatgagcaagctgcagagcgagctggagtacaagaagggctttgaggacaccaagagccagtgccacgtgtccctggacatggtgcacctggtgcacgccaggaaggcccagcacctggccacagatgtgggctacaagacagctgagcaccacttcaccgccctgcccacagacatgaaggtggagtgggccaagaaggcctacggcctgcagagcgacaaccagtacagagcagatgtgaagtggatgaagggcatgggctgggtggccaccggcagcctgaatgtggagcaggccaagaaggccggggagctgatcagcgagaagaagtaccggcagcacccagatgccctgaagttcaccagcatcaaggacaccccagagatggtgcaggcccgcatctcctacacccaggccgtggaccggctgtaccgggagcagggcgagaacatcaagcaccactacacccccacagctgacctgcctgaggtgctgctggccaagctgaatgccatgaacatcagcgagacccgctacaaggagagctggagcaagctgagagatggcggctacaagctgcggctggatgccctgcccttccaggccgccaaggccagcggggagatcatcagtgactacaagtacaaggaggcctttgagaagatgaagggccagatgctgggcagccgcagcctggaggatgacatcagcctggcccacagcgtgtatgccaccagcctgcagagtgatgtgaactacaagaagggctttgagcacagcaaggcccagttccacctgcccctggacatggccgccctggtgcacgccaagaaggcccagaccctggccagcaaccaggactacaagcaccccctgccccagtacaccagcctggccgaggacctgcggctgagctgtgccaagaaggcccacaagctgcagagtgaaaatctctacagaagtgacctgaacttcatgagaggagtggcctgcgtcatccctggcaccctggagattgagggcaggaagaaggccagcgagctgatcagcgagagcaagtaccggcagcacccccacagcttcaagtacacagctgtgacagacacccccaacctgctgcacgccaagttcagcaaccagatcaccaatgaaagactctacaaggctgctggagaagatgcccggcatgagtacaccatgaccctgggcctgcctgagttcatccgggccaagaccaatgctgccaacctgagtgatgcccgctacaaggagagctggaggaacctgcgggcccagggctacaagctgaccatcgaggccctgcccttccaggccgcccgggccagcggggacatcgccagtgacttcctgtacagacatgactttgtgaaggagcggggcaagctgattggcccccagagcgtgagagatgacccccgcatccagcactgcaggaggatgggccagctgcagagcgagctgcagtaccgccgcggggccaccagcagccaggcccagttccacctgcccatggacatggtgcacctggtgcacgccaagaatgcccaggccctggccagtgaccatgactaccgcacccagtaccacaagttcaccgccctgcctgaggacctgaagatggcctgggccaagaaggcccacgccctgcagagcgagctgcgctacaagagtgacctgattggcatgaagggcatcggctggctggccctgcggagcccccagatggagagcgccaagaaggccggggagctgatcagcgagaccaagtacaggaagaagccagacagcatcaagttcaccaccgtggtggacagcccagacctggtgcacgccaagaacagctacatgcactgcaatgaaagaatgtacagaagtggagatgctgagagcctgcaccgctacaccctcatcccagaccacccagacttcacccgggcccggctgaatgccctgcacctgagtgacaaggtgtacagaaattcctgggagcagaccagggctggcagctatgacttccggctggatgccatccccttccagacagcccgggccagccgggagatcgccagtgacttccgctacaaggaggccttcctgcgggaccggggcctgcagatcggctacagatctgtggatgatgaccccaggatgaagcacttcctgaatgtgggccgcctgcagagcgacaatgagtacaagaaggactttgccaagagccgcagccagttccacagcagcacagaccagcccggcctgctgcaggccaagaggagccagcagctggccagtgatgtgcactaccggcagcccctgccccagcccacctgtgaccctgagcagctgggcctgcggcatgcccagaaggcccaccagctgcagagtgatgtgaagtacaagagtgacctgaacctgacccggggcgtgggctggaccccacctggcagctacaaggtggagatggcccggcgggctgctgagctggccaatgcccggggcctgggcctgcagggcgcctacagaggagctgaggccgtggaggccggggaccaccagagcggggaggtgaacccagatgccacagagatcctgcacgtgaagaagaagaaggccctgctgctgtag

SEQ ID NO: 162479 - DNA, 5088 bp, Artificial Sequence
  derived and/or modified sequence
atgaacgtgcagccctgcagccggtgcggctacggcgtgtaccccgccgagaagatatcttgcattgatcagatatggcacaaagcgtgcttccactgtgaagtgtgcaaaatgatgctgtctgtcaacaactttgtatcacaccagaagaagccatattgtcacgctcacaacccaaaaaacaacactttcacaagcgtctaccatacaccactcaatttaaacgtgcgtacttttccagaggctatcagtggcattcacgaccaggaggatggtgagcagtgtaagtccgtctttcattgggacatgaaaagcaaggataaggaaggggcccccaaccgccagccgctcgccaacgagcgtgcctattggacgggctacggagaagggaatgcatggtgccccggtgcattaccagatccagaaattgtgcgtatggtagaggcaagaaaaagcttaggggaagagtacaccgaggattatgaacaaccacgcggtaaagggagttttccagctatgatcacccccgcctatcagagggccaaaaaggctaaccagctggcttcgcaagtggagtacaaaagagggcatgacgagaggattagccggttctcaacagttgtggacacccccgagctactgcggtctaaggctggcgctcaactgcagtctgatgtcagatacactgaggattatgaacagcagagaggaaagggaagtttccctgctatgattactccagcctaccagattgccaaacgagccaacgagcttgcctccgatgttagataccaccagcagtaccagaaggagatgcggggcatggccggacctgccatcggagccgagggtatcctgacccgcgaatgcgccgaccagtacggccagggctatcctgaggagtatgaggagcataggggaaagggtagctttccagccatgatcacacccgcataccagaatgccaagaaagctcacgagctggcttctgacatcaaatatagacaggacttcaacaaaatgaagggcgcagcacattaccactcattgcccgctcaggataacctggtactgaagcaagctcagagtgtcaataagttggtgagtgagaataagtataaggagaattatcagaaccatatgaggggacgctatgagggcgttggcatggacaggcggacgttgcacgcaatgaaagtaggaagcctggcatcaaacgtggcctacaaagctgattataaacacgacattgtcgactacaactaccctgctaccctcaccccaagctaccagaccgccatgaagttagttcccctgaaagatgcaaattacagacaatctatagataagctcaagtacagctctgtcacagacacaccacagattgtgcaggcgaaaataaatgctcaacaactgtcccatgtgaactatagggctgattacgagaagaataaacttaactataccctcccccaggacgtacctcagctggttaaagccaagaccaacgcaaagctcttttccgaagttaagtacaaggaaggctgggagaagaccaaaggtaaaggttttgaaatgaagctggatgctatgtccttgctggcggccaaggcttctggcgaactagcgagcaacatcaaatacaaggaggagtacgagaagacgaagggcaaggccatgggcacagcagatagtaggcttctccatagcctgcagatcgctaagatgtcatcagaggtggagtacaaaaaaggctttgaggagtccaaaaccagattccacttgcccatggacatggtgaacattaggcacgctaagaaagcacagacattggcgtccgatctcgactacagaaagaagctgcatgaatacacggtgctgcctgaagacatgaaaacccagtgggctaaaaaagcctatggccttcagtccgagcttcagtataaagctgacctggcatggatgaagggagtgggctggcttaccgagggatccctcaatctagagcaggcaaaaaaagccggccaactggtatccgagaagaattatcgccagagagtggatgagctcaaatttacttcagttacagacagctctcagatggagcatgcaaaaaaaagccaggagcttcagtccggcgtagcttacaaagcaggaaacgaacagtctgtgcatcagtataccatatctaaggatgagccattgttcctgcaagcccgcgccaatgctgctaacctttccgaaaaactatataagtccagctgggagaatcagaaagctaaaggattcgagttacggctcgatagtttgaccttcttggcggccaaagccaagagagacctggccagtgaggtgaagtacaaggaggactacgagaggagccgaggcaaactgatcggggccaaagacgttcaaggagattcccagatgtcgcactcccttcagatgagtaagctgcagagcgaactggagtacaagaaagggtttgaggacactaaaagccagtgccacgtttctctcgacatggttcacctggtgcacgcgcgaaaagcccagcaccttgcaacagacgtggggtacaagacagcggagcatcatttcacagctctgccaactgacatgaaggtggagtgggccaaaaaggcctacggcttacaaagcgataaccaataccgggccgacgtcaagtggatgaaagggatgggctgggtggcaactggctccctgaatgtagaacaggccaagaaggccggggagttaattagcgaaaaaaagtaccgacagcatccagacgctctaaaatttacttctatcaaagatacacctgagatggtgcaggctcgaatcagttatacccaggctgtcgatcgcctgtatagagaacagggagaaaacatcaaacatcactatacccctaccgccgaccttccagaagttttactggccaaactgaatgccatgaatatttctgaaacaaggtataaagaaagctggtcaaaactgagagatggcggctataaattgcgcttagacgcgctgccttttcaggcagccaaagcttctggcgagattatctcagactataagtataaggaggctttcgagaagatgaagggtcagatgttagggtctcgtagcctggaggacgacatttctctggcgcactccgtatacgcaacatcattgcagagcgacgttaactataaaaagggttttgagcactccaaggcccaattccaccttcctctggacatggccgcactggtgcatgcgaagaaggcccagacccttgcttcaaatcaggactacaagcacccactgccacaatatacttctctggctgaggacttgcggctgtcttgtgccaagaaggcccataagctgcaatcagagaacctgtacaggtcagacctcaattttatgagaggcgtggcatgcgtaattccaggtaccctcgagattgaagggagaaaaaaggcaagcgagctcataagcgaatcaaaatatagacaacatccacactctttcaagtacacagcagttaccgatacacccaacctgctccatgccaaattcagcaatcagattactaacgagcggctgtacaaagcagcaggggaggatgcacgacatgaatacaccatgacactgggcctccccgaattcatcagagcaaaaaccaatgccgctaatcttagcgacgctagatacaaggagtcatggcgcaacttgagggctcagggatataaactgaccatcgaggcactgccctttcaggccgcgagagctagtggggatattgctagtgatttcctctatcgtcatgatttcgtgaaagagcggggcaagctcataggtccccagtcggtcagggatgacccccgtatccagcattgccgtcgaatgggacaacttcagagcgaactgcagtaccgccgaggggcaacctcttctcaggctcaattccacctgccaatggacatggtccacctcgtccatgcgaagaatgctcaggctctagccagtgatcacgactatcgaactcaatatcacaagtttaccgccctgccagaggacctcaaaatggcgtgggcaaagaaagcacatgctttacagagtgagctgaggtataaaagtgatcttattggaatgaagggcatcgggtggctggcgctgagatctccacagatggagagtgccaaaaaggcaggtgagcttattagtgagactaaataccggaaaaagcccgactctattaagtttacgacagttgtcgactctcccgatctcgtgcatgccaaaaattcatacatgcactgcaatgaacggatgtacaggtccggcgacgccgaaagtctgcacaggtacactcttatccccgatcacccagactttacccgggcccggttgaacgctctgcatttgagtgataaggtctaccgtaacagttgggaacagaccagggccggcagctacgactttcgattggacgcaatacctttccagactgctagagcaagtcgagagatcgcatccgatttccgctacaaggaggcattccttcgagatcgaggacttcagatagggtatcggagtgtggacgatgatcccagaatgaagcattttctgaacgtgggtcggttgcagagcgataatgagtacaaaaaggattttgctaagtcaaggagtcaatttcacagctccacagatcaacctggcctcctgcaggcaaagcggagtcagcagctcgcctccgatgtccactaccggcagccccttcctcaacccacatgcgacccagaacagctgggcctgaggcatgcccagaaagcccaccagttacagtcggatgtgaaatataagagcgatctgaacttgacccgcggagtcggctggacccctccagggtcgtataaggtcgagatggctcgtagggccgccgagctggccaacgcccgtgggctgggactgcaaggggcttatcgtggagccgaggcagtagaagccggcgatcaccagtcaggtgaagtgaaccctgatgctactgaaatcctccacgtgaaaaagaagaaggccctgcttctgtag

SEQ ID NO: 162480 - DNA, 5112 bp, Artificial Sequence
  derived and/or modified sequence
atgaacgtgcagccctgcagccggtgcggctacggcgtgtaccccgccgagaagattagttgcatagatcagatctggcacaaagcgtgcttccactgcgaagtctgcaagatgatgctgtccgtcaataatttcgtctcccatcagaagaaaccatactgccatgcccacaaccccaagaataacacttttacctccgtgtaccatacacccctgaatcttaatgttcggactttccctgaggccatctcgggtatccatgatcaggaagacggggaacaatgcaaaagtgttttccactgggatatgaagtcaaaggacaaggagggggcccctaaccggcagccactggcaaacgagagagcatattggacaggctacggcgagggcaatgcctggtgtcctggagcactccctgatcccgagattgtaaggatggttgaggcccggaaatctcttggtgaagagtacaccgaagactatgaacaaccccggggcaaggggtcattccccgcaatgatcacgcctgcataccaacgagctaagaaggcgaatcagctggcaagccaggtggagtataaaagaggtcatgatgagaggatctccagattctcgactgtggtggatacccctgagctgctgcgctccaaggcgggggcccagctccagagcgatgtgcggtatacggaagactatgagcagcaaagaggcaaggggtcttttcccgcaatgattacacctgcttaccagatcgctaaacgagcaaacgaactcgcctcagatgtgcgttaccaccagcagtaccagaaagagatgagaggcatggcaggccccgccatcggcgctgagggcatcttaacacgtgagtgtgccgatcaatacgggcaaggttaccctgaagaatatgaggagcatagagggaagggctcattccccgccatgatcacccccgcctaccagaacgcaaagaaagcccacgagctggcaagtgatattaagtacaggcaggacttcaataaaatgaaaggcgccgcccactaccatagcttaccagcccaagataatttggtccttaagcaggcccagtctgttaacaagctggtgtccgagaacaaatataaagagaactatcaaaaccacatgaggggacgatacgagggggtaggcatggatcgaaggactttacatgcaatgaaggtcgggtccctcgcctcgaatgtcgcatataaggccgactacaagcatgatattgtggattacaactacccagcaaccctgacaccctcctaccagactgctatgaagctggtaccacttaaagacgccaactaccggcaatctatcgacaagttgaaatacagttcagtgacagacacgccccagatcgtgcaggcgaagatcaacgcccagcagctttctcacgtgaattaccgggcagactacgaaaaaaataaactgaattatactctacctcaggatgtgccccaactggtcaaggcaaagacaaacgctaagctgttttctgaagtgaagtacaaggagggatgggagaaaacaaaggggaaaggattcgaaatgaagctagacgctatgtctctgttggcagctaaagcctctggcgagcttgcgtcaaatgtccaccttctcctgtccctgaaaatcaagtacaaagaggagtacgagaagacaaaaggtaaagctatgggtaccgcagactcccgcctgcttcactcactccagattgccaaaatgagttccgaagtcgaatacaaaaaaggtttcgaggagagcaagactcgatttcacctgcccatggatatggtaaacattagacacgcaaaaaaagcccagaccctggccagcgatctcgactaccgcaagaagttgcatgagtataccgtgctccccgaggacatgaagactcagtgggcgaaaaaagcctacggcctgcaatccgagctacagtacaaagctgaccttgcttggatgaagggcgtgggctggctgacagaaggcagcctgaatctcgaacaggctaagaaagcgggtcagctcgttagtgagaaaaattaccgccagcgggttgacgagctgaaatttaccagcgtgacagacagcagtcagatggagcacgctaagaagtctcaggagctgcaaagtggagtcgcatataaggctgggaacgagcagtccgttcatcaatatacaatatcaaaagatgagccattgttcctgcaggcaagagcgaacgcggcaaacctgagcgagaaattatataaatcatcctgggaaaaccagaaagctaagggctttgagctgcgactggattctctgacgtttctcgcagccaaagctaagcgggatcttgcttcagaggtgaaatataaggaagattatgagaggtcgcggggaaagctgatcggcgcgaaggatgtgcagggtgactcacaaatgtcgcactctctacaaatgagcaaactccaaagcgagttggaatacaagaagggcttcgaagacaccaagagccagtgtcatgtgtcactcgacatggttcaccttgtgcacgctagaaaggctcagcatctggccaccgacgttgggtacaaaactgctgagcatcacttcactgcgcttcctaccgatatgaaggttgaatgggcaaagaaggcctacgggcttcagagcgataaccagtaccgggctgacgtgaaatggatgaaaggcatggggtgggtggctaccgggtccctgaacgttgagcaagccaagaaggctggcgagctgatttcagaaaaaaaataccgccagcatcctgatgctctaaagttcacaagtatcaaagacacgcccgaaatggtccaagcacggatctcttacacccaggcggtggatcggttgtatcgtgagcagggcgaaaatattaagcaccactatacaccaaccgccgaccttccggaagtcctgctggctaagctgaacgcaatgaatatatctgagacgcggtacaaggaatcctggagcaagctgagagacggcggatacaaactgcgtctcgatgcgctcccttttcaggccgctaaggcgagcggcgaaatcattagcgattacaaatacaaggaggctttcgagaagatgaagggccaaatgctggggagtcgcagcctggaagacgatatatctcttgctcacagcgtctatgcaacgagtctccagtcggatgttaattataagaagggttttgaacattcaaaggcccagtttcatcttccacttgatatggccgctctggttcatgcgaagaaagctcagaccctggcttccaatcaggattacaaacaccccttgcctcagtacacgtctttggccgaggatttaaggctcagttgcgccaaaaaagcacataagctacagtctgagaatctctaccgaagcgacttaaactttatgcggggagtagcgtgcgtgatcccaggaactttggagatcgaaggtaggaaaaaggcaagcgaactgattagtgagtcaaaataccgccaacatccacattcgtttaaatatacggctgtaaccgatacccctaacttgttgcatgctaagttcagcaaccagattacaaacgaacgcttatataaagcggctggggaggatgcccgtcatgaatataccatgactctcggcctgccggagtttatcagagctaagaccaacgcagccaatctgtcggatgctagatacaaggaatcttggcgcaacctacgggctcaaggctacaaactcaccattgaggcgctgccattccaggcggcccgtgcttccggggatattgcctctgattttctctatcgccacgactttgtcaaggagcgcggaaaactgatcgggccacagtctgtgcgagacgaccccagaatccagcactgtagacgcatgggtcagttgcagtccgaattgcaatatcggcggggcgctacttcatcacaagcacagtttcaccttccaatggacatggtgcatctggtgcacgctaaaaatgcacaggccctggccagcgatcacgattacagaacgcagtatcacaagttcaccgctttgccggaggacctgaaaatggcctgggcaaagaaagctcacgcgctgcagtcagaactcagatacaagagtgatctgattgggatgaagggtatcggatggttggcgctgaggtctccccaaatggaaagcgccaaaaaggcgggagagctcatctctgaaaccaagtataggaagaaacccgatagcatcaaattcacaacagtggtagacagcccagacctggtccatgccaaaaattcctacatgcactgtaacgagcgtatgtatcgcagcggagatgccgagagtttgcatcgttatacactgatcccagatcaccccgattttaccagggctcggttgaacgcactccacctgtccgacaaggtttacaggaatagctgggagcaaactcgtgcaggctcatatgatttccggttggacgctattcccttccaaaccgcccgggcttctcgtgaaatagccagcgatttccgctataaggaagccttcctaagagaccgaggtcttcagatcggatatcggtcggtggacgacgatccccgcatgaaacatttcctcaatgtggggaggctacagagcgacaacgagtataagaaggattttgccaagagcagaagtcagttccattcgtccaccgatcaacccggcctcctgcaggccaagagaagtcagcaattagcctccgacgtgcactatcgacagccacttccacagccgacctgtgacccggagcaactgggattaagacacgcacagaaagctcaccagttgcaatccgacgttaaatataagagcgacttgaatcttaccagaggtgtgggatggaccccaccggggtcgtataaagtggagatggcgaggagagcagccgaactagcaaacgctcggggcctgggcctgcagggagcttaccgtggagccgaggcggttgaggccggagatcaccagagcggcgaggttaatccagatgccaccgagattctgcacgtgaaaaagaaaaaagcgctgctgctctag

SEQ ID NO: 162481 - DNA, 5402 bp, Artificial Sequence
  derived and/or modified sequence
aaactagaaggtcagcaaaggaaagtggaagttggattctgaaagatcgaggtgcccacaggaattttatggtcgtcggattttgaagacttgaactagactgggggttctccttgcatttcttgcctgttgcctatctttgtcctctctcttccggcttcgagatgaatgtgcagccctgttctaggtgtgggtatggggtttatcctgccgagaagatcagctgtatagatcagatatggcataaagcctgttttcactgtgaagtttgcaagatgatgctgtctgttaataactttgtgagtcaccagaaaaagccgtactgtcacgcccataaccctaagaacaacactttcaccagtgtctatcacactccattaaatctaaatgtgaggacatttccagaggccatcagtgggatccatgaccaagaagatggtgaacagtgtaaatcagtttttcactgggacatgaaatccaaggataaggaaggtgcacctaacaggcagccactggcaaatgagagagcctattggactggatatggggaagggaatgcttggtgcccaggagctctgccagaccccgaaattgtaaggatggttgaggctcgaaagtctcttggtgaggaatatacagaagactatgagcaacccaggggcaaggggagctttccagccatgatcacacctgcttatcaaagggccaagaaagccaaccagctggccagccaagtggagtataagagagggcatgatgaacgcatctccaggttctccacggtggtggatactcctgagctgctacggagcaaggctggggcacagcttcaaagtgatgtgagatacacagaggactatgaacaacaaagagggaaaggcagtttccctgcgatgatcacacccgcctatcagatagccaaaagagccaatgagctggcaagtgatgtgaggtaccatcaacaatatcaaaaagaaatgaggggaatggctggtccagccattggagctgagggcatcttgacaagggaatgtgcagaccaatatggccagggttacccggaggagtatgaggagcacaggggaaagggcagcttcccagctatgatcactccagcatatcagaacgccaagaaagctcacgaactcgctagtgacataaaatacaggcaggacttcaataagatgaaaggcgctgcacattatcactcgcttccagctcaagacaacttggttctcaaacaggctcagagcgtaaacaaactcgtgagtgagaataaatataaagaaaactaccagaaccacatgagaggccgctatgaaggagttggtatggacagacgcactctgcatgctatgaaagttggcagcctggcaagcaacgttgcctacaaagctgattataaacatgatattgtcgactacaactacccagccactctcacgccttcctatcaaacagctatgaaactggtgcccttgaaagatgccaattataggcagagcatcgacaagttgaagtacagctcggtgactgacaccccacagattgttcaagccaaaatcaatgcccagcagctgagtcatgtgaattaccgtgctgactatgagaaaaataagttgaattacacattgccccaggatgttcctcagctggtgaaggccaaaaccaatgccaaactcttcagtgaggttaagtataaagaaggctgggagaagacaaaggggaaaggatttgagatgaagctggatgccatgtctctgctggccgccaaagcctctggggagcttgctagcaatattaaatataaagaagaatatgaaaagacaaaaggcaaagccatgggaacagccgactctaggcttctgcactccctgcagattgctaagatgagcagtgaggttgaatataagaaaggctttgaagagagtaagacccggtttcacctgcccatggatatggtaaacatcaggcatgctaagaaggcccaaactctcgccagtgacctggactacaggaagaaactgcatgaatacactgtgctgcctgaagatatgaagactcagtgggccaagaaggcctatgggctccagagcgagctgcagtacaaggctgacctggcatggatgaagggagttgggtggctgacagaggggagtctcaacttggaacaagccaagaaggctggacagctggtcagcgagaaaaactaccggcagagggtcgatgagctgaagttcaccagcgtgaccgacagctcccagatggagcacgccaagaagagccaggagctacagagcggggtggcctacaaggcaggaaatgagcagtctgtccatcagtataccatcagcaaagacgagcctctcttcctgcaggcccgagccaatgctgcaaatctcagcgagaaactgtataagagcagctgggaaaaccagaaagcaaaagggtttgagctgcgtcttgattccttgaccttcctggcagccaaagccaagagggacctggctagcgaggtgaagtacaaggaggattatgagagatccagagggaagctcattggggcaaaagatgtacagggagattcgcaaatgagccactcactgcaaatgtccaagctgcagagtgagctggagtacaagaagggattcgaggacaccaaatcccaatgccacgtctccctggacatggtccacctcgtgcatgcccgcaaagctcagcatttagccacagacgtaggctacaagacagcggaacatcactttacggctttgcccacagacatgaaggtggaatgggccaagaaggcttatggcttacagagtgataaccaatacagggcagatgtgaagtggatgaaaggcatgggctgggtcgccaccgggtcattaaatgtggagcaggcgaagaaggcaggagaactcattagcgagaagaagtaccgtcagcatccagatgctttgaagtttaccagtattaaagacactccggagatggtccaggccagaattagttatacccaagcagtggatagattatacagggaacaaggagaaaacataaagcatcattacacaccgactgctgacctccctgaagtcctgctggccaagctgaatgccatgaatatcagtgagacgcgttataaggaatcctggagcaaacttcgagatggtggctataaactgaggttggatgcccttccattccaagcagcaaaggcttctggtgaaatcataagtgattacaaatacaaagaggcatttgagaaaatgaaaggacagatgcttggttcccggagcttggaagatgatatcagccttgcacattcagtgtatgcgacctcactgcagagtgatgtgaattacaagaaaggctttgaacactcaaaggcgcagttccatctgccgttggacatggccgccctggtgcatgccaagaaggctcagaccctggccagcaatcaggactacaaacatccactgccccagtacacttccttggcagaagacctgaggctgagctgtgccaagaaagctcacaaattgcagagtgagaatttgtaccggtcagacctgaactttatgcgaggtgttgcatgtgtcattccaggcacgttagagattgaagggaggaagaaagcatcggaactcatcagtgagagtaaatatcggcagcatccccactcattcaagtacacagctgtgacagacactcccaacctccttcatgcgaaattcagcaaccagataacgaatgagcgcctctataaagcagctggagaggatgcaagacacgagtatacaatgaccctgggtctgcccgagttcatccgagcaaaaacgaatgcagccaacctgagtgacgcaagatacaaagagtcctggcgtaatcttcgtgctcaaggctacaagctgacaatagaagcgctccccttccaggctgcccgggcctctggagatatagccagtgattttctctacagacatgactttgtgaaggagcgagggaaactcatagggccccagagtgtaagagacgacccccggatccagcactgccggcgcatgggccagctgcagagcgagcttcagtacaggaggggggcgaccagcagccaagcccagttccatctgcccatggacatggtgcacctggtccatgccaagaatgcccaggctctggccagcgaccacgactacaggacacagtatcacaagttcacagcactgcccgaggacctgaagatggcctgggccaagaaagcccatgccctgcagagtgagttgcgctacaagtcagacctgatcggcatgaagggcataggatggctggcgctgagatccccacagatggagagtgcaaagaaggctggagaactcatcagcgagaccaagtaccgtaaaaaaccagacagtatcaagttcaccacagtggttgactccccagacctggttcatgccaagaacagctatatgcactgcaatgagcgcatgtatagatctggagatgcagaatccctgcacagatacaccctgatccccgaccatcccgatttcacccgagctcgcctcaatgcgctgcatctgagtgacaaagtctacagaaactcctgggagcagacccgggctggcagttatgacttcaggctggatgccatccccttccagactgcccgggcatctagggagatcgccagtgatttccggtacaaagaggctttcctgcgggaccgaggcctgcagatcgggtaccgcagtgtcgacgatgacccaaggatgaagcatttcctcaacgttggcaggctccagagtgacaatgagtacaagaaggactttgccaagagtcggtcccagtttcacagcagcacagaccagcccggcctccttcaggccaagaggagccagcagctggccagtgatgtgcactacaggcagcccctgccccagcccacctgcgacccggagcagctgggcctcaggcatgctcagaaggcccaccagctgcagagtgatgtcaagtataaatcagacttgaacctgaccagaggtgttggctggacccctcctggctcctacaaagtggaaatggctcggcgggctgcggaactggccaacgcaaggggcctgggtctccagggagcttaccggggggcagaagcagtggaggctggagatcatcagagtggggaggtgaacccagatgccactgagattctgcacgtcaaaaagaagaaggccctgctgttgtgagccatgtccaccctgattcctgagaggccagagaggaagtttgttcaccagagacaggcttcagatggctttgatttcggcaagctggaatggcccaccagcccatcccagatcttcctttattaaaataataactctgaaagcagatgg

SEQ ID NO: 162482 - DNA, 5535 bp, Artificial Sequence
  derived and/or modified sequence
aaactagaaggtcagcaaaggaaagtggaagttggattctgaaagatcgaggtgcccacaggaattttatggtcgtcggattttgaagacttgaactagactgggggttctccttgcatttcttgcctgttgcctatctttgtcctctctcttccggcttcgagatgaatgtgcagccctgttctaggtgtgggtatggggtttatcctgccgagaagatcagctgtatagatcagatatggcataaagcctgttttcactgtgaagtttgcaagatgatgctgtctgttaataactttgtgagtcaccagaaaaagccgtactgtcacgcccataaccctaagaacaacactttcaccagtgtctatcacactccattaaatctaaatgtgaggacatttccagaggccatcagtgggatccatgaccaagaagatggtgaacagtgtaaatcagtttttcactgggacatgaaatccaaggataaggaaggtgcacctaacaggcagccactggcaaatgagagagcctattggactggatatggggaagggaatgcttggtgcccaggagctctgccagaccccgaaattgtaaggatggttgaggctcgaaagtctcttggtgaggaatatacagaagactatgagcaacccaggggcaaggggagctttccagccatgatcacacctgcttatcaaagggccaagaaagccaaccagctggccagccaagtggagtataagagagggcatgatgaacgcatctccaggttctccacggtggtggatactcctgagctgctacggagcaaggctggggcacagcttcaaagtgatgtgagatacacagaggactatgaacaacaaagagggaaaggcagtttccctgcgatgatcacacccgcctatcagatagccaaaagagccaatgagctggcaagtgatgtgaggtaccatcaacaatatcaaaaagaaatgaggggaatggctggtccagccattggagctgagggcatcttgacaagggaatgtgcagaccaatatggccagggttacccggaggagtatgaggagcacaggggaaagggcagcttcccagctatgatcactccagcatatcagaacgccaagaaagctcacgaactcgctagtgacataaaatacaggcaggacttcaataagatgaaaggcgctgcacattatcactcgcttccagctcaagacaacttggttctcaaacaggctcagagcgtaaacaaactcgtgagtgagaataaatataaagaaaactaccagaaccacatgagaggccgctatgaaggagttggtatggacagacgcactctgcatgctatgaaagttggcagcctggcaagcaacgttgcctacaaagctgattataaacatgatattgtcgactacaactacccagccactctcacgccttcctatcaaacagctatgaaactggtgcccttgaaagatgccaattataggcagagcatcgacaagttgaagtacagctcggtgactgacaccccacagattgttcaagccaaaatcaatgcccagcagctgagtcatgtgaattaccgtgctgactatgagaaaaataagttgaattacacattgccccaggatgttcctcagctggtgaaggccaaaaccaatgccaaactcttcagtgaggttaagtataaagaaggctgggagaagacaaaggggaaaggatttgagatgaagctggatgccatgtctctgctggccgccaaagcctctggggagcttgctagcaatgtacaccttcttctttctctcaagattaaatataaagaagaatatgaaaagacaaaaggcaaagccatgggaacagccgactctaggcttctgcactccctgcagattgctaagatgagcagtgaggttgaatataagaaaggctttgaagagagtaagacccggtttcacctgcccatggatatggtaaacatcaggcatgctaagaaggcccaaactctcgccagtgacctggactacaggaagaaactgcatgaatacactgtgctgcctgaagatatgaagactcagtgggccaagaaggcctatgggctccagagcgagctgcagtacaaggctgacctggcatggatgaagggagttgggtggctgacagaggggagtctcaacttggaacaagccaagaaggctggacagctggtcagcgagaaaaactaccggcagagggtcgatgagctgaagttcaccagcgtgaccgacagctcccagatggagcacgccaagaagagccaggagctacagagcggggtggcctacaaggcaggaaatgagcagtctgtccatcagtataccatcagcaaagacgagcctctcttcctgcaggcccgagccaatgctgcaaatctcagcgagaaactgtataagagcagctgggaaaaccagaaagcaaaagggtttgagctgcgtcttgattccttgaccttcctggcagccaaagccaagagggacctggctagcgaggtgaagtacaaggaggattatgagagatccagagggaagctcattggggcaaaagatgtacagggagattcgcaaatgagccactcactgcaaatgtccaagctgcagagtgagctggagtacaagaagggattcgaggacaccaaatcccaatgccacgtctccctggacatggtccacctcgtgcatgcccgcaaagctcagcatttagccacagacgtaggctacaagacagcggaacatcactttacggctttgcccacagacatgaaggtggaatgggccaagaaggcttatggcttacagagtgataaccaatacagggcagatgtgaagtggatgaaaggcatgggctgggtcgccaccgggtcattaaatgtggagcaggcgaagaaggcaggagaactcattagcgagaagaagtaccgtcagcatccagatgctttgaagtttaccagtattaaagacactccggagatggtccaggccagaattagttatacccaagcagtggatagattatacagggaacaaggagaaaacataaagcatcattacacaccgactgctgacctccctgaagtcctgctggccaagctgaatgccatgaatatcagtgagacgcgttataaggaatcctggagcaaacttcgagatggtggctataaactgaggttggatgcccttccattccaagcagcaaaggcttctggtgaaatcataagtgattacaaatacaaagaggcatttgagaaaatgaaaggacagatgcttggttcccggagcttggaagatgatatcagccttgcacattcagtgtatgcgacctcactgcagagtgatgtgaattacaagaaaggctttgaacactcaaaggcgcagttccatctgccgttggacatggccgccctggtgcatgccaagaaggctcagaccctggccagcaatcaggactacaaacatccactgccccagtacacttccttggcagaagacctgaggctgagctgtgccaagaaagctcacaaattgcagagtgagaatttgtaccggtcagacctgaactttatgcgaggtgttgcatgtgtcattccaggcacgttagagattgaagggaggaagaaagcatcggaactcatcagtgagagtaaatatcggcagcatccccactcattcaagtacacagctgtgacagacactcccaacctccttcatgcgaaattcagcaaccagataacgaatgagcgcctctataaagcagctggagaggatgcaagacacgagtatacaatgaccctgggtctgcccgagttcatccgagcaaaaacgaatgcagccaacctgagtgacgcaagatacaaagagtcctggcgtaatcttcgtgctcaaggctacaagctgacaatagaagcgctccccttccaggctgcccgggcctctggagatatagccagtgattttctctacagacatgactttgtgaaggagcgagggaaactcatagggccccagagtgtaagagacgacccccggatccagcactgccggcgcatgggccagctgcagagcgagcttcagtacaggaggggggcgaccagcagccaagcccagttccatctgcccatggacatggtgcacctggtccatgccaagaatgcccaggctctggccagcgaccacgactacaggacacagtatcacaagttcacagcactgcccgaggacctgaagatggcctgggccaagaaagcccatgccctgcagagtgagttgcgctacaagtcagacctgatcggcatgaagggcataggatggctggcgctgagatccccacagatggagagtgcaaagaaggctggagaactcatcagcgagaccaagtaccgtaaaaaaccagacagtatcaagttcaccacagtggttgactccccagacctggttcatgccaagaacagctatatgcactgcaatgagcgcatgtatagatctggagatgcagaatccctgcacagatacaccctgatccccgaccatcccgatttcacccgagctcgcctcaatgcgctgcatctgagtgacaaagtctacagaaactcctgggagcagacccgggctggcagttatgacttcaggctggatgccatccccttccagactgcccgggcatctagggagatcgccagtgatttccggtacaaagaggctttcctgcgggaccgaggcctgcagatcgggtaccgcagtgtcgacgatgacccaaggatgaagcatttcctcaacgttggcaggctccagagtgacaatgagtacaagaaggactttgccaagagtcggtcccagtttcacagcagcacagaccagcccggcctccttcaggccaagaggagccagcagctggccagtgatgtgcactacaggcagcccctgccccagcccacctgcgacccggagcagctgggcctcaggcatgctcagaaggcccaccagctgcagagtgatgtcaagtataaatcagacttgaacctgaccagaggtgttggctggacccctcctggctcctacaaagtggaaatggctcggcgggctgcggaactggccaacgcaaggggcctgggtctccagggagcttaccggggggcagaagcagtggaggctggagatcatcagagtggggaggtgaacccagatgccactgagattctgcacgtcaaaaagaagaaggccctgctgttgtgagccatgtccaccctgattcctgagaggccagagaggaagtttgttcaccagagacaggcttcagatggctttgatttcggcaagctggaatggcccaccagcccatcccagatcttcctttattaaaataataactctgaaagcagatggagaatgttgtatttgtggtcctctctgatacctagacgtggatggctgattctgttgagtgcctcgagtgtctgggctgaggaataaagatgtgatggtggttcccgct

SEQ ID NO: 162483 - DNA, 5088 bp, Artificial Sequence
  derived and/or modified sequence
atgaatgtgcagccttgttcacgatgcggatacggggtgtaccctgctgaaaagatctcctgtatcgaccagatttggcataaggcttgtttccactgcgaagtgtgcaagatgatgttgagcgtgaacaactttgtgtcccaccagaaaaagccctattgtcacgcccacaaccccaagaacaatactttcacctctgtttatcatactcctctcaaccttaacgtgcgaaccttccctgaagcgatctctggcattcatgaccaagaggacggcgaacagtgcaagtctgtgttccactgggatatgaaatccaaggacaaggagggcgcacccaaccgccaacctttagccaacgaacgcgcttactggaccggctacggcgagggaaatgcctggtgtcccggtgccctgccagaccccgagattgtccgtatggtggaggcccgtaaatcccttggtgaagaatatacagaagactacgaacagccccgtggaaagggcagtttcccagcaatgattacccccgcatatcagagagcaaaaaaggcaaatcaactggcaagtcaggttgagtataaacgcggtcacgatgaaagaatctccaggtttagtactgtggtggatactcccgaattgcttagatccaaagccggtgcccagctacagagcgacgtgcgctacacagaggactacgagcaacaaaggggcaaaggcagttttccagcaatgattacacccgcttaccagattgctaagcgcgctaacgagctcgcgtcggacgtgcgataccaccagcagtatcaaaaggagatgagaggaatggcaggacctgctatcggcgctgagggcattctaacgcgcgaatgtgccgatcagtacggccagggctacccagaagaatatgaggaacacaggggcaaaggatcattccccgctatgatcactcccgcttaccagaatgccaagaaggcccatgagctagccagcgatatcaaataccggcaggactttaataaaatgaagggcgcagcccactaccattccctgcctgctcaggacaacttagtgctgaaacaggcacagagcgtcaacaagcttgtgagtgaaaacaaatacaaagagaattaccagaaccacatgagaggcaggtacgagggcgtcgggatggataggagaacacttcacgccatgaaggtgggctccctagccagtaatgttgcctataaggcagattacaaacatgatattgtagactataattatcctgcaacattgacaccaagctaccagaccgctatgaaactggtgcctctgaaagatgccaattaccggcaatccattgacaagttgaagtattcatcagttaccgacacaccccagattgttcaggccaagatcaatgctcagcagctgagccacgtgaattatagggccgactacgaaaagaataaattgaactacacactaccacaagacgtgcctcaattggtcaaggcgaaaacgaacgccaaactgttttccgaagttaagtacaaggaagggtgggagaaaactaagggaaaaggttttgagatgaaactggatgctatgtctctattggccgctaaagcctcaggcgagttggccagcaacattaaatataaggaagagtatgagaaaaccaaaggaaaagccatgggaaccgccgattctagactcctccacagcctgcaaattgccaaaatgtcaagtgaagtggaatataagaaaggattcgaggagtcaaagacgagatttcatttaccaatggacatggtgaacattcgtcacgccaaaaaggcccaaactctggcaagcgacctcgactaccggaagaagttacacgaatacaccgtgttgcctgaagacatgaaaacacagtgggccaagaaggcatacggacttcagtctgagctgcagtacaaagccgaccttgcctggatgaagggggtgggatggttgacggagggttccctgaacttggagcaggccaagaaagctggccagctggtgtctgagaagaactacaggcagagagtggacgaattgaagtttacatccgtgaccgactcttcccagatggagcatgccaagaagtcacaggagttacagagtggtgtcgcctataaagccggtaatgagcagtccgtgcaccagtatacaatctccaaggatgaaccactgttcctgcaagcaagagccaacgctgctaatctgagcgaaaagctgtacaaaagcagctgggagaatcagaaagctaaggggtttgagctgcgactagactcccttacattcctcgcagcaaaggccaaacgggacctggcttccgaggtcaagtacaaagaggactacgagcgttcccggggtaaactcattggagcgaaagatgtgcagggtgatagccagatgtcccatagccttcagatgtccaagctgcagtccgaactagaatataaaaaaggatttgaagataccaaaagtcagtgccatgtctccttagatatggtgcatttagtacatgctcggaaagcccagcacttggccaccgatgtgggctacaagactgccgagcaccatttcacggccttaccaacagacatgaaagtggagtgggccaaaaaggcctacggcctccaatccgataatcaataccgtgctgacgttaagtggatgaaggggatggggtgggtagcaactgggagcctgaatgtggagcaggctaagaaagcaggcgaactgatttctgagaagaaatacagacaacatcccgatgccctaaaattcactagtattaaggatacacccgagatggtgcaggcacgtattagctacacgcaggctgttgatagattgtacagagagcagggggagaatataaagcaccactatacccccaccgctgacctgcccgaggttctcttagccaagttgaatgctatgaatattagcgaaacacgctacaaagagtcctggagcaagctgcgcgatggaggatataagctgcgcctggatgccctgcccttccaggctgcaaaagctagcggagagattatttccgactataagtacaaggaagctttcgagaaaatgaaaggtcagatgctgggctcacgatctttagaggacgacatatcactagcccactctgtctatgctacatctctccagtctgatgtgaattataaaaaaggttttgaacattcaaaggcgcaattccacctacctctggacatggcggcactggtgcacgccaagaaagcacaaaccctggcctctaatcaggactataaacatcctttgcctcagtacacgtccctcgccgaagatctcagactttcgtgcgccaaaaaggcacataagttgcagagcgagaacctctacaggtccgacctgaactttatgagaggtgtcgcctgcgtaatccccggaactctggagatcgaaggcaggaaaaaggccagcgagttgattagcgaaagcaagtatcggcagcatccacactcttttaaatatactgcggtcaccgacacgcccaacctcctgcatgccaagttttctaaccaaattactaacgagcgactctacaaagccgcaggcgaagatgccaggcatgaatatacaatgaccctgggcctacccgaatttatccgggcaaaaactaacgccgcaaatttgagcgatgcccgatacaaggagagctggcgtaatctgcgcgcacagggctacaaactcactattgaggccctgccattccaggctgccagagcctccggggacattgcgagcgattttctctaccggcatgattttgttaaagaacgcggaaaattgatcggaccacagtcagtaagggacgatcccagaattcagcactgtcggagaatgggccagctgcagagtgagctgcagtacaggagaggcgctacgagctcccaggctcagtttcatctgccaatggacatggtacacctagtgcacgccaagaatgcccaggccttggcaagcgaccatgattaccgcactcaataccacaaattcacggctctgccggaagatctcaagatggcttgggcaaagaaagcgcatgctctacagagcgaattgcggtacaaatcagatctgattggtatgaagggtatcggctggcttgcgctgcgcagcccacagatggagtccgctaagaaagccggagaactgatttccgaaacgaagtaccgaaagaaaccagacagcataaagttcaccaccgtggtggattctccagatctcgttcatgcgaagaactcctatatgcattgcaatgagcgcatgtacagatccggggatgctgagagtctccaccgatacactttaattcctgatcaccccgacttcacacgggctagactgaacgctctgcatctgtcagacaaggtgtaccggaacagctgggagcaaacccgggcaggctcgtacgacttcagacttgatgctatcccttttcagactgctcgggcttcccgagaaatcgcatcagattttcgatataaagaagcattcttaagggatagagggttgcaaatcggctatcgatccgtggatgacgaccccaggatgaagcactttctgaatgtgggccgtctacaatccgacaacgagtacaagaaggacttcgccaaatcccgctctcagtttcattcttccactgaccagcccggtctgctgcaagccaaacgcagtcaacagctggctagcgatgtgcactatcggcagccgctcccgcaacccacttgcgatcccgaacagttagggctcagacacgcccagaaagctcatcagttacaaagcgacgtgaagtataagtccgacctgaatctgacacgtggcgtgggctggaccccccctggatcttacaaagtcgaaatggctcggcgagccgcagagctggcaaatgccaggggtctgggcctgcagggcgcttaccgaggcgctgaagccgtggaagcgggtgatcaccagtcgggagaagtgaaccccgatgccacagagatcctccacgttaaaaaaaagaaggcacttctcctatag

SEQ ID NO: 162484 - DNA, 5111 bp, Artificial Sequence
  derived and/or modified sequence
atgaatgtgcagccttgctccaggtgcgggtatggggtgtatccagccgagaaaataagctgtattgatcagatctggcacaaagcctgctttcattgcgaggtctgtaaaatgatgctgtcggtgaataactttgtgagtcatcaaaagaaaccctattgccacgcccacaatcccaagaacaacacctttacttccgtctaccacacccccctgaacctaaatgttcgaacattccctgaggcaattagcggcatacatgaccaagaagatggagagcagtgcaaatctgttttccactgggacatgaaatctaaagacaaggaaggcgctcctaaccgacagcccctggctaacgaaagagcttactggaccgggtatggtgaggggaacgcttggtgccctggggcacttcctgatcctgagattgttcgtatggtggaggctaggaaatcattaggggaagagtacaccgaggattatgagcagccacgcggaaagggcagcttccctgctatgattactcccgcatatcaaagagccaagaaagctaatcagctggcctctcaggtcgaatacaaacggggtcacgacgagcgcatcagccggttttccaccgtcgtggataccccagagctgctacggagcaaggctggcgcacagctccagagcgatgtgcgctacaccgaagactatgagcagcaacggggaaaagggagcttccctgcgatgattacccccgcttaccagattgccaaacgcgctaacgagctggcctccgacgtaagatatcaccaacagtaccaaaaggagatgcgcggtatggcaggaccagccattggtgctgagggaattctcaccagggaatgtgcggaccaatacggacagggatatcctgaagagtacgaggaacaccggggtaagggtagcttcccagccatgataacgcccgcttatcagaatgcgaagaaagcacacgaactggcctcagatatcaaataccgccaggattttaataagatgaagggcgctgcccattaccatagcctcccggctcaggataaccttgtccttaagcaggcccaatcggttaataagctggtgtcagagaacaagtacaaggagaactatcagaatcacatgcgcggacgttacgagggcgtgggaatggatcgcaggactctccatgccatgaaggtcggaagcctcgcatcaaacgtggcatataaagcagactacaagcatgatattgtcgattataactaccctgccacacttacccctagttaccagacagctatgaaattagtgcccttaaaggacgccaactaccgacagagcattgacaaactcaagtacagttcagtcacagacacacctcaaatcgtccaagccaagattaatgcccagcagctctctcatgtgaactaccgtgcagattacgagaaaaacaaactgaactacaccttgccacaggatgttcctcagctggtgaaggcgaaaaccaatgctaagctgttttccgaggttaagtataaagaggggtgggagaaaacaaaaggaaagggctttgagatgaaattggatgcaatgtctctactggccgctaaggctagtggagagctggcttctaacgtacacctccttttaagcttgaagataaagtacaaagaggaatacgaaaagactaaaggcaaagcaatgggcactgctgacagccgtttgctgcactctctccaaatagctaagatgtcttctgaagtggaatacaagaagggcttcgaggagtctaagaccaggttccatctgcctatggatatggtgaacatccgccacgccaaaaaagcacagacactggcatccgacttggattacaggaaaaaactgcatgagtacacagtgctgcctgaggacatgaagactcagtgggcaaagaaggcatacgggctgcagtctgagctgcagtacaaagccgacctggcttggatgaagggagtcggttggctgacggagggctccctcaacctggagcaagccaagaaagccggtcaactggtaagtgaaaaaaattacaggcaacgggtcgatgagttaaaattcaccagcgttacggacagctcacagatggagcacgctaaaaagagtcaggagctacagtccggagtcgcatataaggctggtaatgagcagtccgtgcatcagtatacaatctcaaaggacgaacccctgtttttgcaggcacgcgctaatgccgctaacttgtccgagaaactttacaaatcatcttgggaaaaccagaaagccaagggctttgaacttcggcttgattccctaaccttcctggccgctaaggccaaacgggatctggcttcagaggtaaaatataaagaggactatgaacgttccaggggcaagttgatcggagcgaaggatgtgcagggagacagtcagatgagccactccctgcagatgagcaagttgcagtcagaactggaatacaagaaggggtttgaggatacaaagagccagtgtcacgtgtcactcgacatggtgcatttggttcatgcccgaaaagcccagcacctggccaccgacgtaggctacaagacagccgagcatcactttactgctctgcctacagatatgaaagttgagtgggctaaaaaagcgtacgggctacagtctgacaatcagtaccgcgctgatgttaaatggatgaagggtatgggatgggtggccacaggctccctgaacgtggaacaagccaaaaaagcaggggagctcatttccgagaaaaaataccggcaacatccagatgcacttaagttcacatcaatcaaagacacccctgaaatggtgcaagcccgtatctcatacactcaggctgtcgatcgattatatcgcgagcagggagagaacataaaacatcactatactcccacagcggacctgccagaagtgctgctagctaagcttaatgccatgaatatttctgagactcgctacaaggagtcttggtccaaactgagggatggcggttataaactgaggctggacgctctcccctttcaagcagctaaggcctccggcgaaatcatctctgattataagtacaaggaagcttttgagaaaatgaaaggtcagatgcttggctctcgatccttagaggatgatatttcactggcacacagcgtctacgccacatccttgcagagcgatgtgaattataagaaagggttcgagcattctaaagcacaattccacctcccactagatatggcagctcttgtgcacgccaagaaggcccaaaccctcgcgtccaaccaggactacaaacaccccctgccccagtatacctccctggcagaggacttacgcctgagctgcgctaaaaaggcacacaaactccaatccgagaacctgtatagatccgatctgaattttatgcgcggtgtggcttgtgtgatccccggaacactcgagattgaaggaagaaagaaagcctccgagctgatttccgagagcaagtatcggcagcatcctcattctttcaaatatactgccgtaacggatacccccaatctgttgcacgcaaagttttctaaccagatcacaaatgagcgactgtacaaggctgcgggagaggacgcaagacatgagtacactatgactctggggcttcctgaatttatcagagcgaagacaaacgccgctaacctgtccgatgcccgttacaaggaaagttggaggaacttgcgcgctcaggggtacaagcttacaattgaggccctgccattccaggccgcaagagccagtggggacatcgcctctgactttctgtataggcacgacttcgtgaaggaaaggggcaagctgattggtccccaatcagtcagggatgaccctagaatccaacattgcagacgtatgggccaactgcagtccgaactgcagtaccggcgaggggctacttcttctcaggcacaattccacctccccatggacatggtgcatctggtgcatgctaagaatgctcaggccctggccagcgatcacgattatcgcacacagtatcacaagttcacggcgctgcctgaggacttgaagatggcctgggccaagaaggcccacgcactgcagtccgagctgcgatacaaatcggatctaattggaatgaaaggaatcggctggcttgccctccgtagtcctcagatggaatccgccaaaaaagccggtgaactaatatcagaaaccaagtaccggaaaaagccagactccatcaagtttacaacagtggtggacagcccagacctcgttcacgccaaaaactcgtatatgcattgcaatgagaggatgtacaggagcggtgatgcagagagccttcatcgatacacactgattcctgatcaccctgacttcacacgcgctcgcttgaatgcactgcacctgtccgacaaggtgtacagaaactcttgggagcagacgagagctgggtcttatgactttagacttgatgcaatcccctttcagacagcccgagcatccagagagatcgctagcgattttcggtacaaggaggcattccttagagatagaggattgcagatcggttatcggagtgttgatgatgacccccgtatgaagcatttcttgaatgtcggccgtctgcagtccgacaatgaatataagaaagactttgccaaatccagatctcagtttcatagctctaccgatcagccagggctgctgcaggctaagagatcccagcagctggcatctgatgtccactacaggcagcccttgccgcagcccacctgtgatccagaacaactgggattgcgccatgcccagaaggcccatcagctgcaatcagacgtgaaatacaaatcagatctgaatctcactcgaggcgtgggctggaccccccctgggagttacaaggtggagatggctagacgggcagctgaactggctaatgcacgcggtcttgggctccagggcgcataccgaggagcagaggcagtcgaggctggcgatcatcagtccggcgaagtgaatccggatgcgacagaaatcttgcacgtcaaaaaaaagaaagctctgctactcta

SEQ ID NO: 162485 - DNA, 5088 bp, Artificial Sequence
  derived and/or modified sequence
atgaacgtgcagccctgcagcagatgcggctacggcgtgtaccccgccgagaagatcagctgcatcgaccagatctggcacaaggcctgcttccactgcgaggtgtgcaagatgatgctgagcgtgaacaacttcgtgagccaccagaagaagccctactgccacgcccacaaccccaagaacaacaccttcaccagcgtgtaccacacccccctgaacctgaacgtgagaaccttccccgaggccatcagcggcatccacgaccaggaggacggcgagcagtgcaagagcgtgttccactgggacatgaagagcaaggacaaggagggcgcccccaacagacagcccctggccaacgagagagcctactggaccggctacggcgagggcaacgcctggtgccccggcgccctgcccgaccccgagatcgtgagaatggtggaggccagaaagagcctgggcgaggagtacaccgaggactacgagcagcccagaggcaagggcagcttccccgccatgatcacccccgcctaccagagagccaagaaggccaaccagctggccagccaggtggagtacaagagaggccacgacgagagaatcagcagattcagcaccgtggtggacacccccgagctgctgagaagcaaggccggcgcccagctgcagagcgacgtgagatacaccgaggactacgagcagcagagaggcaagggcagcttccccgccatgatcacccccgcctaccagatcgccaagagagccaacgagctggccagcgacgtgagataccaccagcagtaccagaaggagatgagaggcatggccggccccgccatcggcgccgagggcatcctgaccagagagtgcgccgaccagtacggccagggctaccccgaggagtacgaggagcacagaggcaagggcagcttccccgccatgatcacccccgcctaccagaacgccaagaaggcccacgagctggccagcgacatcaagtacagacaggacttcaacaagatgaagggcgccgcccactaccacagcctgcccgcccaggacaacctggtgctgaagcaggcccagagcgtgaacaagctggtgagcgagaacaagtacaaggagaactaccagaaccacatgagaggcagatacgagggcgtgggcatggacagaagaaccctgcacgccatgaaggtgggcagcctggccagcaacgtggcctacaaggccgactacaagcacgacatcgtggactacaactaccccgccaccctgacccccagctaccagaccgccatgaagctggtgcccctgaaggacgccaactacagacagagcatcgacaagctgaagtacagcagcgtgaccgacaccccccagatcgtgcaggccaagatcaacgcccagcagctgagccacgtgaactacagagccgactacgagaagaacaagctgaactacaccctgccccaggacgtgccccagctggtgaaggccaagaccaacgccaagctgttcagcgaggtgaagtacaaggagggctgggagaagaccaagggcaagggcttcgagatgaagctggacgccatgagcctgctggccgccaaggccagcggcgagctggccagcaacatcaagtacaaggaggagtacgagaagaccaagggcaaggccatgggcaccgccgacagcagactgctgcacagcctgcagatcgccaagatgagcagcgaggtggagtacaagaagggcttcgaggagagcaagaccagattccacctgcccatggacatggtgaacatcagacacgccaagaaggcccagaccctggccagcgacctggactacagaaagaagctgcacgagtacaccgtgctgcccgaggacatgaagacccagtgggccaagaaggcctacggcctgcagagcgagctgcagtacaaggccgacctggcctggatgaagggcgtgggctggctgaccgagggcagcctgaacctggagcaggccaagaaggccggccagctggtgagcgagaagaactacagacagagagtggacgagctgaagttcaccagcgtgaccgacagcagccagatggagcacgccaagaagagccaggagctgcagagcggcgtggcctacaaggccggcaacgagcagagcgtgcaccagtacaccatcagcaaggacgagcccctgttcctgcaggccagagccaacgccgccaacctgagcgagaagctgtacaagagcagctgggagaaccagaaggccaagggcttcgagctgagactggacagcctgaccttcctggccgccaaggccaagagagacctggccagcgaggtgaagtacaaggaggactacgagagaagcagaggcaagctgatcggcgccaaggacgtgcagggcgacagccagatgagccacagcctgcagatgagcaagctgcagagcgagctggagtacaagaagggcttcgaggacaccaagagccagtgccacgtgagcctggacatggtgcacctggtgcacgccagaaaggcccagcacctggccaccgacgtgggctacaagaccgccgagcaccacttcaccgccctgcccaccgacatgaaggtggagtgggccaagaaggcctacggcctgcagagcgacaaccagtacagagccgacgtgaagtggatgaagggcatgggctgggtggccaccggcagcctgaacgtggagcaggccaagaaggccggcgagctgatcagcgagaagaagtacagacagcaccccgacgccctgaagttcaccagcatcaaggacacccccgagatggtgcaggccagaatcagctacacccaggccgtggacagactgtacagagagcagggcgagaacatcaagcaccactacacccccaccgccgacctgcccgaggtgctgctggccaagctgaacgccatgaacatcagcgagaccagatacaaggagagctggagcaagctgagagacggcggctacaagctgagactggacgccctgcccttccaggccgccaaggccagcggcgagatcatcagcgactacaagtacaaggaggccttcgagaagatgaagggccagatgctgggcagcagaagcctggaggacgacatcagcctggcccacagcgtgtacgccaccagcctgcagagcgacgtgaactacaagaagggcttcgagcacagcaaggcccagttccacctgcccctggacatggccgccctggtgcacgccaagaaggcccagaccctggccagcaaccaggactacaagcaccccctgccccagtacaccagcctggccgaggacctgagactgagctgcgccaagaaggcccacaagctgcagagcgagaacctgtacagaagcgacctgaacttcatgagaggcgtggcctgcgtgatccccggcaccctggagatcgagggcagaaagaaggccagcgagctgatcagcgagagcaagtacagacagcacccccacagcttcaagtacaccgccgtgaccgacacccccaacctgctgcacgccaagttcagcaaccagatcaccaacgagagactgtacaaggccgccggcgaggacgccagacacgagtacaccatgaccctgggcctgcccgagttcatcagagccaagaccaacgccgccaacctgagcgacgccagatacaaggagagctggagaaacctgagagcccagggctacaagctgaccatcgaggccctgcccttccaggccgccagagccagcggcgacatcgccagcgacttcctgtacagacacgacttcgtgaaggagagaggcaagctgatcggcccccagagcgtgagagacgaccccagaatccagcactgcagaagaatgggccagctgcagagcgagctgcagtacagaagaggcgccaccagcagccaggcccagttccacctgcccatggacatggtgcacctggtgcacgccaagaacgcccaggccctggccagcgaccacgactacagaacccagtaccacaagttcaccgccctgcccgaggacctgaagatggcctgggccaagaaggcccacgccctgcagagcgagctgagatacaagagcgacctgatcggcatgaagggcatcggctggctggccctgagaagcccccagatggagagcgccaagaaggccggcgagctgatcagcgagaccaagtacagaaagaagcccgacagcatcaagttcaccaccgtggtggacagccccgacctggtgcacgccaagaacagctacatgcactgcaacgagagaatgtacagaagcggcgacgccgagagcctgcacagatacaccctgatccccgaccaccccgacttcaccagagccagactgaacgccctgcacctgagcgacaaggtgtacagaaacagctgggagcagaccagagccggcagctacgacttcagactggacgccatccccttccagaccgccagagccagcagagagatcgccagcgacttcagatacaaggaggccttcctgagagacagaggcctgcagatcggctacagaagcgtggacgacgaccccagaatgaagcacttcctgaacgtgggcagactgcagagcgacaacgagtacaagaaggacttcgccaagagcagaagccagttccacagcagcaccgaccagcccggcctgctgcaggccaagagaagccagcagctggccagcgacgtgcactacagacagcccctgccccagcccacctgcgaccccgagcagctgggcctgagacacgcccagaaggcccaccagctgcagagcgacgtgaagtacaagagcgacctgaacctgaccagaggcgtgggctggaccccccccggcagctacaaggtggagatggccagaagagccgccgagctggccaacgccagaggcctgggcctgcagggcgcctacagaggcgccgaggccgtggaggccggcgaccaccagagcggcgaggtgaaccccgacgccaccgagatcctgcacgtgaagaagaagaaggccctgctgctgtag

SEQ ID NO: 162486 - DNA, 5112 bp, Artificial Sequence
  derived and/or modified sequence
atgaacgtgcagccctgcagcagatgcggctacggcgtgtaccccgccgagaagatcagctgcatcgaccagatctggcacaaggcctgcttccactgcgaggtgtgcaagatgatgctgagcgtgaacaacttcgtgagccaccagaagaagccctactgccacgcccacaaccccaagaacaacaccttcaccagcgtgtaccacacccccctgaacctgaacgtgagaaccttccccgaggccatcagcggcatccacgaccaggaggacggcgagcagtgcaagagcgtgttccactgggacatgaagagcaaggacaaggagggcgcccccaacagacagcccctggccaacgagagagcctactggaccggctacggcgagggcaacgcctggtgccccggcgccctgcccgaccccgagatcgtgagaatggtggaggccagaaagagcctgggcgaggagtacaccgaggactacgagcagcccagaggcaagggcagcttccccgccatgatcacccccgcctaccagagagccaagaaggccaaccagctggccagccaggtggagtacaagagaggccacgacgagagaatcagcagattcagcaccgtggtggacacccccgagctgctgagaagcaaggccggcgcccagctgcagagcgacgtgagatacaccgaggactacgagcagcagagaggcaagggcagcttccccgccatgatcacccccgcctaccagatcgccaagagagccaacgagctggccagcgacgtgagataccaccagcagtaccagaaggagatgagaggcatggccggccccgccatcggcgccgagggcatcctgaccagagagtgcgccgaccagtacggccagggctaccccgaggagtacgaggagcacagaggcaagggcagcttccccgccatgatcacccccgcctaccagaacgccaagaaggcccacgagctggccagcgacatcaagtacagacaggacttcaacaagatgaagggcgccgcccactaccacagcctgcccgcccaggacaacctggtgctgaagcaggcccagagcgtgaacaagctggtgagcgagaacaagtacaaggagaactaccagaaccacatgagaggcagatacgagggcgtgggcatggacagaagaaccctgcacgccatgaaggtgggcagcctggccagcaacgtggcctacaaggccgactacaagcacgacatcgtggactacaactaccccgccaccctgacccccagctaccagaccgccatgaagctggtgcccctgaaggacgccaactacagacagagcatcgacaagctgaagtacagcagcgtgaccgacaccccccagatcgtgcaggccaagatcaacgcccagcagctgagccacgtgaactacagagccgactacgagaagaacaagctgaactacaccctgccccaggacgtgccccagctggtgaaggccaagaccaacgccaagctgttcagcgaggtgaagtacaaggagggctgggagaagaccaagggcaagggcttcgagatgaagctggacgccatgagcctgctggccgccaaggccagcggcgagctggccagcaacgtgcacctgctgctgagcctgaagatcaagtacaaggaggagtacgagaagaccaagggcaaggccatgggcaccgccgacagcagactgctgcacagcctgcagatcgccaagatgagcagcgaggtggagtacaagaagggcttcgaggagagcaagaccagattccacctgcccatggacatggtgaacatcagacacgccaagaaggcccagaccctggccagcgacctggactacagaaagaagctgcacgagtacaccgtgctgcccgaggacatgaagacccagtgggccaagaaggcctacggcctgcagagcgagctgcagtacaaggccgacctggcctggatgaagggcgtgggctggctgaccgagggcagcctgaacctggagcaggccaagaaggccggccagctggtgagcgagaagaactacagacagagagtggacgagctgaagttcaccagcgtgaccgacagcagccagatggagcacgccaagaagagccaggagctgcagagcggcgtggcctacaaggccggcaacgagcagagcgtgcaccagtacaccatcagcaaggacgagcccctgttcctgcaggccagagccaacgccgccaacctgagcgagaagctgtacaagagcagctgggagaaccagaaggccaagggcttcgagctgagactggacagcctgaccttcctggccgccaaggccaagagagacctggccagcgaggtgaagtacaaggaggactacgagagaagcagaggcaagctgatcggcgccaaggacgtgcagggcgacagccagatgagccacagcctgcagatgagcaagctgcagagcgagctggagtacaagaagggcttcgaggacaccaagagccagtgccacgtgagcctggacatggtgcacctggtgcacgccagaaaggcccagcacctggccaccgacgtgggctacaagaccgccgagcaccacttcaccgccctgcccaccgacatgaaggtggagtgggccaagaaggcctacggcctgcagagcgacaaccagtacagagccgacgtgaagtggatgaagggcatgggctgggtggccaccggcagcctgaacgtggagcaggccaagaaggccggcgagctgatcagcgagaagaagtacagacagcaccccgacgccctgaagttcaccagcatcaaggacacccccgagatggtgcaggccagaatcagctacacccaggccgtggacagactgtacagagagcagggcgagaacatcaagcaccactacacccccaccgccgacctgcccgaggtgctgctggccaagctgaacgccatgaacatcagcgagaccagatacaaggagagctggagcaagctgagagacggcggctacaagctgagactggacgccctgcccttccaggccgccaaggccagcggcgagatcatcagcgactacaagtacaaggaggccttcgagaagatgaagggccagatgctgggcagcagaagcctggaggacgacatcagcctggcccacagcgtgtacgccaccagcctgcagagcgacgtgaactacaagaagggcttcgagcacagcaaggcccagttccacctgcccctggacatggccgccctggtgcacgccaagaaggcccagaccctggccagcaaccaggactacaagcaccccctgccccagtacaccagcctggccgaggacctgagactgagctgcgccaagaaggcccacaagctgcagagcgagaacctgtacagaagcgacctgaacttcatgagaggcgtggcctgcgtgatccccggcaccctggagatcgagggcagaaagaaggccagcgagctgatcagcgagagcaagtacagacagcacccccacagcttcaagtacaccgccgtgaccgacacccccaacctgctgcacgccaagttcagcaaccagatcaccaacgagagactgtacaaggccgccggcgaggacgccagacacgagtacaccatgaccctgggcctgcccgagttcatcagagccaagaccaacgccgccaacctgagcgacgccagatacaaggagagctggagaaacctgagagcccagggctacaagctgaccatcgaggccctgcccttccaggccgccagagccagcggcgacatcgccagcgacttcctgtacagacacgacttcgtgaaggagagaggcaagctgatcggcccccagagcgtgagagacgaccccagaatccagcactgcagaagaatgggccagctgcagagcgagctgcagtacagaagaggcgccaccagcagccaggcccagttccacctgcccatggacatggtgcacctggtgcacgccaagaacgcccaggccctggccagcgaccacgactacagaacccagtaccacaagttcaccgccctgcccgaggacctgaagatggcctgggccaagaaggcccacgccctgcagagcgagctgagatacaagagcgacctgatcggcatgaagggcatcggctggctggccctgagaagcccccagatggagagcgccaagaaggccggcgagctgatcagcgagaccaagtacagaaagaagcccgacagcatcaagttcaccaccgtggtggacagccccgacctggtgcacgccaagaacagctacatgcactgcaacgagagaatgtacagaagcggcgacgccgagagcctgcacagatacaccctgatccccgaccaccccgacttcaccagagccagactgaacgccctgcacctgagcgacaaggtgtacagaaacagctgggagcagaccagagccggcagctacgacttcagactggacgccatccccttccagaccgccagagccagcagagagatcgccagcgacttcagatacaaggaggccttcctgagagacagaggcctgcagatcggctacagaagcgtggacgacgaccccagaatgaagcacttcctgaacgtgggcagactgcagagcgacaacgagtacaagaaggacttcgccaagagcagaagccagttccacagcagcaccgaccagcccggcctgctgcaggccaagagaagccagcagctggccagcgacgtgcactacagacagcccctgccccagcccacctgcgaccccgagcagctgggcctgagacacgcccagaaggcccaccagctgcagagcgacgtgaagtacaagagcgacctgaacctgaccagaggcgtgggctggaccccccccggcagctacaaggtggagatggccagaagagccgccgagctggccaacgccagaggcctgggcctgcagggcgcctacagaggcgccgaggccgtggaggccggcgaccaccagagcggcgaggtgaaccccgacgccaccgagatcctgcacgtgaagaagaagaaggccctgctgctgtag

SEQ ID NO: 162487 - protein, 744 aa, Artificial Sequence
  derived and/or modified sequence
MAGRSMQAARCPTDELSLTNCAVVNEKDFQSGQHVIVRTSPNHRYTFTLKTHPSVVPGSIAFSLPQRKWAGLSIGQEIEVSLYTFDKAKQCIGTMTIEIDFLQKKSIDSNPYDTDKMAAEFIQQFNNQAFSVGQQLVFSFNEKLFGLLVKDIEAMDPSILKGEPATGKRQKIEVGLVVGNSQVAFEKAENSSLNLIGKAKTKENRQSIINPDWNFEKMGIGGLDKEFSDIFRRAFASRVFPPEIVEQMGCKHVKGILLYGPPGCGKTLLARQIGKMLNAREPKVVNGPEILNKYVGESEANIRKLFADAEEEQRRLGANSGLHIIIFDEIDAICKQRGSMAGSTGVHDTVVNQLLSKIDGVEQLNNILVIGMTNRPDLIDEALLRPGRLEVKMEIGLPDEKGRLQILHIHTARMRGHQLLSADVDIKELAVETKNFSGAELEGLVRAAQSTAMNRHIKASTKVEVDMEKAESLQVTRGDFLASLENDIKPAFGTNQEDYASYIMNGIIKWGDPVTRVLDDGELLVQQTKNSDRTPLVSVLLEGPPHSGKTALAAKIAEESNFPFIKICSPDKMIGFSETAKCQAMKKIFDDAYKSQLSCVVVDDIERLLDYVPIGPRFSNLVLQALLVLLKKAPPQGRKLLIIGTTSRKDVLQEMEMLNAFSTTIHVPNIATGEQLLEALELLGNFKDKERTTIAQQVKGKKVWIGIKKLLMLIEMSLQMDPEYRVRKFLALLREEGASPLDFD

SEQ ID NO: 162488 - DNA, 1935 bp, Artificial Sequence
  derived and/or modified sequence
atgaccatcgagatagatttcctgcagaaaaaatccattgactccaacccctacgataccgataaaatggctgccgaatttattcagcagtttaacaaccaagccttctcagtgggccagcaactagtgtttagttttaacgaaaagctgtttggcctgctcgtcaaggacattgaggcgatggaccccagcattttgaaaggcgagccagccacaggtaaaaggcagaagattgaggtgggattagtcgtgggaaacagccaggtggccttcgaaaaagctgaaaactcttccctgaacttaattgggaaggctaaaaccaaggagaatcggcagagcataattaaccctgactggaactttgagaagatggggattggcggtctggacaaagagtttagtgatatttttcggcgcgccttcgccagcagggtgttcccaccggagattgtggaacagatgggttgtaaacacgttaagggcatcctcctctatggcccacctggctgcggcaaaaccctgctggctcgccagattggtaaaatgctaaacgcacgggaacctaaagtcgttaacggaccagagatattaaataagtacgtgggagaatcggaggccaacatacgcaagttatttgccgacgctgaggaagagcagcggcgtctgggcgcaaattcaggcctgcacatcattatcttcgacgaaatcgacgcaatttgcaagcagaggggatctatggctggatcaactggtgtacatgacacagtcgttaatcagcttttgagcaaaattgatggggttgagcagctgaataacattctggttataggcatgactaatagacctgacctgattgatgaagctctgctgagaccagggcgcctggaggtcaagatggagataggactacccgacgaaaagggaagacttcagatactccacatccatacagcacggatgagaggccaccagttactgtctgcagatgtggacataaaggaattggccgttgagacgaagaatttcagtggtgcagaattggagggacttgtccgggcagcccagtcaacggccatgaatcgccatataaaagctagcaccaaggtagaagttgacatggagaaagctgagtccctccaggttacacgcggagacttcctcgcatctcttgagaatgatataaaacctgcgtttggtaccaatcaggaagactatgccagctatatcatgaatggaatcattaagtggggcgaccccgtcacgcgggtgctggacgatggggaactgttggtccagcagacaaagaattcagaccgaactcctcttgtgtcggtgttgttagaaggcccaccgcactccgggaaaacagcactggcagcaaagatcgccgaggaaagtaactttccgtttataaaaatctgttcgcccgataaaatgatcgggttctctgaaactgctaaatgtcaggctatgaaaaagatcttcgacgatgcatacaaaagccagctgtcgtgcgtggttgtggacgatatcgagaggctcctcgattacgtgccaatcgggccaaggttttctaacttggttttacaggccttgctggtgctcttaaagaaggcacccccccagggtcgcaaactgctcattatcggaacaacaagtaggaaggatgttctgcaggaaatggaaatgctgaatgcattttccacgacaatccacgtgccgaacatagctacaggcgagcagctcctggaggccctagaactactgggcaactttaaagataaagaaaggactaccatcgcacagcaggtcaaggggaaaaaggtgtggataggtatcaagaaactgctgatgttgattgagatgtcgttgcagatggatccggaataccgagtccgcaaattcctcgctttgctccgtgaggaaggcgcttag

SEQ ID NO: 162489 - DNA, 2235 bp, Artificial Sequence
  derived and/or modified sequence
atggccgggagatcaatgcaagccgcccggtgtccaaccgacgaactcagtcttaccaactgcgccgtcgtcaacgagaaagactttcaatcaggtcagcatgtgatcgtcaggacttcccctaatcatcgatatacctttactctgaaaacccaccccagcgtggttccaggctcaatcgctttcagtctgcctcagcgaaaatgggccggactttccatcggacaggagatagaagtaagtctgtacacattcgacaaggctaaacagtgcatcggcactatgaccatcgagatcgattttctacagaaaaagagcatcgattctaacccctacgatacggacaaaatggccgcagagttcatacagcaatttaacaaccaggctttctccgtaggacagcagcttgtatttagcttcaacgagaagctcttcgggctcctcgttaaagacatagaagccatggacccgtccattctgaaaggtgaaccagctaccggcaagcgccagaagatagaggtcgggttagtggtcggaaattcacaagttgcctttgaaaaagcggaaaacagttcattgaaccttatcggcaaggctaaaacgaaggaaaatagacaatctataatcaatcccgactggaatttcgaaaagatgggaatcgggggtttggataaggaattctcagacatcttccgcagagcattcgcatcacgggtgtttcctcccgaaattgtggagcagatgggttgcaagcatgtgaaaggaattctgctgtacggcccacccggctgcggcaagaccctcctggctcgccaaatcggcaagatgctaaatgctagggaacccaaggtggtcaacggacctgagattctgaataagtacgtgggagagagcgaagctaacatcagaaagctgtttgccgacgcagaagaagagcaaagacggctcggtgcaaactctggcttgcacattattatctttgatgagattgacgcaatatgcaaacagagggggtccatggctggcagtactggtgtacacgacaccgttgtgaaccagcttctctccaagatagacggcgtcgagcaactaaacaatattctcgtcatcggcatgacgaatcgacctgacctcattgatgaagccctgctgcgtccagggaggctagaggtgaagatggaaatcggcctccctgacgagaaagggcggctgcaaattctgcacattcacaccgcgcggatgaggggacaccaattgctgtctgccgacgtcgatattaaggagctcgcagtcgagacgaagaattttagtggcgctgaattggaggggctggtccgcgctgcccaaagtaccgcaatgaatcgccacataaaagcctctaccaaagtggaggtcgacatggaaaaggcagaatctctccaagtcactagaggtgacttcctggcatccctcgagaatgatattaaacccgcttttggcactaatcaggaagactatgcctcttatatcatgaacggcatcatcaagtggggggatccggtcacccgcgtgctggatgacggtgagctgctagtccagcagacaaagaatagtgaccgtacgccgctcgtttcagtgctgctggaaggacctccccactctggcaagaccgctttggctgcgaagattgccgaggagtccaattttccttttatcaaaatttgcagccccgacaagatgatcggtttttccgagaccgccaagtgtcaagccatgaagaaaatcttcgacgatgcctacaagagccagttgagttgtgtggtggtggatgacatcgaaagactgttggattatgtccctataggtccgaggttcagcaatctggtgttgcaagccctgctcgtgctgctcaagaaggctccgcctcagggacgcaagctcctgattatagggaccaccagcagaaaagacgtccttcaggagatggagatgctgaatgctttctcaacaaccattcacgttcccaacatcgccacgggcgagcagctcctcgaagcactcgaactcttgggcaattttaaggacaaagagagaactaccattgcccaacaggttaaaggcaaaaaagtctggatcggcatcaagaaactgctgatgctcatcgaaatgtctttacagatggaccccgagtatcgggtgaggaaattcctagccctgctgcgagaagagggtgcctccccattagacttcgattag

SEQ ID NO: 162490 - DNA, 1935 bp, Artificial Sequence
  derived and/or modified sequence
atgaccattgaaattgacttcctgcagaagaagagcattgacagcaacccctatgacacagacaagatggctgctgagttcatccagcagttcaacaaccaggccttctctgtgggccagcagctggtgttctccttcaatgagaagctgtttggcctgctggtgaaggacatcgaggccatggaccccagcatcctgaagggggagcccgccaccgggaagaggcagaagattgaggtgggcctggtggtgggcaacagccaggtggcctttgagaaggccgagaacagcagcctgaacctgattggcaaggccaagaccaaggaaaatcggcagagcatcatcaacccagactggaactttgagaagatgggcatcggcggcctggacaaggagttcagtgacatcttccggcgggcctttgccagcagggtcttccccccagagatcgtggagcagatgggctgcaagcacgtgaagggcatcctgctgtatggccccccaggctgtgggaagaccctgctggcccggcagatcggcaagatgctgaatgcccgggagcccaaggtggtgaatggacctgagatcctgaacaagtatgtgggggagagcgaggccaacatcaggaagctgtttgctgatgctgaggaggagcagaggcggctgggcgccaacagcggcctgcacatcatcatctttgatgaaattgatgccatctgcaagcagaggggctccatggccggcagcactggagtgcatgacacagtggtgaaccagctgctgagcaagattgatggagtggagcagctgaacaacatcctggtgattggcatgaccaacagaccagacctgattgatgaggccctgctgcggcccggccgcctggaggtgaagatggagatcggcctgcctgatgagaagggccgcctgcagatcctgcacatccacacagccaggatgaggggccaccagctgctgtctgcagatgtggacatcaaggagctggccgtggagaccaagaacttctctggagctgagctggagggcctggtgcgggccgcccagagcacagccatgaacagacacatcaaggccagcaccaaggtggaggtggacatggagaaggccgagagcctgcaggtgaccaggggggacttcctggccagcctggagaatgacatcaagccagccttcggcaccaaccaggaggactatgccagctacatcatgaatggcatcatcaagtggggagaccctgtgaccagggtgctggatgatggagagctgctggtgcagcagaccaagaacagcgacaggacccccctggtgtctgtgctgctggagggccccccccacagcggcaagacagccctggccgccaagattgctgaggagagcaacttccccttcatcaagatctgcagcccagacaagatgattggcttcagcgagacagccaagtgccaggccatgaagaagatctttgatgatgcctacaagagccagctgagctgtgtggtggtggatgacatcgagcggctgctggactatgtgcccatcggcccccgcttcagcaacctggtgctgcaggccctgctggtgctgctgaagaaggccccaccccagggcaggaagctgctgatcatcggcaccaccagcaggaaggatgtgctgcaggagatggagatgctgaatgccttcagcaccaccatccacgtgcccaacatcgccaccggggagcagctgctggaggccctggagctgctgggcaacttcaaggacaaggagaggaccaccatcgcccagcaggtgaagggcaagaaggtgtggattggcatcaagaagctgctgatgctgattgagatgagcctgcagatggaccctgagtacagagtgaggaagttcctggccctgctgcgggaggagggcgcctag

SEQ ID NO: 162491 - DNA, 2235 bp, Artificial Sequence
  derived and/or modified sequence
atggccggccgctccatgcaggccgcccgctgccccacagatgagctgagcctgaccaactgtgctgtggtgaatgagaaggacttccagagcggccagcacgtgattgtgaggaccagccccaaccaccgctacaccttcaccctgaagacccaccccagcgtggtgcccggcagcatcgccttcagcctgccccagaggaagtgggccggcctgagcatcggccaggagattgaggtgtccctgtacacctttgacaaggccaagcagtgcatcggcaccatgaccattgaaattgacttcctgcagaagaagagcattgacagcaacccctatgacacagacaagatggctgctgagttcatccagcagttcaacaaccaggccttctctgtgggccagcagctggtgttctccttcaatgagaagctgtttggcctgctggtgaaggacatcgaggccatggaccccagcatcctgaagggggagcccgccaccgggaagaggcagaagattgaggtgggcctggtggtgggcaacagccaggtggcctttgagaaggccgagaacagcagcctgaacctgattggcaaggccaagaccaaggaaaatcggcagagcatcatcaacccagactggaactttgagaagatgggcatcggcggcctggacaaggagttcagtgacatcttccggcgggcctttgccagcagggtcttccccccagagatcgtggagcagatgggctgcaagcacgtgaagggcatcctgctgtatggccccccaggctgtgggaagaccctgctggcccggcagatcggcaagatgctgaatgcccgggagcccaaggtggtgaatggacctgagatcctgaacaagtatgtgggggagagcgaggccaacatcaggaagctgtttgctgatgctgaggaggagcagaggcggctgggcgccaacagcggcctgcacatcatcatctttgatgaaattgatgccatctgcaagcagaggggctccatggccggcagcactggagtgcatgacacagtggtgaaccagctgctgagcaagattgatggagtggagcagctgaacaacatcctggtgattggcatgaccaacagaccagacctgattgatgaggccctgctgcggcccggccgcctggaggtgaagatggagatcggcctgcctgatgagaagggccgcctgcagatcctgcacatccacacagccaggatgaggggccaccagctgctgtctgcagatgtggacatcaaggagctggccgtggagaccaagaacttctctggagctgagctggagggcctggtgcgggccgcccagagcacagccatgaacagacacatcaaggccagcaccaaggtggaggtggacatggagaaggccgagagcctgcaggtgaccaggggggacttcctggccagcctggagaatgacatcaagccagccttcggcaccaaccaggaggactatgccagctacatcatgaatggcatcatcaagtggggagaccctgtgaccagggtgctggatgatggagagctgctggtgcagcagaccaagaacagcgacaggacccccctggtgtctgtgctgctggagggccccccccacagcggcaagacagccctggccgccaagattgctgaggagagcaacttccccttcatcaagatctgcagcccagacaagatgattggcttcagcgagacagccaagtgccaggccatgaagaagatctttgatgatgcctacaagagccagctgagctgtgtggtggtggatgacatcgagcggctgctggactatgtgcccatcggcccccgcttcagcaacctggtgctgcaggccctgctggtgctgctgaagaaggccccaccccagggcaggaagctgctgatcatcggcaccaccagcaggaaggatgtgctgcaggagatggagatgctgaatgccttcagcaccaccatccacgtgcccaacatcgccaccggggagcagctgctggaggccctggagctgctgggcaacttcaaggacaaggagaggaccaccatcgcccagcaggtgaagggcaagaaggtgtggattggcatcaagaagctgctgatgctgattgagatgagcctgcagatggaccctgagtacagagtgaggaagttcctggccctgctgcgggaggagggcgccagccccctggactttgattag

SEQ ID NO: 162492 - DNA, 1935 bp, Artificial Sequence
  derived and/or modified sequence
atgaccatcgagatcgacttcctgcagaagaagagcatcgacagcaacccctacgacaccgacaaaatggctgcggaatttatccagcagttcaacaatcaagcttttagcgttggtcaacagttagtattctccttcaacgagaagctctttggcctacttgtgaaagatattgaggccatggacccttcaatcctgaagggggagcccgccaccggcaaaagacagaagatcgaagtcggcctggtggtcggtaacagccaagtggcatttgaaaaggccgaaaactcatctctgaaccttatagggaaggccaagaccaaagagaatagacagagtataattaatccagactggaatttcgagaaaatgggcattggaggactggataaggagtttagcgacatattccggcgggctttcgcatctcgagtgtttccacctgaaattgttgagcagatgggctgcaagcacgtgaagggaatccttctttatggcccacctggctgtggaaagacactactagctaggcagattggcaagatgctgaatgccagggagccaaaagtggtgaacggcccagagatcctcaataaatacgttggcgaaagcgaagctaacatacggaagctttttgccgatgctgaagaagagcaaaggaggctcggcgcaaactccggactgcatataataattttcgacgaaattgatgccatctgcaagcaacgtgggtcaatggctgggtccactggagtgcatgatactgtggtaaatcagctgcttagtaagatcgatggtgtggagcagctgaataacattcttgttattgggatgacaaaccgcccagatctgatcgacgaggcattactgcggccagggcggctcgaagttaagatggagattggattgccagatgaaaaggggcggctgcagattttacacatccataccgccaggatgcgggggcaccagttgctgagcgccgacgtggacatcaaagagttggctgtcgagaccaagaactttagcggcgccgagctggaggggctcgtgcgcgccgcgcagtccacagccatgaacagacacattaaggcctctacaaaggttgaagtggacatggagaaggcagaaagcctgcaagtgacgaggggtgactttttggcgagcctcgaaaatgacattaagcctgcctttggaacaaaccaagaggattacgcaagttacattatgaatgggattattaagtggggggaccctgtcacacgcgtcctggacgacggcgagctactcgttcagcagaccaagaatagcgataggacccccttggtctcagtgttattagaggggcctcctcattctggaaaaacagccctggccgctaaaatagccgaggagtccaacttcccgttcatcaaaatttgctctcccgacaagatgattggcttcagcgagacagccaagtgtcaggccatgaagaaaatctttgatgatgcttacaagtcacagctttcatgcgtggtggtggacgacattgaaaggttgctcgactatgtcccaatcggaccacgattctctaacctggtcttacaggcgctcttggttctcctgaaaaaagcacctccgcaggggcgtaagttattgataatcgggaccacttcccgaaaggatgtgctacaggaaatggagatgctgaatgccttcagtacaacgattcatgtgcccaatatcgccactggagagcagcttctggaagccctggaactccttggcaacttcaaagacaaggaaaggaccactattgcgcagcaggtcaagggcaaaaaggtgtggattgggattaagaaactgcttatgctgatcgagatgagtcttcagatggacccagaatatagggtccgcaagtttttggcattgctgcgcgaggaaggggcttag

SEQ ID NO: 162493 - DNA, 2235 bp, Artificial Sequence
  derived and/or modified sequence
atggccggccggagcatgcaggccgcccggtgccccaccgacgagctttctctgacaaattgcgcagtggtgaacgagaaggactttcagtcaggccagcacgtcatagtgagaacctccccaaatcatcgctacacctttacacttaaaacccacccatccgtggtgccaggtagcatagcattctctctgcctcagcggaaatgggccggactgtccattggccaagaaatcgaggtaagcctttacacgttcgataaagccaaacagtgtatagggaccatgacaattgagatcgatttcctgcagaagaagtcaatcgactctaacccatacgatacagacaagatggccgctgaattcattcagcagttcaacaaccaggccttctcggtgggccagcagctcgtcttcagctttaacgaaaagctctttgggttactagttaaggacatagaggccatggatcccagcatccttaagggggaacccgctacgggtaaacggcagaaaattgaagtcggactggtggtgggaaacagccaggtagcctttgaaaaggcagagaattcaagcttaaatctgatagggaaggctaagaccaaagaaaatcgacagtccatcataaacccggattggaacttcgaaaaaatgggtattggcggactggataaggagttcagcgacatttttcgcagagcgttcgcgagcagagtattccccccggaaatcgtggagcagatgggctgcaagcacgtgaaggggattctgctgtacggtcctccgggatgcggcaaaaccttactcgctcggcagatcggaaagatgttgaatgcgagggaacctaaagtcgtaaacggtccggaaatcctgaacaaatacgtgggggaaagcgaggccaatatcaggaagttattcgcggatgcggaggaggagcagagaaggttaggggccaactcaggtttacatattatcattttcgatgaaattgatgcgatttgcaaacagagagggtccatggcgggcagcaccggcgtgcatgatacagttgtgaatcagctgctgagcaaaatcgatggcgtggaacagttgaacaatattctcgtgatcggcatgactaatcgccccgaccttatcgacgaggccctcttaaggcctggacggctggaagttaagatggagatcggactgcccgatgaaaagggaaggctacagattctccacattcatacggccaggatgaggggccatcagctgctgtcggctgacgtggacatcaaggaactagcagtggaaactaagaatttttctggagctgagttggagggattggttagagcagcacagagcaccgctatgaatcggcatatcaaagcatctacaaaagttgaggtggacatggaaaaagctgagtctctccaggtaacacgaggagatttccttgcctcgctggagaatgacatcaaacctgcattcggcaccaatcaggaagactacgcgtcctacattatgaatggaatcattaagtggggcgaccccgtcactagggtcttggacgatggggaacttctagttcagcagaccaagaactctgaccgtacccctctcgtgagcgtgttactcgaggggccccctcattctggcaagacagctctggccgctaagatcgccgaagagtctaacttcccttttatcaaaatttgctctcccgataagatgatcggtttctccgaaactgctaaatgccaggccatgaaaaagatctttgatgacgcctacaagtcacaattatcatgcgtggtggtggacgacattgagcgcctgctggattatgtgccaataggacctcggttcagcaatctggtactgcaggccctccttgtgctactgaagaaggccccgccacaggggcgaaagctgctgattattggaacaacgagcagaaaggatgtgctgcaagaaatggaaatgcttaatgccttctcaacgaccatccatgtccctaacatcgccactggcgaacagttgttggaagcactggaactgctgggcaacttcaaagataaggaaagaactacgatagcacaacaggtcaaggggaaaaaagtgtggattgggattaagaaactgttgatgctcattgaaatgtcgctgcaaatggaccctgagtacagggtaaggaaattccttgcgttactgcgggaggaaggagcgtccccactagacttcgattag

SEQ ID NO: 162494 - DNA, 2738 bp, Artificial Sequence
  derived and/or modified sequence
gagcgcagagctgcagccgccgagccggacgtgtccgcgaagatggcgggccggagcatgcaagcggcaagatgtcctacagatgaattatctttaaccaattgtgcagttgtgaatgaaaaggatttccagtctggccagcatgtgattgtgaggacctctcccaatcacaggtacacatttacactgaagacacatccatcggtggttccagggagcattgcattcagtttacctcagtctccttatatacatttgacaaagccaaacagtgtattggcacaatgaccatcgagattgatttcctgcagaaaaaaagcattgactccaacccttatgacaccgacaagatggcagcagaatttattcagcaattcaacaaccaggccttctcagtgggacaacagcttgtctttagcttcaatgaaaagctttttggcttactggtgaaggacattgaagccatggatcctagcatcctgaagggagagcctgcgacagggaaaaggcagaagattgaagtaggactggttgttggaaacagtcaagttgcatttgaaaaagcagaaaattcgtcacttaatcttattggcaaagctaaaaccaaggaaaatcgccaatcaattatcaatcctgactggaactttgaaaaaatgggaataggaggtctagacaaggaattttcagatattttccgacgagcatttgcttcccgagtatttcctccagagattgtggagcagatgggttgtaaacatgttaaaggcatcctgttatatggacccccaggttgtggtaagactctcttggctcgacagattggcaagatgttgaatgcaagagagcccaaagtggtcaatgggccagaaatccttaacaaatatgtgggagaatcagaggctaacattcgcaaactttttgctgatgctgaagaggagcaaaggaggcttggtgctaacagtggtttgcacatcatcatctttgatgaaattgatgccatctgcaagcagagagggagcatggctggtagcacgggagttcatgacactgttgtcaaccagttgctgtccaaaattgatggcgtggagcagctaaacaacatcctagtcattggaatgaccaatagaccagatctgatagatgaggctcttcttagacctggaagactggaagttaaaatggagataggcttgccagatgagaaaggccgactacagattcttcacatccacacagcaagaatgagagggcatcagttactctctgctgatgtagacattaaagaactggccgtggagaccaagaatttcagtggtgctgaattggagggtctggtgcgagcagcccagtccactgctatgaatagacacataaaggccagtactaaagtggaagtggacatggagaaagcagaaagcctgcaagtgacgagaggagacttccttgcttctttggagaatgatatcaaaccagcctttggcacaaaccaagaagattatgcaagttacattatgaacggtatcatcaaatggggtgacccagttactcgagttctagatgatggggagctgctggtgcagcagactaagaacagtgaccgcacaccattggtcagcgtgcttctggaaggccctcctcacagtgggaagactgctttagctgcaaaaattgcagaggaatccaacttcccgttcatcaagatctgttctcctgataaaatgattggcttttctgaaacagccaaatgtcaggccatgaagaagatctttgatgatgcgtacaaatcccagctcagttgtgtggttgtggatgacattgagagattgcttgattacgtccctattggccctcgattttcaaatcttgtattacaggctcttctcgttttactgaaaaaggcacctcctcagggccgcaagcttcttatcattgggaccactagccgcaaagatgtccttcaggagatggaaatgcttaacgctttcagcaccaccatccacgtgcccaacattgccacaggagagcagctgttggaagctttggagcttttgggcaacttcaaggataaggaacgcaccacaattgcacagcaagtcaaagggaagaaggtctggataggaatcaagaagttactaatgctgatcgagatgtccctacagatggatcctgaataccgtgtgagaaaattcttggccctcttaagagaagaaggagcgtaatagcccccttgattttgattgaaaatgaactatttgaaacacacagtgaccaagggaagtgaccaaggtgaagatggcctaggatcttcactgtcttactcaagatactggactaagtggaacgttctctaccttcaacatgtgctcgctctgcatgattagtgcaataaaactcccttccttatgcatactgagatagcttagtgtctcgtggaaggtgtcaatttggtttagaatgctgcgcttaccttcccatgcaggctaaagtgattccttcttgctcagtccctctgggtgggaaccatccagtacttgtggacactacacgtttcaacctctctactagcaccatcacccttgaaaactctcagtcagtgtcatgaatgttgcatgacaacagttggccgattagaaggcagactttctacatgcaaatctggcttagtaaatcgaggtgtgggccagagatcctctgacagctgtcctgagctaacactaaaagtcactgggtatttggtt

SEQ ID NO: 162495 - DNA, 3943 bp, Artificial Sequence
  derived and/or modified sequence
gcgcgcggcgggggcgggctttgccgagcgcagagctgcagccgccgagccggacgtgtccgcgaagatggcgggccggagcatgcaagcggcaagatgtcctacagatgaattatctttaaccaattgtgcagttgtgaatgaaaaggatttccagtctggccagcatgtgattgtgaggacctctcccaatcacaggtacacatttacactgaagacacatccatcggtggttccagggagcattgcattcagtttacctcagagaaaatgggctgggctttctattgggcaagaaatagaagtctccttatatacatttgacaaagccaaacagtgtattggcacaatgaccatcgagattgatttcctgcagaaaaaaagcattgactccaacccttatgacaccgacaagatggcagcagaatttattcagcaattcaacaaccaggccttctcagtgggacaacagcttgtctttagcttcaatgaaaagctttttggcttactggtgaaggacattgaagccatggatcctagcatcctgaagggagagcctgcgacagggaaaaggcagaagattgaagtaggactggttgttggaaacagtcaagttgcatttgaaaaagcagaaaattcgtcacttaatcttattggcaaagctaaaaccaaggaaaatcgccaatcaattatcaatcctgactggaactttgaaaaaatgggaataggaggtctagacaaggaattttcagatattttccgacgagcatttgcttcccgagtatttcctccagagattgtggagcagatgggttgtaaacatgttaaaggcatcctgttatatggacccccaggttgtggtaagactctcttggctcgacagattggcaagatgttgaatgcaagagagcccaaagtggtcaatgggccagaaatccttaacaaatatgtgggagaatcagaggctaacattcgcaaactttttgctgatgctgaagaggagcaaaggaggcttggtgctaacagtggtttgcacatcatcatctttgatgaaattgatgccatctgcaagcagagagggagcatggctggtagcacgggagttcatgacactgttgtcaaccagttgctgtccaaaattgatggcgtggagcagctaaacaacatcctagtcattggaatgaccaatagaccagatctgatagatgaggctcttcttagacctggaagactggaagttaaaatggagataggcttgccagatgagaaaggccgactacagattcttcacatccacacagcaagaatgagagggcatcagttactctctgctgatgtagacattaaagaactggccgtggagaccaagaatttcagtggtgctgaattggagggtctggtgcgagcagcccagtccactgctatgaatagacacataaaggccagtactaaagtggaagtggacatggagaaagcagaaagcctgcaagtgacgagaggagacttccttgcttctttggagaatgatatcaaaccagcctttggcacaaaccaagaagattatgcaagttacattatgaacggtatcatcaaatggggtgacccagttactcgagttctagatgatggggagctgctggtgcagcagactaagaacagtgaccgcacaccattggtcagcgtgcttctggaaggccctcctcacagtgggaagactgctttagctgcaaaaattgcagaggaatccaacttcccgttcatcaagatctgttctcctgataaaatgattggcttttctgaaacagccaaatgtcaggccatgaagaagatctttgatgatgcgtacaaatcccagctcagttgtgtggttgtggatgacattgagagattgcttgattacgtccctattggccctcgattttcaaatcttgtattacaggctcttctcgttttactgaaaaaggcacctcctcagggccgcaagcttcttatcattgggaccactagccgcaaagatgtccttcaggagatggaaatgcttaacgctttcagcaccaccatccacgtgcccaacattgccacaggagagcagctgttggaagctttggagcttttgggcaacttcaaggataaggaacgcaccacaattgcacagcaagtcaaagggaagaaggtctggataggaatcaagaagttactaatgctgatcgagatgtccctacagatggatcctgaataccgtgtgagaaaattcttggccctcttaagagaagaaggagctagcccccttgattttgattgaaaatgaactatttgaaacacacagtgaccaagggaagtgaccaaggtgaagatggcctaggatcttcactgtcttactcaagatactggactaagtggaacgttctctaccttcaacatgtgctcgctctgcatgattagtgcaataaaactcccttccttatgcatactgagatagcttagtgtctcgtggaaggtgtcaatttggtttagaatgctgcgcttaccttcccatgcaggctaaagtgattccttcttgctcagtccctctgggtgggaaccatccagtacttgtggacactacacgtttcaacctctctactagcaccatcacccttgaaaactctcagtcagtgtcatgaatgttgcatgacaacagttggccgattagaaggcagactttctacatgcaaatctggcttagtaaatcgaggtgtgggccagagatcctctgacagctgtcctgagctaacactaaaagtcactgggtatttggttaaaggtctcccacaagactggtattctctttgcctgaagaaacaaggcattgaatctctaaaatgctgttctcaatcattgtcagagatgttttcaagttgcagtcagaagatctttcttaatagaaagtcagatgactaccgtgttggttgtgacttccccttaagtataactaatttgctctgtggtaagagatatgctcattattaccacttagaagatgttgttaaaaacatgtgaaagataggtatggaaaaagcatacacccccaaacagaaaggagttattaaagtaatttacaaacctctcagcactaattagtgtccaactccaagtgggtcaattccttagtataatattaaggcttactagtatcactgctttttccttagcttaatgacttacttagaatttatcctttattttaaatgatctgtactatctagtgtctaaaacactattctccagaaaaatcaatcattttctagccctctccctcagtcctttattgtccattccaatacattgaacacatttcctttaccctccacacacttcttccaaaaggaagcacccgttgagtccttttgagggtgatttgtcttacaactgactgacttagcaggaatttaattaggtcatatttggtgatgagacttatggagtgtgcctctctctcccaactgctgcttaaaatgcaaggacaagcaattagaagccatcctaaggtgcttacctcacacgccacccatgaggcttgtggccacagtggcacttgggtgtggctcctctgttatttgtcctcatgtgagaaagcagatcatctccaaatcttgccatttgtatacttttggtggagacttggatgtcatatcttctttgttttgggttttcttccctagcttattttgtggcttttaaagaagtggattgtattgtgagatcctgtgattcctggtggccagtatcctggattcctctaagatcttgcctctttcctcctcatgaaagcagcacacattgtgttaacttatgtctcttgttaaatgagcttaatgtctttgtgttttgtccaaaactgtattgaaaaaatattgtttaatgcaaatgaaggaatgcaataaagagtaaatatacttgaaaa

SEQ ID NO: 162496 - DNA, 1935 bp, Artificial Sequence
  derived and/or modified sequence
atgaccatagagatagatttcttgcaaaaaaaatcaattgatagtaacccctacgacacagataagatggctgctgagttcattcagcaattcaacaatcaggcctttagtgtcggccagcagctggtcttttcttttaacgagaaattgttcggactgttggtcaaggatatcgaggccatggatccctctatcctgaagggcgaaccggctactgggaaaaggcagaaaatcgaggtggggctcgttgtcggtaactcccaggtggcattcgagaaggctgaaaattctagtctgaatctgatcggtaaagccaaaacgaaggagaacagacagagtatcatcaaccccgattggaactttgagaagatgggaattggagggctcgacaaggagttctctgatatcttccggcgagcatttgcctcgcgggtctttcctcccgaaatagtggagcaaatgggttgtaaacacgtgaagggaatactgctttatggcccacctggatgtgggaagacacttcttgctaggcagattggcaaaatgctgaacgcccgtgagcctaaagtggtgaatgggcctgaaatacttaataagtacgtgggcgagtcggaggccaatatccgcaagttattcgcagatgctgaggaggagcagcgtcggttgggcgctaattcgggattacatattattattttcgacgagatagacgccatctgcaaacagagaggatctatggccggatctacaggagttcacgatacagtggtgaaccagctcctttcaaaaatcgacggcgtggagcaattgaacaacatccttgtcattgggatgacaaataggccggacctgattgatgaggccctgttgcgccctggccgattggaggtgaagatggagattgggttaccagacgaaaaaggtcggctgcagatcctgcatatacatacggcacggatgcgcggacatcagctcctgagcgccgacgtggatataaaggagctggcagtggaaactaaaaatttcagcggggctgagcttgagggcctggtccgggctgctcaaagcacggctatgaatagacacattaaagcttccaccaaagtcgaggttgacatggagaaagccgagtcactgcaggtcacaagaggagactttttagccagtctcgagaatgacattaaaccggcatttggcacaaatcaggaggattatgccagctacattatgaatggaatcataaagtggggagatcctgtcaccagagttctcgatgacggcgaactgctagtccaacagaccaaaaatagtgaccggacccctctcgtgagcgttctgttggaaggcccaccgcacagcggcaaaacagctcttgccgctaaaatcgccgaagaatctaattttccatttatcaagatctgttctccagataaaatgatcggattttctgagaccgcaaaatgtcaggcgatgaaaaagatttttgacgacgcctataaatcccagctgtcctgtgtggtcgtagatgatatcgaacgcctcctcgattacgtgcctattggacccagattttccaatctcgtattacaggcactgctggtgctcttgaaaaaggctcccccacagggacggaagcttttgattattggaaccacctcccggaaagacgtgctgcaagagatggagatgcttaatgctttctcaacaaccatccacgtgccgaatatcgctacaggggaacaattacttgaggctctggagttgctgggcaacttcaaggacaaggagcgcacaactatcgcgcagcaggtgaaaggcaaaaaggtttggatcggaatcaagaagctgctcatgctgatcgagatgtccttacagatggatccagagtacagagtgaggaagtttctcgctctgctccgggaggaaggagcctag

SEQ ID NO: 162497 - DNA, 2235 bp, Artificial Sequence
  derived and/or modified sequence
atggcgggtcgcagcatgcaggccgcaaggtgccccaccgacgagctgagcctcaccaattgcgcagtggttaacgagaaagatttccagagcggccagcacgtcattgtccggacaagcccaaatcaccgttacacttttaccctcaaaacccatcccagcgtcgtccccggttccatcgccttttcgctgccccagcgcaagtgggccggactttctataggtcaggagatagaagtgtcactgtataccttcgataaggctaaacagtgcattggtactatgactatcgagatcgacttcctacaaaagaagtccatagactccaatccctacgatactgataagatggcggctgaattcattcaacagtttaataaccaggcatttagcgtgggacagcagctggtattttctttcaatgagaagttgttcggactgttggtcaaggacattgaggccatggatccatccattttgaaaggggaacctgcgaccggaaagagacagaagattgaggtgggactcgtcgtaggcaattctcaggtcgcgttcgaaaaagccgagaacagtagtctgaacttgattgggaaggctaaaaccaaggagaaccgccagagcattatcaatcctgactggaactttgagaaaatggggatcgggggtctggacaaggaattctccgacattttcagaagagcttttgcatcccgcgttttccccccagagatagtcgaacagatgggttgtaaacacgtgaaagggatcctgctgtatggaccaccgggatgcggtaagaccctcctggcccgtcagataggaaagatgctgaacgcgcgagaacccaaggtcgtcaatggcccagaaatcctgaacaaatacgtaggtgagtcagaagccaatatccgcaagttgttcgccgatgcagaggaagagcagagaaggttgggtgcaaattctggacttcacattattatctttgacgagatcgatgctatctgtaaacagaggggaagcatggctggcagcacaggtgtgcacgacacggtggttaatcaactgctgtccaagattgatggcgtggaacagctgaacaatattctcgtcatcggcatgaccaaccgaccagacctgattgacgaggcattactcaggcccggtaggctggaagtgaaaatggagattggcctccctgacgagaagggtcgcctgcagattctgcacattcacacagcacgcatgcgcggacatcaactcctatccgccgacgtggacatcaaggaactggctgtagagacgaaaaacttttcgggcgcagaattagaagggctcgttcgtgccgctcagtcaaccgcaatgaaccgccatataaaagcctctaccaaagtggaggtcgacatggaaaaggccgagtctctgcaagtgacccggggagactttctggcctcgcttgaaaacgacataaagcccgcatttggcactaatcaggaggactacgcctcgtatatcatgaatgggatcattaaatggggagatccggtgactagagtcttagatgacggtgagctgctggtgcagcagactaagaatagtgaccgaactcctctcgtgagtgtcttgctggagggacctcctcactcggggaagacagccttagcagccaaaatcgccgaggagagtaattttcccttcatcaaaatatgttccccagacaagatgatcggcttctcggagaccgcgaagtgccaggcaatgaagaagatcttcgatgatgcctataagagccagctgagctgtgtggtcgttgatgatatcgagcggcttcttgattacgtccctattggcccacgtttcagcaacttggttctgcaggccttgcttgtgctgctgaaaaaagcacctccacagggtaggaaacttctgattattggcaccaccagccgcaaagacgtgctccaggagatggagatgctgaacgctttttcaaccaccattcatgtgccaaacatcgcaaccggcgaacagttactggaagcactcgagctcctggggaacttcaaggacaaagagagaacaaccatagcacaacaggtgaaaggaaagaaagtttggattgggattaagaaactcctgatgctgatcgagatgagccttcaaatggaccctgaatacagagtccgcaaattcctggcactcttgagagaggagggcgctagtcccctggactttgactag

SEQ ID NO: 162498 - DNA, 1935 bp, Artificial Sequence
  derived and/or modified sequence
atgaccatcgagatcgacttcctgcagaagaagagcatcgacagcaacccctacgacaccgacaagatggccgccgagttcatccagcagttcaacaaccaggccttcagcgtgggccagcagctggtgttcagcttcaacgagaagctgttcggcctgctggtgaaggacatcgaggccatggaccccagcatcctgaagggcgagcccgccaccggcaagagacagaagatcgaggtgggcctggtggtgggcaacagccaggtggccttcgagaaggccgagaacagcagcctgaacctgatcggcaaggccaagaccaaggagaacagacagagcatcatcaaccccgactggaacttcgagaagatgggcatcggcggcctggacaaggagttcagcgacatcttcagaagagccttcgccagcagagtgttcccccccgagatcgtggagcagatgggctgcaagcacgtgaagggcatcctgctgtacggcccccccggctgcggcaagaccctgctggccagacagatcggcaagatgctgaacgccagagagcccaaggtggtgaacggccccgagatcctgaacaagtacgtgggcgagagcgaggccaacatcagaaagctgttcgccgacgccgaggaggagcagagaagactgggcgccaacagcggcctgcacatcatcatcttcgacgagatcgacgccatctgcaagcagagaggcagcatggccggcagcaccggcgtgcacgacaccgtggtgaaccagctgctgagcaagatcgacggcgtggagcagctgaacaacatcctggtgatcggcatgaccaacagacccgacctgatcgacgaggccctgctgagacccggcagactggaggtgaagatggagatcggcctgcccgacgagaagggcagactgcagatcctgcacatccacaccgccagaatgagaggccaccagctgctgagcgccgacgtggacatcaaggagctggccgtggagaccaagaacttcagcggcgccgagctggagggcctggtgagagccgcccagagcaccgccatgaacagacacatcaaggccagcaccaaggtggaggtggacatggagaaggccgagagcctgcaggtgaccagaggcgacttcctggccagcctggagaacgacatcaagcccgccttcggcaccaaccaggaggactacgccagctacatcatgaacggcatcatcaagtggggcgaccccgtgaccagagtgctggacgacggcgagctgctggtgcagcagaccaagaacagcgacagaacccccctggtgagcgtgctgctggagggccccccccacagcggcaagaccgccctggccgccaagatcgccgaggagagcaacttccccttcatcaagatctgcagccccgacaagatgatcggcttcagcgagaccgccaagtgccaggccatgaagaagatcttcgacgacgcctacaagagccagctgagctgcgtggtggtggacgacatcgagagactgctggactacgtgcccatcggccccagattcagcaacctggtgctgcaggccctgctggtgctgctgaagaaggcccccccccagggcagaaagctgctgatcatcggcaccaccagcagaaaggacgtgctgcaggagatggagatgctgaacgccttcagcaccaccatccacgtgcccaacatcgccaccggcgagcagctgctggaggccctggagctgctgggcaacttcaaggacaaggagagaaccaccatcgcccagcaggtgaagggcaagaaggtgtggatcggcatcaagaagctgctgatgctgatcgagatgagcctgcagatggaccccgagtacagagtgagaaagttcctggccctgctgagagaggagggcgcctag

SEQ ID NO: 162499 - DNA, 2235 bp, Artificial Sequence
  derived and/or modified sequence
atggccggcagaagcatgcaggccgccagatgccccaccgacgagctgagcctgaccaactgcgccgtggtgaacgagaaggacttccagagcggccagcacgtgatcgtgagaaccagccccaaccacagatacaccttcaccctgaagacccaccccagcgtggtgcccggcagcatcgccttcagcctgccccagagaaagtgggccggcctgagcatcggccaggagatcgaggtgagcctgtacaccttcgacaaggccaagcagtgcatcggcaccatgaccatcgagatcgacttcctgcagaagaagagcatcgacagcaacccctacgacaccgacaagatggccgccgagttcatccagcagttcaacaaccaggccttcagcgtgggccagcagctggtgttcagcttcaacgagaagctgttcggcctgctggtgaaggacatcgaggccatggaccccagcatcctgaagggcgagcccgccaccggcaagagacagaagatcgaggtgggcctggtggtgggcaacagccaggtggccttcgagaaggccgagaacagcagcctgaacctgatcggcaaggccaagaccaaggagaacagacagagcatcatcaaccccgactggaacttcgagaagatgggcatcggcggcctggacaaggagttcagcgacatcttcagaagagccttcgccagcagagtgttcccccccgagatcgtggagcagatgggctgcaagcacgtgaagggcatcctgctgtacggcccccccggctgcggcaagaccctgctggccagacagatcggcaagatgctgaacgccagagagcccaaggtggtgaacggccccgagatcctgaacaagtacgtgggcgagagcgaggccaacatcagaaagctgttcgccgacgccgaggaggagcagagaagactgggcgccaacagcggcctgcacatcatcatcttcgacgagatcgacgccatctgcaagcagagaggcagcatggccggcagcaccggcgtgcacgacaccgtggtgaaccagctgctgagcaagatcgacggcgtggagcagctgaacaacatcctggtgatcggcatgaccaacagacccgacctgatcgacgaggccctgctgagacccggcagactggaggtgaagatggagatcggcctgcccgacgagaagggcagactgcagatcctgcacatccacaccgccagaatgagaggccaccagctgctgagcgccgacgtggacatcaaggagctggccgtggagaccaagaacttcagcggcgccgagctggagggcctggtgagagccgcccagagcaccgccatgaacagacacatcaaggccagcaccaaggtggaggtggacatggagaaggccgagagcctgcaggtgaccagaggcgacttcctggccagcctggagaacgacatcaagcccgccttcggcaccaaccaggaggactacgccagctacatcatgaacggcatcatcaagtggggcgaccccgtgaccagagtgctggacgacggcgagctgctggtgcagcagaccaagaacagcgacagaacccccctggtgagcgtgctgctggagggccccccccacagcggcaagaccgccctggccgccaagatcgccgaggagagcaacttccccttcatcaagatctgcagccccgacaagatgatcggcttcagcgagaccgccaagtgccaggccatgaagaagatcttcgacgacgcctacaagagccagctgagctgcgtggtggtggacgacatcgagagactgctggactacgtgcccatcggccccagattcagcaacctggtgctgcaggccctgctggtgctgctgaagaaggcccccccccagggcagaaagctgctgatcatcggcaccaccagcagaaaggacgtgctgcaggagatggagatgctgaacgccttcagcaccaccatccacgtgcccaacatcgccaccggcgagcagctgctggaggccctggagctgctgggcaacttcaaggacaaggagagaaccaccatcgcccagcaggtgaagggcaagaaggtgtggatcggcatcaagaagctgctgatgctgatcgagatgagcctgcagatggaccccgagtacagagtgagaaagttcctggccctgctgagagaggagggcgccagccccctggacttcgactag

SEQ ID NO: 162500 - protein, 170 aa, Artificial Sequence
  derived and/or modified sequence
MMAGMKIQLVCMLLLAFSSWSLCSDSEEEMKALEADFLTNMHTSKISKAHVPSWKMTLLNVCSLVNNLNSPAEETGEVHEEELVARRKLPTALDGFSLEAMLTIYQLHKICHSRAFQHWELIQEDILDTGNDKNGKEEVIKRKIPYILKRQLYENKPRRPYILKRDSYYY

SEQ ID NO: 162501 - protein, 115 aa, Artificial Sequence
  derived and/or modified sequence
MTLLNVCSLVNNLNSPAEETGEVHEEELVARRKLPTALDGFSLEAMLTIYQLHKICHSRAFQHWELIQEDILDTGNDKNGKEEVIKRKIPYILKRQLYENKPRRPYILKRDSYYY

SEQ ID NO: 162502 - protein, 95 aa, Artificial Sequence
  derived and/or modified sequence
MMAGMKIQLVCMLLLAFSSWSLCSDSEEEMKALEADFLTNMHTSKLIQEDILDTGNDKNGKEEVIKRKIPYILKRQLYENKPRRPYILKRDSYYY

SEQ ID NO: 162503 - DNA, 513 bp, Artificial Sequence
  derived and/or modified sequence
atgatggcgggtatgaagatccagctcgtgtgcatgctcttgctggccttctcttcttggtcgttgtgtagcgattcggaggaagagatgaaagccctggaggctgatttcttgaccaacatgcatactagcaagatatcaaaagcacatgtcccgagttggaagatgaccctccttaacgtgtgctccctggttaacaacctcaactctcctgctgaggaaaccggcgaggtccacgaggaagaattggtggctagacggaaattgcccactgcattggacggtttctccttggaggccatgttgacaatttaccagctgcataaaatttgccattctcgcgctttccagcattgggaattgatccaggaggatattttggacaccggtaacgacaagaatgggaaagaggaggtcatcaagcgaaaaatcccatacatacttaaacgccagctgtacgagaataagcctcgtcggccttatatactcaaacgggatagttactactattag

SEQ ID NO: 162504 - DNA, 348 bp, Artificial Sequence
  derived and/or modified sequence
atgaccctcctgaatgtgtgctccctggtcaataacctgaattcccctgccgaagagactggtgaagttcatgaggaggagcttgtggcacgaaggaagctgcctaccgccctggacggatttagtctggaagctatgctgacaatctaccaattgcataaaatttgtcactccagagcatttcagcactgggagttaatacaggaagatatacttgatacggggaacgacaagaacggtaaggaagaagttattaagcgcaagattccctacatccttaagcggcagttatacgaaaataagccgcgtagaccctacatcctcaagagagactcctactactactag

SEQ ID NO: 162505 - DNA, 288 bp, Artificial Sequence
  derived and/or modified sequence
atgatggccgggatgaagattcagctggtctgtatgcttctcctagcgttctcatcatggtctctttgttccgacagtgaggaagagatgaaagcactggaagcagactttctcacgaatatgcacacctccaagctaattcaggaggatattttagatacagggaatgacaaaaacggcaaggaagaagttatcaagcgtaaaattccgtacatcctgaagcgccagctgtacgagaacaagccgaggcggccttatattttgaagcgcgattcttactactattag

SEQ ID NO: 162506 - DNA, 513 bp, Artificial Sequence
  derived and/or modified sequence
atgatggccggcatgaagatccagctggtgtgcatgctgctgctggccttcagctcctggagcctgtgcagcgacagcgaggaggagatgaaggccctggaggccgacttcctgaccaacatgcacaccagcaagatcagcaaggcccacgtgcccagctggaagatgaccctgctgaatgtgtgcagcctggtgaacaacctgaacagccctgctgaggagactggagaggtgcatgaggaggagctggtggcccggaggaagctgcccacagccctggatggcttcagcctggaggccatgctgaccatctaccagctgcacaagatctgccacagccgggccttccagcactgggagctgatccaggaggacatcctggacacaggaaatgacaagaatggcaaggaggaggtgatcaagaggaagatcccctacatcctgaagaggcagctgtatgagaacaagccccggcggccctacatcctgaagagggacagctactactactag

SEQ ID NO: 162507 - DNA, 348 bp, Artificial Sequence
  derived and/or modified sequence
atgaccctgctgaatgtgtgcagcctggtgaacaacctgaacagccctgctgaggagaccggggaggtgcatgaggaggagctggtggcccggaggaagctgcccacagccctggatggcttcagcctggaggccatgctgaccatctaccagctgcacaagatctgccacagccgggccttccagcactgggagctgatccaggaggacatcctggacacaggaaatgacaagaatggcaaggaggaggtgatcaagaggaagatcccctacatcctgaagaggcagctgtatgagaacaagccccggcggccctacatcctgaagagggacagctactactactag

SEQ ID NO: 162508 - DNA, 288 bp, Artificial Sequence
  derived and/or modified sequence
atgatggccggcatgaagatccagctggtgtgcatgctgctgctggccttcagctcctggagcctgtgcagcgacagcgaggaggagatgaaggccctggaggccgacttcctgaccaacatgcacaccagcaagctgatccaggaggacatcctggacacaggaaatgacaagaatggcaaggaggaggtgatcaagaggaagatcccctacatcctgaagaggcagctgtatgagaacaagccccggcggccctacatcctgaagagggacagctactactactag

SEQ ID NO: 162509 - DNA, 513 bp, Artificial Sequence
  derived and/or modified sequence
atgatggccggcatgaagatccagctggtgtgcatgctgctgctggcattctcatcgtggtctctgtgcagcgactcagaggaggagatgaaggccctcgaggcagatttcctcaccaacatgcatactagcaagatcagtaaggcccatgtgccttcgtggaagatgacactcttgaacgtgtgctcgctcgtcaataatctgaactcccctgctgaagaaacaggggaagtgcacgaggaagagttagtagcgcggaggaagctgccaacagccctggatgggttttccctggaggccatgctaacgatataccaactgcataaaatctgtcactcccgcgcatttcagcattgggaactgattcaggaagatatactcgacaccgggaacgataagaatgggaaggaggaagttatcaagagaaaaatcccttatatcctgaagagacagttgtatgagaacaagccccggcgcccatacatcctaaaaagggattcttactactactag

SEQ ID NO: 162510 - DNA, 348 bp, Artificial Sequence
  derived and/or modified sequence
atgaccctgctgaacgtgtgcagcctggtgaacaacctgaacagcccggcggaggagaccggcgaggtgcatgaggaggaacttgtagccagacgaaaattgccaacagcccttgacggcttttcacttgaagctatgctgaccatctatcagttacacaaaatttgtcactctagggcatttcaacactgggagttgatccaggaggatatcctagacacagggaatgataagaatggcaaggaagaggtcatcaagcgcaagattccctatattctgaagcggcagctctacgaaaacaagccccggcggccctatatactcaaacgggactcttactattattag

SEQ ID NO: 162511 - DNA, 288 bp, Artificial Sequence
  derived and/or modified sequence
atgatggccggcatgaagatccagctggtgtgcatgctgctgctggcattttcctcatggtctctttgctcagacagcgaagaagagatgaaagctctcgaagctgattttctgacgaacatgcatacctcaaaactgatccaggaagacatcttggacaccgggaatgataaaaacggcaaagaagaggtgataaagagaaagattccctacatcttgaaaagacagttatacgagaataaacccagacgcccatatatcctgaagagggactcttattactattag

SEQ ID NO: 162512 - DNA, 1234 bp, Artificial Sequence
  derived and/or modified sequence
agttcactcactttcaaagccagctgaaggaaagaggaagtgctagagagagcccccttcagtgtgcttctgacttttacggacttggcttgttagaaggctgaaagatgatggcaggaatgaaaatccagcttgtatgcatgctactcctggctttcagctcctggagtctgtgctcagattcagaagaggaaatgaaagcattagaagcagatttcttgaccaatatgcatacatcaaagattagtaaagcacatgttccctcttggaagatgactctgctaaatgtttgcagtcttgtaaataatttgaacagcccagctgaggaaacaggagaagttcatgaagaggagcttgttgcaagaaggaaacttcctactgctttagatggctttagcttggaagcaatgttgacaatataccagctccacaaaatctgtcacagcagggcttttcaacactgggagttaatccaggaagatattcttgatactggaaatgacaaaaatggaaaggaagaagtcataaagagaaaaattccttatattctgaaacggcagctgtatgagaataaacccagaagaccctacatactcaaaagagattcttactattactgagagaataaatcatttatttacatgtgattgtgattcatcatcccttaattaaatatcaaattatatttgtgtgaaaatgtgacaaacacacttatctgtctcttctacaattgtggtttattgaatgtgatttttctgcactaatataaattagactaagtgttttcaaataaatctaaatcttcagcatgatgtgttgtgtataattggagtagatattaattaagtcacctgtataatgttttgtaattttgcaaaacatatcttgagttgtttaaacagtcaaaatgtttgatattttataccagcttatgagctcaaagtactacagcaaagcctagcctgcatatcattcacccaaaacaaagtaatagcgcctcttttattattttgactgaatgttttatggaattgaaagaaacatacgttcttttcaagacttcctcatgaatctctcaattataggaaaagttattgtgataaaataggaacagctgaaagattgattaatgaactattgttaattcttcctattttaatgaatgacattgaactgaattttttgtctgttaaatgaacttgatagctaataaaaagacaactagccatcaaaa

SEQ ID NO: 162513 - DNA, 1118 bp, Artificial Sequence
  derived and/or modified sequence
tttttcatctgtgatatatatatcatttatatatttctgccatcattttaatttccttgctttcttactttgctctgtgtgtacacacataagtgcatgtatatgtgaatataactattgcattttattaaacagaagttatgagatattggcagtatacaactttgtgaactgatgttactaaataaataacactatatttattagactggagtagcaattagaccctaaatgtgatggtttagcacactaggaattcatttcttgctcatgtaacacaagttttaattgcaggggtttttttaatatatttcagattagtaaagcacatgttccctcttggaagatgactctgctaaatgtttgcagtcttgtaaataatttgaacagcccagctgaggaaacaggagaagttcatgaagaggagcttgttgcaagaaggaaacttcctactgctttagatggctttagcttggaagcaatgttgacaatataccagctccacaaaatctgtcacagcagggcttttcaacactgggagttaatccaggaagatattcttgatactggaaatgacaaaaatggaaaggaagaagtcataaagagaaaaattccttatattctgaaacggcagctgtatgagaataaacccagaagaccctacatactcaaaagagattcttactattactgagagaataaatcatttatttacatgtgattgtgattcatcatcccttaattaaatatcaaattatatttgtgtgaaaatgtgacaaacacacttatctgtctcttctacaattgtggtttattgaatgtgatttttctgcactaatataaattagactaagtgttttcaaataaatctaaatcttcagcatgatgtgttgtgtataattggagtagatattaattaagtcacctgtataatgttttgtaattttgcaaaacatatcttgagttgtttaaacagtcaaaatgtttgatattttataccagcttatgagctcaaagtactacagcaaagcctagcctgcatatcattcacccaaaacaaagtaatagcgcctcttttattattttgactgaatgttttatggaattgaaagaaacat

SEQ ID NO: 162514 - DNA, 801 bp, Artificial Sequence
  derived and/or modified sequence
atagttcactcactttcaaagccagctgaaggaaagaggaagtgctagagagagcccccttcagtgtgcttctgacttttacggacttggcttgttagaaggctgaaagatgatggcaggaatgaaaatccagcttgtatgcatgctactcctggctttcagctcctggagtctgtgctcagattcagaagaggaaatgaaagcattagaagcagatttcttgaccaatatgcatacatcaaagttaatccaggaagatattcttgatactggaaatgacaaaaatggaaaggaagaagtcataaagagaaaaattccttatattctgaaacggcagctgtatgagaataaacccagaagaccctacatactcaaaagagattcttactattactgagagaataaatcatttatttacatgtgattgtgattcatcatcccttaattaaatatcaaattatatttgtgtgaaaatgtgacaaacacacttatctgtctcttctacaattgtggtttattgaatgtgatttttctgcactaatataaattagactaagtgttttcaaataaatctaaatcttcagcatgatgtgttgtgtataattggagtagatattaattaagtcacctgtataatgttttgtaattttgcaaaacatatcttgagttgtttaaacagtcaaaatgtttgatattttataccagcttatgagctcaaagtactacagcaaagcctagcctgcatatcattcacccaaaacaaagtaatagcgcctcttttattattttgactgaatgttt

SEQ ID NO: 162515 - DNA, 513 bp, Artificial Sequence
  derived and/or modified sequence
atgatggcaggtatgaagatccagttggtgtgcatgctgctcttagccttcagcagctggtccttatgctcagattcggaggaagaaatgaaggctctcgaagcggacttcctgacaaatatgcacacatcaaaaatctcaaaggctcatgttcccagctggaagatgaccctcttaaatgtgtgctccttggtaaacaatttgaactcaccggcagaagagactggagaggttcacgaggaggaactcgtggcaaggcgtaagctgcctaccgcgttagacggcttctccctggaggccatgctgacgatttaccaactgcataagatttgccacagtcgagccttccagcattgggagctgatccaggaggatattcttgacacgggaaacgacaagaatggaaaagaggaggtaataaagcgcaaaatcccttacatcctaaagcggcaactctacgagaacaagcctaggcggccatatatcctgaagcgagacagctattattattag

SEQ ID NO: 162516 - DNA, 348 bp, Artificial Sequence
  derived and/or modified sequence
atgactctgcttaacgtgtgcagccttgtaaacaacctgaattcccccgcagaggaaacaggcgaggtgcacgaggaagagttggtagcaagacggaaactgcccaccgctctcgacggcttctctctcgaggccatgctaaccatttaccagttacataagatttgccattcacgtgctttccagcattgggaattgatccaggaagatatcctcgacaccggaaacgacaaaaacggaaaagaggaagtgattaagagaaagataccctacatcctgaagagacagctatacgaaaataagccacgacgcccttatattctgaaacgcgatagctactactactag

SEQ ID NO: 162517 - DNA, 288 bp, Artificial Sequence
  derived and/or modified sequence
atgatggcaggaatgaagattcagcttgtctgtatgctgttattagcgttctcttcctggagcctctgcagtgacagtgaagaagagatgaaagcccttgaggccgatttcctgaccaacatgcacacgagtaagcttattcaagaagatatcctcgatacaggtaatgacaaaaacggcaaggaggaggtgataaaaaggaagattccctacatcctgaaaagacagctctacgaaaacaaaccaagacggccttatatcctgaaaagagacagctattattactag

SEQ ID NO: 162518 - DNA, 513 bp, Artificial Sequence
  derived and/or modified sequence
atgatggctggaatgaaaattcagctggtatgcatgcttctacttgccttctcctcttggtctctgtgctcagattctgaagaagagatgaaagccctcgaggccgattttctaacaaatatgcacacaagtaagatctctaaagcccacgtgccgagttggaagatgactcttctcaatgtatgcagcctggttaataatctaaacagccccgctgaggagaccggcgaggttcacgaggaagaactggtcgctcgaagaaagttgcctactgctcttgacggctttagtctcgaggcgatgctgactatttaccagttacataagatttgtcatagccgagcttttcagcattgggaacttatccaggaggacatcttagatactggcaatgataaaaacggcaaggaagaggtgataaagcggaagataccctatattctgaaacgccaattatacgagaataaacctcgaagaccttatattctgaaaagggactcctattattattag

SEQ ID NO: 162519 - DNA, 348 bp, Artificial Sequence
  derived and/or modified sequence
atgacactcctaaatgtgtgttctctagttaataatctgaattcacctgccgaagagaccggggaggttcacgaggaggaactggtggcacgacgcaagctgccaacagcccttgatgggttctccctcgaagcaatgttgacaatttaccaattgcataagatttgccactccagagcgtttcaacattgggaattaatacaagaggatattcttgatactggaaatgacaagaacggtaaagaggaagtcataaagagaaaaattccatacatcttaaaaagacagttatacgaaaataaacctcgcaggccctatattctcaagagagactcttactattactag

SEQ ID NO: 162520 - DNA, 288 bp, Artificial Sequence
  derived and/or modified sequence
atgatggctggaatgaagatccagcttgtgtgtatgctcctgttagcattctcatcttggtctttatgcagtgacagcgaggaggagatgaaggcactcgaagctgactttctgacaaacatgcatacttccaaactcattcaggaagatatccttgataccgggaacgataaaaacggtaaagaggaggtaatcaagcgaaagataccttatatactaaagagacagctatacgaaaacaaaccccgccgaccatacattctaaaaagagattcttactactattag

SEQ ID NO: 162521 - DNA, 513 bp, Artificial Sequence
  derived and/or modified sequence
atgatggcagggatgaaaattcaactggtgtgcatgctattactggctttctcatcttggagtctctgtagcgattcagaagaggaaatgaaggcgttagaggccgatttcctgaccaacatgcatacatctaagatttccaaagcccatgtccccagctggaagatgaccctccttaacgtctgctctctggtcaataatctcaattcaccagctgaagaaactggcgaggtccatgaagaggaactggtcgcaagacgaaaattgcccaccgccttggacggattcagcctcgaggctatgctcacaatttatcaactgcataagatctgtcactcacgagcattccaacattgggagctgattcaggaagacattttagacaccggcaatgacaagaacgggaaggaggaggtaattaagagaaaaattccatacatactaaagagacagttatatgaaaacaaaccaaggaggccatacattttaaagagagactcctattattattag

SEQ ID NO: 162522 - DNA, 348 bp, Artificial Sequence
  derived and/or modified sequence
atgacgctgttaaatgtgtgctctctggtgaacaatctgaatagcccggctgaagaaacaggtgaagtacacgaggaggagctggtggcacggcgaaagcttccaactgctctcgatggcttttccctcgaggctatgctgactatctatcaactacataaaatatgccactcaagagcgttccagcactgggaactgattcaagaggatatcctggatactggcaacgataagaatggaaaggaagaggtgattaaacggaaaataccctacatcttaaaaagacaactgtacgagaacaagcccagacgcccctatatactgaaaagagactcatactactactag

SEQ ID NO: 162523 - DNA, 513 bp, Artificial Sequence
  derived and/or modified sequence
atgatggccggcatgaagatccagctggtgtgcatgctgctgctggccttcagcagctggagcctgtgcagcgacagcgaggaggagatgaaggccctggaggccgacttcctgaccaacatgcacaccagcaagatcagcaaggcccacgtgcccagctggaagatgaccctgctgaacgtgtgcagcctggtgaacaacctgaacagccccgccgaggagaccggcgaggtgcacgaggaggagctggtggccagaagaaagctgcccaccgccctggacggcttcagcctggaggccatgctgaccatctaccagctgcacaagatctgccacagcagagccttccagcactgggagctgatccaggaggacatcctggacaccggcaacgacaagaacggcaaggaggaggtgatcaagagaaagatcccctacatcctgaagagacagctgtacgagaacaagcccagaagaccctacatcctgaagagagacagctactactactag

SEQ ID NO: 162524 - DNA, 348 bp, Artificial Sequence
  derived and/or modified sequence
atgaccctgctgaacgtgtgcagcctggtgaacaacctgaacagccccgccgaggagaccggcgaggtgcacgaggaggagctggtggccagaagaaagctgcccaccgccctggacggcttcagcctggaggccatgctgaccatctaccagctgcacaagatctgccacagcagagccttccagcactgggagctgatccaggaggacatcctggacaccggcaacgacaagaacggcaaggaggaggtgatcaagagaaagatcccctacatcctgaagagacagctgtacgagaacaagcccagaagaccctacatcctgaagagagacagctactactactag

SEQ ID NO: 162525 - DNA, 288 bp, Artificial Sequence
  derived and/or modified sequence
atgatggccggcatgaagatccagctggtgtgcatgctgctgctggccttcagcagctggagcctgtgcagcgacagcgaggaggagatgaaggccctggaggccgacttcctgaccaacatgcacaccagcaagctgatccaggaggacatcctggacaccggcaacgacaagaacggcaaggaggaggtgatcaagagaaagatcccctacatcctgaagagacagctgtacgagaacaagcccagaagaccctacatcctgaagagagacagctactactactag

SEQ ID NO: 162526 - RNA, 288 nt, Artificial Sequence
  derived and/or modified sequence
augauggcuggaaugaagauccagcuuguguguaugcuccuguuagcauucucaucuuggucuuuaugcagugacagcgaggaggagaugaaggcacucgaagcugacuuucugacaaacaugcauacuuccaaacucauucaggaagauauccuugauaccgggaacgauaaaaacgguaaagaggagguaaucaagcgaaagauaccuuauauacuaaagagacagcuauacgaaaacaaaccccgccgaccauacauucuaaaaagagauucuuacuacuauuag

SEQ ID NO: 162527 - protein, 461 aa, Artificial Sequence
  derived and/or modified sequence
MPPSGPRGTLLLLPLLLLLLLRAVLAVPLERGAPNKEETPATESPDTGLYYHRYLQEVIDVLETDGHFREKLQAANAEDIKSGKLSRELDFVSHHVRTKLDELKRQEVSRLRMLLKAKMDAEQDPNVQVDHLNLLKQFEHLDPQNQHTFEARDLELLIQTATRDLAQYDAAHHEEFKRYEMLKEHERRRYLESLGEEQRKEAERKLEEQQRRHREHPKVNVPGSQAQLKEVWEELDGLDPNRFNPKTFFILHDINSDGVLDEQELEALFTKELEKVYDPKNEEDDMREMEEERLRMREHVMKNVDTNQDRLVTLEEFLASTQRKEFGDTGEGWETVEMHPAYTEEELRRFEEELAAREAELNAKAQRLSQETEALGRSQGRLEAQKRELQQAVLHMEQRKQQQQQQQGHKAPAAHPEGQLKFHPDTDDVPVPAPAGDQKEVDTSEKKLLERLPEVEVPQHL

SEQ ID NO: 162528 - protein, 124 aa, Artificial Sequence
  derived and/or modified sequence
MPPSGPRGTLLLLPLLLLLLLRAVLAVPLERGAPNKEETPATESPDTGLYYHRYLQEVIDVLETDGHFREKLQAANAEDIKSGKLSRELDFVSHHVRTKLDELKRQEVSRLRMLLKAKMDAEQD

SEQ ID NO: 162529 - protein, 111 aa, Artificial Sequence
  derived and/or modified sequence
MPPSGPRGTLLLLPLLLLLLLRAVLAVPLERGAPNKEETPATESPDTGLYYHRYLQEVIDVLETDGHFREKLQAANAEDIKSGKLSRELDFVSHHVRTKLDELKRQEVSRL

SEQ ID NO: 162530 - DNA, 1386 bp, Artificial Sequence
  derived and/or modified sequence
atgccaccttcagggccccgtggaacccttctcttactgcctctcctcttgctcctgctgctccgggctgtcctggcagtcccactggagagaggggcccctaataaagaggaaacaccagcaacggaatctcccgatactggactgtattaccacagatatttgcaggaagtaatcgacgtgctggagaccgacggccacttcagggagaagctgcaggctgccaacgcggaggacattaaatccggcaagctgagtagagagctggacttcgtctcccatcatgtgcggacgaagctggacgagttgaaacggcaggaggtgagcaggctccgcatgctactgaaagccaaaatggatgcggaacaggatcccaatgtgcaggtagaccacctcaacctcctgaaacaattcgaacatctcgatcctcagaaccagcacacctttgaagcgcgcgacctggaactcctcattcaaacggccacacgcgatctagcccagtatgacgccgcccatcatgaggagtttaagagatatgaaatgcttaaagagcatgaacggaggaggtacctggagtcccttggtgaggaacagaggaaggaagccgaacggaagctggaggaacaacagcgtcgccaccgtgaacatcccaaggtaaatgtgccaggcagccaggcccagctgaaagaagtgtgggaagagctcgatggactcgacccaaacagatttaatccaaagactttctttatcctacacgatataaattccgatggcgtcctggacgaacaggagctggaggctctattcacaaaagagttagagaaggtgtatgatcctaaaaacgaggaagacgatatgagagagatggaggaggaacgactgcgtatgcgagagcatgttatgaaaaacgttgatactaatcaggacaggctcgtgacactcgaggagtttctcgcctccacgcaacgcaaagaatttggggatacaggcgaagggtgggaaactgtggagatgcaccctgcctataccgaggaagagttgcgccggtttgaggaggagctggccgcgagggaagctgaactgaacgctaaggcacagcgactctcacaagaaaccgaggctcttggaagatcccaggggagactggaggcgcagaaaagggaactccagcaggctgtcctccatatggaacaaaggaaacagcagcagcaacagcagcagggccacaaggctcccgccgcccaccctgaaggacagcttaaattccaccctgacaccgatgatgtgccagtgccagcaccggccggcgatcagaaagaagtggacaccagcgagaagaagctgttggagaggctgcccgaggtggaggtgccacagcacttgtag

SEQ ID NO: 162531 - DNA, 1386 bp, Artificial Sequence
  derived and/or modified sequence
atgcctcccagtgggccacgcggaaccctcctccttctcccgctgctgcttcttctgctcctgcgtgcagtccttgctgttcctctggaaaggggcgcgcccaacaaggaggagacacccgccacagagagtccggatactggcctgtattaccaccgctacttgcaagaagtcatagatgtgctagaaactgatggtcactttcgtgagaaactccaggccgcaaacgccgaggacataaagtctgggaaactgagtcgcgagctcgactttgtgagccaccatgtgcgtacaaaactcgatgaacttaagagacaggaagttagcaggctaaggatgctgctgaaggcaaaaatggacgcagagcaagaccccaacgtacaggttgaccatctgaacctcctcaagcagttcgagcacctagaccctcaaaaccagcatacatttgaggcacgtgatctggaacttcttatacaaacagctactcgtgatctggcccaatacgacgccgctcaccacgaggagttcaaaaggtatgagatgctgaaggagcatgaacgcagaagatatttggaatctctgggggaagagcagagaaaagaggccgagcgtaaactggaggaacagcagaggagacaccgagagcaccctaaagtcaacgttcccgggtcccaagcccagctcaaagaagtttgggaggaactggatggcctggatccgaatcggttcaatccaaagacattctttattttgcacgatatcaactccgacggtgtactggacgagcaggagctagaagccctgttcaccaaagagttagaaaaagtttatgatcccaagaatgaagaagatgatatgcgggagatggaagaggaacggctcagaatgagagagcacgttatgaagaatgtggatactaaccaagaccggttagttactctagaagaatttctggcctcgactcaacggaaggaattcggcgacaccggggaaggatgggagaccgtcgagatgcatcccgcctataccgaggaggagctccgaagatttgaggaggagcttgcagcgcgagaggccgagctgaatgccaaggcgcagcgcttgtctcaggagacagaggcactcgggcgctctcaggggcggctggaggctcagaagcgcgaactgcagcaagcagtcctgcacatggagcagcgaaagcagcagcagcagcagcaacaaggacacaaggcccccgctgcccatcccgaggggcagctgaagtttcatcctgacaccgatgacgtgcccgtgcctgcccccgcaggtgaccaaaaggaggtggacacgtcagagaagaagctccttgagcgcttgcctgaagttgaagttccccagcatctatag

SEQ ID NO: 162532 - DNA, 1386 bp, Artificial Sequence
  derived and/or modified sequence
atgccaccctccgggccgagaggcactttgctgctgctcccactcttgttactgctcctcttacgggcggttctcgcagtgccactggaacgaggggcccctaataaagaggagaccccggccaccgagtcacccgacaccggactgtactatcatcgctacttacaagaggttattgacgtgctggaaactgacggacattttagagagaagctgcaagcagcaaatgcagaagatatcaagtctgggaagctcagtcgtgagctagacttcgtttcacatcacgtccggacaaaactggacgaattaaagcgtcaagaagtgagtagattgcgcatgctcctgaaggcgaagatggacgctgagcaggatccaaatgtgcaggtcgaccacctgaacctgctcaaacaattcgaacaccttgaccctcaaaaccaacacacttttgaggctcgggatcttgaactccttatacagacagcaacacgcgacctggcccagtacgacgctgcacatcacgaggagttcaagcggtacgagatgctgaaagagcatgaacggcgacggtacttggaaagtctcggtgaagagcagcgcaaagaggcagagcgcaagttagaggaacaacaacgaaggcacagggagcatcccaaagtgaatgttcctgggagccaagctcaactgaaagaggtgtgggaggagctcgacggtttggaccctaatagattcaatccaaagactttcttcatactgcatgacatcaattctgacggggtgctagatgagcaggagctggaggccctcttcactaaagagttggaaaaggtttacgatcctaagaacgaggaggacgacatgagggagatggaggaggaaagactgcgcatgagagagcatgtgatgaagaacgtcgacacaaaccaggaccgcttggtgactttggaagagtttctcgcaagtacacaacgtaaggaattcggggatactggcgaagggtgggagactgttgagatgcatcccgcctacacagaagaggagctgagacgtttcgaggaggaactcgcagctcgtgaggcagaattgaacgctaaagcccagagactctcccaagagactgaagctctgggtcggagccaggggcgacttgaggcacaaaaaagagaactccagcaggccgtcttacacatggaacagcggaaacagcagcagcagcaacagcagggccataaagcgcctgcggcccatccggagggacagcttaagtttcatcccgatacagatgatgttccggtgcctgcccccgccggggatcagaaagaggttgacacatccgagaagaagctccttgaacgtctccctgaagttgaagtcccacagcatctctag

SEQ ID NO: 162533 - DNA, 375 bp, Artificial Sequence
  derived and/or modified sequence
atgcccccgtctggccctagaggtactctcctgcttctgccactactgcttctgctgttacttcgggccgtcctggccgtacccctggaaaggggtgctcccaacaaggaagaaacacctgcaaccgagtcacctgatacaggactttattaccatcgctacctgcaggaggttatcgacgtgctcgagaccgacgggcactttagagaaaaacttcaggccgctaacgccgaggatataaaatctggcaagctctctcgagaattagatttcgtttcccaccatgttcggaccaaattggatgaattgaaacgccaggaggtctccaggctgagaatgctgctgaaggcaaaaatggacgcggagcaggactag

SEQ ID NO: 162534 - DNA, 336 bp, Artificial Sequence
  derived and/or modified sequence
atgcctccatcaggccctcggggcacactgttgttactccccctgctgcttctcctacttttgcgagccgttctggccgtgcctctagaacggggagccccgaataaagaggaaaccccggccaccgagtcccctgacacaggcctgtattatcaccgctacctgcaggaggtaatcgacgttctcgagacagatggccacttccgcgaaaagctgcaggccgccaacgcagaagatattaagtcaggaaagctgtcacgcgagttagatttcgtttcgcaccatgtacggaccaagctcgatgaactgaaaaggcaagaagtgtcaaggctgtag

SEQ ID NO: 162535 - DNA, 1386 bp, Artificial Sequence
  derived and/or modified sequence
atgccacccagcggcccccggggcaccctgctgctgctgcccctgctgctgctgctgctgctgcgggctgtgctggccgtgcccctggagcggggggcccccaacaaggaggagaccccagccacagagagcccagacaccggcctgtactaccaccgctacctgcaggaggtgattgatgtgctggagacagatggccacttccgggagaagctgcaggccgccaatgctgaggacatcaagagcggcaagctgagccgggagctggactttgtgagccaccacgtgaggaccaagctggatgagctgaagaggcaggaggtgtcccggctgaggatgctgctgaaggccaagatggatgctgagcaggaccccaacgtgcaggtggaccacctgaacctgctgaagcagtttgagcacctggacccccagaaccagcacacctttgaggcccgggacctggagctgctgatccagacagccacccgggacctggcccagtatgatgctgcccaccacgaggagttcaagagatatgagatgctgaaggagcatgaaagaagacgctacctggagagcctgggggaggagcagaggaaggaggccgagaggaagctggaggagcagcagaggaggcaccgggagcaccccaaggtgaatgtgcccggcagccaggcccagctgaaggaggtgtgggaggagctggatggcctggaccccaaccgcttcaaccccaagaccttcttcatcctgcatgacatcaacagtgatggagtgctggatgagcaggagctggaggccctcttcaccaaggagctggagaaggtgtatgaccccaagaatgaagaagatgacatgagggagatggaggaggagcggctgaggatgagggagcacgtgatgaagaatgtggacaccaaccaggaccggctggtgaccctggaggagttcctggccagcacccagaggaaggagtttggagacacaggagagggctgggagaccgtggagatgcacccagcctacacagaggaggagctgcggagatttgaggaggagctggccgcccgggaggccgagctgaatgccaaggcccagaggctgagccaggagacagaggccctgggccgcagccagggccgcctggaggcccagaagcgggagctgcagcaggccgtgctgcacatggagcagaggaagcagcagcagcagcagcagcagggccacaaggccccagctgcccaccctgagggccagctgaagttccacccagacacagatgatgtgcctgtgcctgccccagctggggaccagaaggaggtggacaccagcgagaagaagctgctggagcggctgcctgaggtggaggtgccccagcacctgtag

SEQ ID NO: 162536 - DNA, 375 bp, Artificial Sequence
  derived and/or modified sequence
atgccacccagcggcccccggggcaccctgctgctgctgcccctgctgctgctgctgctgctgcgggctgtgctggccgtgcccctggagcggggggcccccaacaaggaggagaccccagccacagagagcccagacaccggcctgtactaccaccgctacctgcaggaggtgattgatgtgctggagacagatggccacttccgggagaagctgcaggccgccaatgctgaggacatcaagagcggcaagctgagccgggagctggactttgtgagccaccacgtgaggaccaagctggatgagctgaagaggcaggaggtgtcccggctgaggatgctgctgaaggccaagatggatgctgagcaggactag

SEQ ID NO: 162537 - DNA, 336 bp, Artificial Sequence
  derived and/or modified sequence
atgccacccagcggcccccggggcaccctgctgctgctgcccctgctgctgctgctgctgctgcgggctgtgctggccgtgcccctggagcggggggcccccaacaaggaggagaccccagccacagagagcccagacaccggcctgtactaccaccgctacctgcaggaggtgattgatgtgctggagacagatggccacttccgggagaagctgcaggccgccaatgctgaggacatcaagagcggcaagctgagccgggagctggactttgtgagccaccacgtgaggaccaagctggatgagctgaagaggcaggaggtgtcccggctgtag

SEQ ID NO: 162538 - DNA, 1386 bp, Artificial Sequence
  derived and/or modified sequence
atgccccccagcggcccccggggcaccctgctgctgctgcccctgctgctcctcctcctgctgcgggccgtcctcgccgtaccactggagcggggtgcaccaaataaggaagagactccagcaactgagtcccctgacacaggtttatattatcacagatacttgcaagaggttattgatgtcttagaaactgacggccatttccgagagaagttgcaggctgcgaacgccgaggatataaaaagtggcaaactgtcaagggagctcgattttgtttctcatcatgttagaacaaagctggatgaactcaagagacaggaagtgtccagactccgtatgttgctcaaggcgaaaatggatgcagagcaagatcccaacgttcaagtggaccatctgaatcttcttaagcagttcgagcatctggaccctcaaaaccagcacacctttgaagctagagatttggagctcctaatccagactgcgacacgtgatttggcccagtacgacgccgcccatcatgaggaatttaagcgttacgaaatgctcaaggagcatgaaaggaggcgctacctcgagagcctaggcgaggagcagcggaaagaagcggaaagaaagttagaggagcagcagcggagacatcgtgagcatcccaaagtcaatgtgcctggcagccaggctcagctgaaggaggtttgggaagaactggatggacttgatcccaataggtttaaccccaagacattttttattctgcacgatattaattccgacggtgttctggatgaacaggagctagaggccctattcacaaaagagctggaaaaggtgtacgaccccaaaaatgaagaagacgatatgcgcgaaatggaggaggaacggctgaggatgagagagcatgtgatgaaaaatgtagacacaaatcaggataggctggtgaccctggaggaattcctagcctctacccagcggaaggagttcggggatacaggagaaggatgggaaacggtggagatgcatccagcgtacacagaggaagagctgcgcaggttcgaagaggagctcgccgctcgcgaggcggagctaaacgctaaagcccagcgactgtcacaagagaccgaagcacttggccgatcacaaggtagactggaggcccaaaagcgggaactccaacaggcagttctccacatggagcagcgtaaacaacaacagcagcaacaacaaggacacaaagcacccgccgctcatcctgagggacagcttaagtttcatccggacacggacgatgtccctgtgcccgcgcctgccggggatcagaaggaagtcgatacgagcgagaaaaagcttctggagcgtcttccggaggtcgaggttcctcagcatctctag

SEQ ID NO: 162539 - DNA, 1386 bp, Artificial Sequence
  derived and/or modified sequence
atgccccccagcggcccccggggcaccctgctgctgctgcccctgctgctgttgctgctgctgagggcagtgttagccgttcccctagagaggggggcccctaacaaggaagaaaccccagctacggagtcacccgatacgggtttgtactaccatagatacctacaggaggtcattgatgtgctggagactgatggccactttagagagaagctacaggccgcaaacgcagaggatatcaagtctggaaaattgtccagagagctggatttcgtgtcccaccatgtgagaacgaagctcgacgaattaaaacggcaagaagtaagtaggctgagaatgctgcttaaggcaaagatggatgctgagcaggacccaaacgttcaagtggaccatctgaacttacttaaacagttcgagcacttagatcctcaaaatcagcacaccttcgaagctagagacctggaattgcttatacagacagcaactcgcgatctggcccaatacgatgctgcccatcatgaggagtttaagaggtacgaaatgctgaaagaacacgagagaagacgttaccttgagtccctgggtgaagagcagcgaaaagaggccgagcgcaagttggaagagcaacagaggcgtcatcgtgaacatccgaaggtgaacgtgcccggatcacaggcacagctcaaggaggtctgggaggagctcgatggcctggaccctaatcggtttaacccaaagacattctttatcttgcacgatattaactccgacggggtgctggatgaacaggaactcgaggccttatttaccaaggaactcgagaaagtgtacgaccctaaaaacgaggaagacgatatgagggaaatggaggaagaaagactgagaatgcgcgaacatgtaatgaaaaacgtggataccaaccaggatcggctggtaaccctggaagagttccttgcaagtactcagagaaaggaatttggcgatactggcgagggctgggaaacggtggaaatgcatcctgcatataccgaagaggagcttcggagatttgaggaggaattagctgctagagaagcagaacttaatgccaaagcccagagactctcacaggaaaccgaggcccttggtaggagccaaggccgtttggaagcgcaaaaaagggaactgcaacaagctgttctgcatatggagcagagaaagcaacagcagcagcaacaacaggggcataaagcccctgcagcccatcccgaaggtcagcttaaattccatcccgacaccgatgatgttcccgtgccggctccagctggggatcagaaggaggtggacacctccgaaaaaaaactgctggagcgcctgcccgaggtagaagttccgcaacatctgtag

SEQ ID NO: 162540 - DNA, 1386 bp, Artificial Sequence
  derived and/or modified sequence
atgccccccagcggcccccggggcaccctgctgctgctgcccctgttgctcctgctgcttctgcgcgctgtactggccgtccccctggagcgtggcgccccaaacaaggaggagacaccagccactgagagtcccgacactggtttgtactatcatagatacctgcaagaagtgatcgatgttctggagacggacggccattttagagaaaaactccaggccgctaatgccgaagatatcaaaagcggcaagctgtccagagaactggatttcgtctcacatcacgtgaggacgaagctggacgagctgaaacgacaggaagtttctcggctgcgcatgcttttgaaagcaaaaatggatgccgagcaagatcctaacgttcaggtggatcacctgaatctgttaaagcagttcgagcacctagatccccagaaccagcataccttcgaagcacgggacctcgagttgctgattcagaccgcaacgagggatttagcccagtacgacgcggcccatcatgaagagttcaaacgctatgagatgttgaaggaacacgaacgcaggagatacctcgagagcctaggtgaggagcaaagaaaggaggccgagaggaaactggaggagcaacagcgtcgacaccgagaacaccccaaggtcaatgtcccgggctcccaggcccaactcaaagaagtatgggaggagcttgacggcttagaccccaaccggtttaaccccaaaaccttctttattctgcacgacattaattccgacggagttctggatgagcaggaactggaagctctgttcaccaaggagttggagaaagtctacgaccccaagaatgaagaagacgatatgagggaaatggaggaagaaagactgcggatgcgcgaacacgtcatgaagaatgtagatactaaccaagatagactggtcactctggaggaattcctggctagtacgcaaaggaaggaatttggggacaccggcgagggatgggaaaccgtcgagatgcaccctgcttacacagaagaagaactgaggaggttcgaagaggaattggccgcccgcgaggctgaattgaacgcaaaagcccagcggctctcacaggaaaccgaggctctcgggcggagtcaggggaggctagaggcgcagaagagagagctgcagcaggcagttctgcacatggaacagaggaaacaacagcagcagcagcaacaaggccataaggctcccgcagcccacccagagggccagctcaagtttcaccctgacacggacgatgtgccagttcccgctcccgctggggatcagaaagaggtagatacgtctgaaaagaagcttctggaaagactgcccgaagtggaggtgcctcaacacctgtag

SEQ ID NO: 162541 - DNA, 375 bp, Artificial Sequence
  derived and/or modified sequence
atgccccccagcggcccccggggcaccctgctgctgctgcccctgctacttctgctgctgctaagagcagtgctcgcggtacctctggaaaggggagcccctaacaaggaagaaacacctgctaccgagagtcccgataccggactgtactaccatcggtatttgcaagaagtgatcgacgtgctggaaactgacggccactttagagagaaactgcaagctgcgaatgccgaggacatcaagagcggtaaactgagtagggagctggacttcgtgagtcaccatgtccggacgaaacttgatgagctgaagcgtcaggaggtttcccgcctgcggatgctgcttaaggctaaaatggacgctgagcaagattag

SEQ ID NO: 162542 - DNA, 336 bp, Artificial Sequence
  derived and/or modified sequence
atgccccccagcggcccccggggcaccctgctgctgctgcccctgctcctcctgctgctgcttcgtgccgtgctggctgttccgctggaaaggggcgcaccaaacaaagaggaaactcccgctacagagtccccggataccgggctatactaccaccgctatctgcaagaagtcatagatgtgctggagactgatggacatttccgagagaagctccaagccgccaatgccgaagacatcaagtcaggcaaactgagcagagaattggattttgtgtcccaccacgttcgcaccaagctggatgagctgaagcgacaggaagtgagccgtctgtag

SEQ ID NO: 162543 - DNA, 2240 bp, Artificial Sequence
  derived and/or modified sequence
agaccacactgccatgcctccctctgggccccgaggaaccctccttctgttgccgctgctgctgctgctcctgcttcgcgccgtgctggctgtccccctggagcgaggggcgcccaacaaggaggagacccctgcgactgagagtcccgacacaggcctgtactaccaccggtacctccaggaggtcatcgatgtactggagacggatgggcatttccgagagaagctgcaggctgccaatgcggaggacatcaagagcgggaagctgagccgagagctggactttgtcagccaccacgtccgcaccaagctggatgagctcaagcgacaggaggtgtcacggctgcggatgctgctcaaggccaagatggacgccgagcaggatcccaatgtacaggtggatcatctgaatctcctgaaacagtttgaacacctggaccctcagaaccagcatacattcgaggcccgcgacctggagctgctgatccagacggccacccgggaccttgcccagtacgacgcagcccatcatgaagagttcaagcgctacgagatgcttaaggaacacgagagacggcgttatctggagtcactgggagaggagcagagaaaggaggcggagaggaagctggaagagcaacagcgccggcaccgcgagcaccctaaagtcaacgtgcctggcagccaagcccagttgaaggaggtgtgggaggagctggatggactggaccccaacaggtttaaccccaagaccttcttcatactgcatgatatcaacagtgatggtgtcctggatgagcaggagctggaggcactcttcaccaaggagctggagaaagtgtacgacccaaagaatgaggaggacgacatgcgggagatggaggaggagcgactgcgcatgcgggagcatgtgatgaagaatgtggacaccaaccaggaccgcctcgtgaccctggaggagttcctcgcatccactcagaggaaggagtttggggacaccggggagggctgggagacagtggagatgcaccctgcctacaccgaggaagagctgaggcgctttgaagaggagctggctgcccgggaggcagagctgaatgccaaggcccagcgcctcagccaggagacagaggctctagggcggtcccagggccgcctggaggcccagaagagagagctgcagcaggctgtgctgcacatggagcagcggaagcagcagcagcagcagcagcaaggccacaaggccccggctgcccaccctgaggggcagctcaagttccacccagacacagacgatgtacctgtcccagctccagccggtgaccagaaggaggtggacacttcagaaaagaaacttctcgagcggctccctgaggttgaggtgccccagcatctgtgatcctccgggaccccagccctcaggattcctgatgctccaaggcgactgatgggcgctggatgaagtggcacagtcagcttccctgggggctggtgtcatgttgggctcctggggcgggggcacggcctggcatttcacgcattgctgccaccccaggtccacctgtctccactttcacagcctccaagtctgtggctcttcccttctgtcctccgaggggcttgccttctctcgtgtccagtgaggtgctcagtgatcggcttaacttagagaagcccgccccctccccttctccgtctgtcccaagagggtctgctctgagcctgcgttcctaggtggctcggcctcagctgcctgggttgtggccgccctagcatcctgtatgcccacagctactggaatccccgctgctgctccgggccaagcttctggttgattaatgagggcatggggtggtccctcaagaccttcccctaccttttgtggaaccagtgatgcctcaaagacagtgtcccctccacagctgggtgccaggggcaggggatcctcagtatagccggtgaaccctgataccaggagcctgggcctccctgaacccctggcttccagccatctcatcgccagcctcctcctggacctcttggcccccagccccttccccacacagccccagaagggtcccagagctgaccccactccaggacctaggcccagcccctcagcctcatctggagcccctgaagaccagtcccacccacctttctggcctcatctgacactgctccgcatcctgctgtgtgtcctgttccatgttccggttccatccaaatacactttctgg

SEQ ID NO: 162544 - DNA, 2567 bp, Artificial Sequence
  derived and/or modified sequence
gcggaagttatttttcccccggccggcagggagttgtagttatctttgaaagccttctctctcttttggcataggcgggaaatgtggcgtcaagaggctgggattccgagaaagaagcgaggctttcacgaaaatgcgagcggcttcggcaaggggcggggccgctggacgtggatgaaagctacagagccagcgtggaccaatcagacctctttggggcggggcctctgtggataagtgggcgtggtctaggggggaagtcaccaagaacgcaccggaggtccttgcccgccctggaaaacgccctctgcggtgaaggagagaccacactgccatgcctccctctgggccccgaggaaccctccttctgttgccgctgctgctgctgctcctgcttcgcgccgtgctggctgtccccctggagcgaggggcgcccaacaaggaggagacccctgcgactgagagtcccgacacaggcctgtactaccaccggtacctccaggaggtcatcgatgtactggagacggatgggcatttccgagagaagctgcaggctgccaatgcggaggacatcaagagcgggaagctgagccgagagctggactttgtcagccaccacgtccgcaccaagctggatgagctcaagcgacaggaggtgtcacggctgcggatgctgctcaaggccaagatggacgccgagcaggatcccaatgtacaggtggatcatctgaatctcctgaaacagtttgaacacctggaccctcagaaccagcatacattcgaggcccgcgacctggagctgctgatccagacggccacccgggaccttgcccagtacgacgcagcccatcatgaagagttcaagcgctacgagatgcttaaggaacacgagagacggcgttatctggagtcactgggagaggagcagagaaaggaggcggagaggaagctggaagagcaacagcgccggcaccgcgagcaccctaaagtcaacgtgcctggcagccaagcccagttgaaggaggtgtgggaggagctggatggactggaccccaacaggtttaaccccaagaccttcttcatactgcatgatatcaacagtgatggtgtcctggatgagcaggagctggaggcactcttcaccaaggagctggagaaagtgtacgacccaaagaatgaggaggacgacatgcgggagatggaggaggagcgactgcgcatgcgggagcatgtgatgaagaatgtggacaccaaccaggaccgcctcgtgaccctggaggagttcctcgcatccactcagaggaaggagtttggggacaccggggagggctgggagacagtggagatgcaccctgcctacaccgaggaagagctgaggcgctttgaagaggagctggctgcccgggaggcagagctgaatgccaaggcccagcgcctcagccaggagacagaggctctagggcggtcccagggccgcctggaggcccagaagagagagctgcagcaggctgtgctgcacatggagcagcggaagcagcagcagcagcagcagcaaggccacaaggccccggctgcccaccctgaggggcagctcaagttccacccagacacagacgatgtacctgtcccagctccagccggtgaccagaaggaggtggacacttcagaaaagaaacttctcgagcggctccctgaggttgaggtgccccagcatctgtgatcctccgggaccccagccctcaggattcctgatgctccaaggcgactgatgggcgctggatgaagtggcacagtcagcttccctgggggctggtgtcatgttgggctcctggggcgggggcacggcctggcatttcacgcattgctgccaccccaggtccacctgtctccactttcacagcctccaagtctgtggctcttcccttctgtcctccgaggggcttgccttctctcgtgtccagtgaggtgctcagtgatcggcttaacttagagaagcccgccccctccccttctccgtctgtcccaagagggtctgctctgagcctgcgttcctaggtggctcggcctcagctgcctgggttgtggccgccctagcatcctgtatgcccacagctactggaatccccgctgctgctccgggccaagcttctggttgattaatgagggcatggggtggtccctcaagaccttcccctaccttttgtggaaccagtgatgcctcaaagacagtgtcccctccacagctgggtgccaggggcaggggatcctcagtatagccggtgaaccctgataccaggagcctgggcctccctgaacccctggcttccagccatctcatcgccagcctcctcctggacctcttggcccccagccccttccccacacagccccagaagggtcccagagctgaccccactccaggacctaggcccagcccctcagcctcatctggagcccctgaagaccagtcccacccacctttctggcctcatctgacactgctccgcatcctgctgtgtgtcctgttccatgttccggttccatccaaatacactttctggaacaaa

SEQ ID NO: 162545 - DNA, 2158 bp, Artificial Sequence
  derived and/or modified sequence
cgcaccggaggtccttgcccgccctggaaaacgccctctgcggtgaaggagagaccacactgccatgcctccctctgggccccgaggaaccctccttctgttgccgctgctgctgctgctcctgcttcgcgccgtgctggctgtccccctggagcgaggggcgcccaacaaggaggagacccctgcgactgagagtcccgacacaggcctgtactaccaccggtacctccaggaggtcatcgatgtactggagacggatgggcatttccgagagaagctgcaggctgccaatgcggaggacatcaagagcgggaagctgagccgagagctggactttgtcagccaccacgtccgcaccaagctggatgagctcaagcgacaggaggtgtcacggctgcggatgctgctcaaggccaagatggacgccgagcaggatcccaatgtacaggtggatcatctgaatctcctgaaacagtttgaacacctggaccctcagaaccagcatacattcgaggcccgcgacctggagctgctgatccagacggccacccgggaccttgcccagtacgacgcagcccatcatgaagagttcaagcgctacgagatgcttaaggaacacgagagacggcgttatctggagtcactgggagaggagcagagaaaggaggcggagaggaagctggaagagcaacagcgccggcaccgcgagcaccctaaagtcaacgtgcctggcagccaagcccagttgaaggaggtgtgggaggagctggatggactggaccccaacaggtttaaccccaagaccttcttcatactgcatgatatcaacagtgatggtgtcctggatgagcaggagctggaggcactcttcaccaaggagctggagaaagtgtacgacccaaagaatgaggaggacgacatgcgggagatggaggaggagcgactgcgcatgcgggagcatgtgatgaagaatgtggacaccaaccaggaccgcctcgtgaccctggaggagttcctcgcatccactcagaggaaggagtttggggacaccggggagggctgggagacagtggagatgcaccctgcctacaccgaggaagagctgaggcgctttgaagaggagctggctgcccgggaggcagagctgaatgccaaggcccagcgcctcagccaggagacagaggctctagggcggtcccagggccgcctggaggcccagaagagagagctgcagcaggctgtgctgcacatggagcagcggaagcagcagcagcagcagcagcaaggccacaaggccccggctgcccaccctgaggggcagctcaagttccacccagacacagacgatgtacctgtcccagctccagccggtgaccagaaggaggtggacacttcagaaaagaaacttctcgagcggctccctgaggttgaggtgccccagcatctgtgatcctccgggaccccagccctcaggattcctgatgctccaagcctccaagtctgtggctcttcccttctgtcctccgaggggcttgccttctctcgtgtccagtgaggtgctcagtgatcggcttaacttagagaagcccgccccctccccttctccgtctgtcccaagagggtctgctctgagcctgcgttcctaggtggctcggcctcagctgcctgggttgtggccgccctagcatcctgtatgcccacagctactggaatccccgctgctgctccgggccaagcttctggttgattaatgagggcatggggtggtccctcaagaccttcccctaccttttgtggaaccagtgatgcctcaaagacagtgtcccctccacagctgggtgccaggggcaggggatcctcagtatagccggtgaaccctgataccaggagcctgggcctccctgaacccctggcttccagccatctcatcgccagcctcctcctggacctcttggcccccagccccttccccacacagccccagaagggtcccagagctgaccccactccaggacctaggcccagcccctcagcctcatctggagcccctgaagaccagtcccacccacctttctggcctcatctgacactgctccgcatcctgctgtgtgtcctgttccatgttccggttccatccaaatacactttctggaacaaa

SEQ ID NO: 162546 - DNA, 673 bp, Artificial Sequence
  derived and/or modified sequence
gaggtgagaggccagggttcccatactcttgggtcctagggaggatgggggccagagggctggaaaactgggtcccggaggaggatgcactgggtgccagtactttaggtcctgggaaaagaggaggctgggaccctggactcttgggtctgggggaggaggcggccgagatcccggattcctgagtgtgagagaggagcgtgttgggagccaggacccctgggtctgagggcccagactcctgtgtcggaggaagggaaggccggaggcctggaatcctggggcctggaccacactgccatgcctccctctgggccccgaggaaccctccttctgttgccgctgctgctgctgctcctgcttcgcgccgtgctggctgtccccctggagcgaggggcgcccaacaaggaggagacccctgcgactgagagtcccgacacaggcctgtactaccaccggtacctccaggaggtcatcgatgtactggagacggatgggcatttccgagagaagctgcaggctgccaatgcggaggacatcaagagcgggaagctgagccgagagctggactttgtcagccaccacgtccgcaccaagctggatgagctcaagcgacaggaggtgtcacggctgcggatgctgctcaaggccaagatggacgccgagcaggatc

SEQ ID NO: 162547 - DNA, 563 bp, Artificial Sequence
  derived and/or modified sequence
gagcgtgttgggagccaggacccctgggtctgagggcccagactcctgtgtcggaggaagggaaggccggaggcctggaatcctggggcctgggtaacaaaatgcttgtgtcttgattcttggaagtgggggcggcgctgggggcccgaactcctggttccaggggaggaagaggcttgggacagacattatgcattatccagccctccatcccccacagaccacactgccatgcctccctctgggccccgaggaaccctccttctgttgccgctgctgctgctgctcctgcttcgcgccgtgctggctgtccccctggagcgaggggcgcccaacaaggaggagacccctgcgactgagagtcccgacacaggcctgtactaccaccggtacctccaggaggtcatcgatgtactggagacggatgggcatttccgagagaagctgcaggctgccaatgcggaggacatcaagagcgggaagctgagccgagagctggactttgtcagccaccacgtccgcaccaagctggatgagctcaagcgacaggaggtgtcacggct

SEQ ID NO: 162548 - DNA, 1386 bp, Artificial Sequence
  derived and/or modified sequence
atgcctccctctgggccaagagggacactgctcctgttgcctctcttgctcttactgctgctgagggcggtgttggcagttccactcgaaaggggcgctcccaacaaagaggaaaccccagctaccgaatctccagatacgggcctgtattaccacaggtatcttcaggaggtaatcgacgttctcgagactgacggccatttcagagagaaactgcaggccgcaaacgccgaggacatcaagagcggtaagttgtcccgcgagctggacttcgtgagtcaccatgtgcgaacaaagctcgacgaactgaaacggcaagaagtgtctcgtttgaggatgttactcaaagcaaagatggacgccgagcaggatccaaacgtgcaggtggatcacctgaacctcctgaaacagttcgagcacctggatccccaaaaccagcataccttcgaagccagggacctcgaactcttgatccagaccgccaccagagacctagcacaatatgatgctgcccatcatgaagagtttaagaggtatgaaatgctgaaggaacacgagaggcgaaggtaccttgaatctctgggcgaggagcagcgcaaggaagcagaacgaaaactggaggagcagcagcggagacatcgcgagcaccccaaggtgaatgttcccggttcacaagcacagctcaaggaggtttgggaagagttagacgggctggaccccaaccgcttcaatcctaaaactttctttatacttcacgacattaactccgacggcgtgctggacgaacaggagctggaagctctgttcactaaagagctcgagaaagtttatgatccaaaaaacgaggaagacgacatgcgagagatggaagaggagaggctaaggatgagagagcacgtgatgaagaatgttgatacaaaccaggatagactggtaaccctcgaagaatttcttgctagcacccaacggaaagagttcggcgacaccggcgaggggtgggaaaccgtggaaatgcaccctgcctacactgaggaagagctaaggcggtttgaggaggagctggctgctagggaggctgaactcaacgcaaaggcccaacgcctctcccaggagactgaggcattaggcagatcacagggtcggctagaggcccagaagagggagctccagcaagccgtgcttcacatggagcaaagaaaacaacagcagcagcagcaacagggacacaaggcccctgcggctcaccctgaaggccaactgaagtttcatcctgatacggatgatgtgcctgtgccagctcccgcaggcgaccagaaggaagtggacacttctgaaaagaagctcctggagaggctccccgaggtggaagtaccacagcatctctag

SEQ ID NO: 162549 - DNA, 1386 bp, Artificial Sequence
  derived and/or modified sequence
atgcctcctagcggccctagaggaacgttgttattgttgcccctactgctgctgcttctgctgcgagctgtcctggcagtccccttggagagaggggcacccaacaaggaggaaactcctgctaccgagagtcctgacaccggcctctattatcatagatacttacaagaagtgatcgacgttctggagaccgatggccatttccgggagaaactgcaggccgctaatgccgaggatatcaaatcaggcaagctgtcacgggaactggactttgtctcacatcacgtgcgaacaaaattggacgagttaaagcggcaggaagtcagccggctccgaatgctgcttaaggccaaaatggacgctgagcaggaccctaatgttcaggtcgatcatcttaacctactaaagcagttcgaacacctggacccacaaaatcagcacacctttgaagcacgtgacctagagctcctgattcagaccgcgacacgggacctggcacaatatgatgctgcgcatcatgaagaatttaaaagatacgagatgttgaaggagcacgagcgacgaagatatctcgagtctcttggggaggaacagcgaaaagaagccgaaagaaagcttgaggaacagcagcgtagacatagggaacaccccaaggtcaacgttccaggtagccaggcacaactcaaggaggtgtgggaggaactagatggcctggaccccaatcgatttaatcccaagacgttttttatcctgcacgacataaattctgacggcgtgctcgacgagcaggaactggaggccctgtttaccaaggaactggagaaagtctacgacccaaagaacgaggaagacgatatgcgggagatggaagaagagaggctgaggatgagggagcatgtcatgaaaaacgtggatactaatcaggatagacttgtgacgctcgaggagttcctggcttctacacagagaaaggaatttggagacacgggagagggatgggaaacagtggagatgcaccctgcgtacacagaggaggagttgaggcggttcgaggaggagttggccgcacgtgaagctgagctaaacgcaaaggcccagcggctttcccaggaaacagaggccctaggaagaagccaaggccgactggaagcacagaaaagggagttgcagcaggcagtactgcacatggaacaaagaaaacagcaacaacaacaacaacagggacacaaagccccagctgcacatccagaggggcagctgaagttccatccagacacagatgatgtgcccgttcccgctcctgcaggagaccaaaaggaagtggatacttctgagaagaagctgctcgagcggctccctgaagtggaggtccctcagcacctgtag

SEQ ID NO: 162550 - DNA, 1386 bp, Artificial Sequence
  derived and/or modified sequence
atgcctcccagtggcccacgcggaaccctgttactgctacctctgctgctattgttactgctcagagctgtgctggcagtgccgttggaaagaggggcaccgaacaaagaagagacccctgctaccgagtctccagacaccggtctgtattaccacagatatctccaagaagtgatcgatgtgctggaaacagacggtcattttagagagaaattgcaggcggctaacgccgaggatattaaatctggtaagctgagtcgagaactggacttcgtgtcccatcatgtacgaaccaaattggacgaattgaagagacaagaagtgtcccgcctcagaatgcttctgaaggctaaaatggatgccgagcaggatcccaatgtccaagttgaccaccttaatctgctgaagcagttcgaacatctcgatccccaaaatcaacacacttttgaagcccgtgatcttgaacttctgatccagacagctaccagggacctcgcgcagtacgacgcagctcaccacgaagagttcaagcgctacgaaatgctcaaagagcacgagaggagaagatatcttgagtcactgggcgaagagcagagaaaggaagccgaacgaaagctggaggaacagcagcggagacatcgcgaacaccccaaggtcaatgtgcccggatcccaggcccagctgaaagaggtgtgggaagagctggatggtctggaccccaacaggtttaatccaaagacgttctttatccttcacgacatcaatagcgacggtgtcctcgacgaacaagagctggaggccctgtttactaaagagctggagaaggtctacgatccgaagaatgaagaggatgatatgagggaaatggaggaagagaggctccgcatgagggaacatgtgatgaaaaacgtcgataccaatcaggacaggctggtgacattggaagagtttctggcatctacgcagagaaaagagttcggggacaccggtgagggatgggaaactgtcgagatgcaccccgcttataccgaagaggaactccgacggttcgaagaggagctggccgctagagaggccgagttgaatgctaaagcccagaggcttagtcaggaaacagaggccctcgggagatcccagggacgtttagaggcccagaaacgtgagctgcagcaggcagtgctgcacatggaacagcggaagcagcagcagcagcagcagcaggggcataaggccccagcagcgcatccagagggccagctgaaatttcaccccgacacagatgatgtacccgtccccgctcctgcgggagatcagaaagaggtggacacttcagaaaaaaaactcctagaaagactcccagaagtcgaagtccctcagcatctctag

SEQ ID NO: 162551 - DNA, 375 bp, Artificial Sequence
  derived and/or modified sequence
atgccaccctctgggccacgaggcaccctcctcctcctcccacttctgctgctactgcttctccgtgccgtactagctgtgccattggagagaggagcaccaaataaagaggagacaccagctacggaaagcccagataccggactctactaccacagatacttacaagaggtgatagacgtgctggaaactgatgggcattttcgcgaaaaacttcaggctgccaacgctgaggacataaagagcggaaaattatcccgtgaacttgacttcgtgtcacatcacgtgcgcactaagctggatgaactgaagcgccaggaagtgagcaggctgcgaatgctcctgaaagctaaaatggacgcagagcaggattag

SEQ ID NO: 162552 - DNA, 336 bp, Artificial Sequence
  derived and/or modified sequence
atgccaccctccggccctcggggtaccttgctgctgttgcccctcttactgctccttctcctcagagctgtgctggccgtgcccctggagagaggtgctccaaataaggaagagacgcccgctactgaaagccccgataccggcctctactatcacaggtatttgcaggaagttatagacgttttagagaccgacggacactttagagaaaagttgcaggctgccaacgccgaggacatcaagagtggaaagctgtcccgagagctggacttcgtttcccatcatgttcggactaagttggatgagctgaaacgacaggaggtgagcaggctctag

SEQ ID NO: 162553 - DNA, 66 bp, Artificial Sequence
  derived and/or modified sequence
atggaccggcctggatttgtggccgcactggtgctgttgcacttcctctctcctatgaatatgtag

SEQ ID NO: 162554 - DNA, 1386 bp, Artificial Sequence
  derived and/or modified sequence
atgccccccagcggccccagaggcaccctgctgctgctgcccctgctgctgctgctgctgctgagagccgtgctggccgtgcccctggagagaggcgcccccaacaaggaggagacccccgccaccgagagccccgacaccggcctgtactaccacagatacctgcaggaggtgatcgacgtgctggagaccgacggccacttcagagagaagctgcaggccgccaacgccgaggacatcaagagcggcaagctgagcagagagctggacttcgtgagccaccacgtgagaaccaagctggacgagctgaagagacaggaggtgagcagactgagaatgctgctgaaggccaagatggacgccgagcaggaccccaacgtgcaggtggaccacctgaacctgctgaagcagttcgagcacctggacccccagaaccagcacaccttcgaggccagagacctggagctgctgatccagaccgccaccagagacctggcccagtacgacgccgcccaccacgaggagttcaagagatacgagatgctgaaggagcacgagagaagaagatacctggagagcctgggcgaggagcagagaaaggaggccgagagaaagctggaggagcagcagagaagacacagagagcaccccaaggtgaacgtgcccggcagccaggcccagctgaaggaggtgtgggaggagctggacggcctggaccccaacagattcaaccccaagaccttcttcatcctgcacgacatcaacagcgacggcgtgctggacgagcaggagctggaggccctgttcaccaaggagctggagaaggtgtacgaccccaagaacgaggaggacgacatgagagagatggaggaggagagactgagaatgagagagcacgtgatgaagaacgtggacaccaaccaggacagactggtgaccctggaggagttcctggccagcacccagagaaaggagttcggcgacaccggcgagggctgggagaccgtggagatgcaccccgcctacaccgaggaggagctgagaagattcgaggaggagctggccgccagagaggccgagctgaacgccaaggcccagagactgagccaggagaccgaggccctgggcagaagccagggcagactggaggcccagaagagagagctgcagcaggccgtgctgcacatggagcagagaaagcagcagcagcagcagcagcagggccacaaggcccccgccgcccaccccgagggccagctgaagttccaccccgacaccgacgacgtgcccgtgcccgcccccgccggcgaccagaaggaggtggacaccagcgagaagaagctgctggagagactgcccgaggtggaggtgccccagcacctgtag

SEQ ID NO: 162555 - DNA, 375 bp, Artificial Sequence
  derived and/or modified sequence
atgccccccagcggccccagaggcaccctgctgctgctgcccctgctgctgctgctgctgctgagagccgtgctggccgtgcccctggagagaggcgcccccaacaaggaggagacccccgccaccgagagccccgacaccggcctgtactaccacagatacctgcaggaggtgatcgacgtgctggagaccgacggccacttcagagagaagctgcaggccgccaacgccgaggacatcaagagcggcaagctgagcagagagctggacttcgtgagccaccacgtgagaaccaagctggacgagctgaagagacaggaggtgagcagactgagaatgctgctgaaggccaagatggacgccgagcaggactag

SEQ ID NO: 162556 - DNA, 336 bp, Artificial Sequence
  derived and/or modified sequence
atgccccccagcggccccagaggcaccctgctgctgctgcccctgctgctgctgctgctgctgagagccgtgctggccgtgcccctggagagaggcgcccccaacaaggaggagacccccgccaccgagagccccgacaccggcctgtactaccacagatacctgcaggaggtgatcgacgtgctggagaccgacggccacttcagagagaagctgcaggccgccaacgccgaggacatcaagagcggcaagctgagcagagagctggacttcgtgagccaccacgtgagaaccaagctggacgagctgaagagacaggaggtgagcagactgtag

SEQ ID NO: 162557 - protein, 979 aa, Artificial Sequence
  derived and/or modified sequence
MTLHATRGAALLSWVNSLHVADPVEAVLQLQDCSIFIKIIDRIHGTEEGQQILKQPVSERLDFVCSFLQKNRKHPSSPECLVSAQKVLEGSELELAKMTMLLLYHSTMSSKSPRDWEQFEYKIQAELAVILKFVLDHEDGLNLNEDLENFLQKAPVPSTCSSTFPEELSPPSHQAKREIRFLELQKVASSSSGNNFLSGSPASPMGDILQTPQFQMRRLKKQLADERSNRDELELELAENRKLLTEKDAQIAMMQQRIDRLALLNEKQAASPLEPKELEELRDKNESLTMRLHETLKQCQDLKTEKSQMDRKINQLSEENGDLSFKLREFASHLQQLQDALNELTEEHSKATQEWLEKQAQLEKELSAALQDKKCLEEKNEILQGKLSQLEEHLSQLQDNPPQEKGEVLGDVLQVEELSKKLADSDQASKVQQQKLKAVQAQGGESQQEAQRLQAQLNELQAQLSQKEQAAEHYKLQMEKAKTHYDAKKQQNQELQEQLRSLEQLQKENKELRAEAERLGHELQQAGLKTKEAEQTCRHLTAQVRSLEAQVAHADQQLRDLGKFQVATDALKSREPQAKPQLDLSIDSLDLSCEEGTPLSITSKLPRTQPDGTSVPGEPASPISQRLPPKVESLESLYFTPIPARSQAPLESSLDSLGDVFLDSGRKTRSARRRTTQIINITMTKKLDVEEPDSANSSFYSTRSAPASQASLRATSSTQSLARLGSPDYGNSALLSLPGYRPTTRSSARRSQAGVSSGAPPGRNSFYMGTCQDEPEQLDDWNRIAELQQRNRVCPPHLKTCYPLESRPSLSLGTITDEEMKTGDPQETLRRASMQPIQIAEGTGITTRQQRKRVSLEPHQGPGTPESKKATSCFPRPMTPRDRHEGRKQSTTEAQKKAAPASTKQADRRQSMAFSILNTPKKLGNSLLRRGASKKALSKASPNTRSGTRRSPRIATTTASAATAAAIGATPRAKGKAKH

SEQ ID NO: 162558 - protein, 75 aa, Artificial Sequence
  derived and/or modified sequence
MTLHATRGAALLSWVNSLHVADPVEAVLQLQDCSIFIKIIDRIHGTEEGQQILKQPVSERLDFVCSFLQKNRKHP

SEQ ID NO: 162559 - protein, 2115 aa, Artificial Sequence
  derived and/or modified sequence
MTLHATRGAALLSWVNSLHVADPVEAVLQLQDCSIFIKIIDRIHGTEEGQQILKQPVSERLDFVCSFLQKNRKHPSSPECLVSAQKVLEGSELELAKMTMLLLYHSTMSSKSPRDWEQFEYKIQAELAVILKFVLDHEDGLNLNEDLENFLQKAPVPSTCSSTFPEELSPPSHQAKREIRFLELQKVASSSSGNNFLSGSPASPMGDILQTPQFQMRRLKKQLADERSNRDELELELAENRKLLTEKDAQIAMMQQRIDRLALLNEKQAASPLEPKELEELRDKNESLTMRLHETLKQCQDLKTEKSQMDRKINQLSEENGDLSFKLREFASHLQQLQDALNELTEEHSKATQEWLEKQAQLEKELSAALQDKKCLEEKNEILQGKLSQLEEHLSQLQDNPPQEKGEVLGDVLQLETLKQEAATLAANNTQLQARVEMLETERGQQEAKLLAERGHFEEEKQQLSSLITDLQSSISNLSQAKEELEQASQAHGARLTAQVASLTSELTTLNATIQQQDQELAGLKQQAKEKQAQLAQTLQQQEQASQGLRHQVEQLSSSLKQKEQQLKEVAEKQEATRQDHAQQLATAAEEREASLRERDAALKQLEALEKEKAAKLEILQQQLQVANEARDSAQTSVTQAQREKAELSRKVEELQACVETARQEQHEAQAQVAELELQLRSEQQKATEKERVAQEKDQLQEQLQALKESLKVTKGSLEEEKRRAADALEEQQRCISELKAETRSLVEQHKRERKELEEERAGRKGLEARLQQLGEAHQAETEVLRRELAEAMAAQHTAESECEQLVKEVAAWRERYEDSQQEEAQYGAMFQEQLMTLKEECEKARQELQEAKEKVAGIESHSELQISRQQNELAELHANLARALQQVQEKEVRAQKLADDLSTLQEKMAATSKEVARLETLVRKAGEQQETASRELVKEPARAGDRQPEWLEEQQGRQFCSTQAALQAMEREAEQMGNELERLRAALMESQGQQQEERGQQEREVARLTQERGRAQADLALEKAARAELEMRLQNALNEQRVEFATLQEALAHALTEKEGKDQELAKLRGLEAAQIKELEELRQTVKQLKEQLAKKEKEHASGSGAQSEAAGRTEPTGPKLEALRAEVSKLEQQCQKQQEQADSLERSLEAERASRAERDSALETLQGQLEEKAQELGHSQSALASAQRELAAFRTKVQDHSKAEDEWKAQVARGRQEAERKNSLISSLEEEVSILNRQVLEKEGESKELKRLVMAESEKSQKLEERLRLLQAETASNSARAAERSSALREEVQSLREEAEKQRVASENLRQELTSQAERAEELGQELKAWQEKFFQKEQALSTLQLEHTSTQALVSELLPAKHLCQQLQAEQAAAEKRHREELEQSKQAAGGLRAELLRAQRELGELIPLRQKVAEQERTAQQLRAEKASYAEQLSMLKKAHGLLAEENRGLGERANLGRQFLEVELDQAREKYVQELAAVRADAETRLAEVQREAQSTARELEVMTAKYEGAKVKVLEERQRFQEERQKLTAQVEQLEVFQREQTKQVEELSKKLADSDQASKVQQQKLKAVQAQGGESQQEAQRLQAQLNELQAQLSQKEQAAEHYKLQMEKAKTHYDAKKQQNQELQEQLRSLEQLQKENKELRAEAERLGHELQQAGLKTKEAEQTCRHLTAQVRSLEAQVAHADQQLRDLGKFQVATDALKSREPQAKPQLDLSIDSLDLSCEEGTPLSITSKLPRTQPDGTSVPGEPASPISQRLPPKVESLESLYFTPIPARSQAPLESSLDSLGDVFLDSGRKTRSARRRTTQIINITMTKKLDVEEPDSANSSFYSTRSAPASQASLRATSSTQSLARLGSPDYGNSALLSLPGYRPTTRSSARRSQAGVSSGAPPGRNSFYMGTCQDEPEQLDDWNRIAELQQRNRVCPPHLKTCYPLESRPSLSLGTITDEEMKTGDPQETLRRASMQPIQIAEGTGITTRQQRKRVSLEPHQGPGTPESKKATSCFPRPMTPRDRHEGRKQSTTEAQKKAAPASTKQADRRQSMAFSILNTPKKLGNSLLRRGASKKALSKASPNTRSGTRRSPRIATTTASAATAAAIGATPRAKGKAKH

SEQ ID NO: 162560 - protein, 61 aa, Artificial Sequence
  derived and/or modified sequence
MTLHATRGAALLSWVNSLHVADPVEAVLQLQDCSIFIKIIDRIHGTEEGQQILKQPVSERL

SEQ ID NO: 162561 - protein, 59 aa, Artificial Sequence
  derived and/or modified sequence
MTLHATRGAALLSWVNSLHVADPVEAVLQLQDCSIFIKIIDRIHGTEEGQQILKQPVSE

SEQ ID NO: 162562 - protein, 146 aa, Artificial Sequence
  derived and/or modified sequence
MTLHATRGAALLSWVNSLHVADPVEAVLQLQDCSIFIKIIDRIHGTEEGQQILKQPVSERLDFVCSFLQKNRKHPSSPECLVSAQKVLEGSELELAKMTMLLLYHSTMSSKSPRDWEQFEYKIQAELAVILKFVLDHEDGLNLNED

SEQ ID NO: 162563 - protein, 691 aa, Artificial Sequence
  derived and/or modified sequence
MTLHATRGAALLSWVNSLHVADPVEAVLQLQDCSIFIKIIDRIHGTEEGQQILKQPVSERLDFVCSFLQKNRKHPSSPECLVSAQKVLEGSELELAKMTMLLLYHSTMSSKSPRDWEQFEYKIQAELAVILKFVLDHEDGLNLNEDLENFLQKAPVPSTCSSTFPEELSPPSHQAKREIRFLELQKVASSSSGNNFLSGSPASPMGDILQTPQFQMRRLKKQLADERSNRDELELELAENRKLLTEKDAQIAMMQQRIDRLALLNEKQAASPLEPKELEELRDKNESLTMRLHETLKQCQDLKTEKSQMDRKINQLSEENGDLSFKLREFASHLQQLQDALNELTEEHSKATQEWLEKQAQLEKELSAALQDKKCLEEKNEILQGKLSQLEEHLSQLQDNPPQEKGEVLGDVLQLETLKQEAATLAANNTQLQARVEMLETERGQQEAKLLAERGHFEEEKQQLSSLITDLQSSISNLSQAKEELEQASQAHGARLTAQVASLTSELTTLNATIQQQDQELAGLKQQAKEKQAQLAQTLQQQEQASQGLRHQVEQLSSSLKQKEQQLKEVAEKQEATRQDHAQQLATAAEEREASLRERDAALKQLEALEKEKAAKLEILQQQLQVANEARDSAQTSVTQAQREKAELSRKVEELQACVETARQEQHEAQAQVAELELQLRSEQQKATEKE

SEQ ID NO: 162564 - protein, 159 aa, Artificial Sequence
  derived and/or modified sequence
MTLHATRGAALLSWVNSLHVADPVEAVLQLQDCSIFIKIIDRIHGTEEGQQILKQPVSERLDFVCSFLQKNRKHPSSPECLVSAQKVLEGSELELAKMTMLLLYHSTMSSKSPRDWEQFEYKIQAELAVILKFVLDHEDGLNLNEDLENFLQKAPVPST

SEQ ID NO: 162565 - protein, 72 aa, Artificial Sequence
  derived and/or modified sequence
MTLHATRGAALLSWVNSLHVADPVEAVLQLQDCSIFIKIIDRIHGTEEGQQILKQPVSERLDFVCSFLQKNR

SEQ ID NO: 162566 - protein, 852 aa, Artificial Sequence
  derived and/or modified sequence
MTLHATRGAALLSWVNSLHVADPVEAVLQLQDCSIFIKIIDRIHGTEEGQQILKQPVSERLDFVCSFLQKNRKHPSSPECLVSAQKVLEGSELELAKMTMLLLYHSTMSSKSPRDWEQFEYKIQAELAVILKFVLDHEDGLNLNEDLENFLQKAPVPSTCSSTFPEELSPPSHQAKREIRFLELQKVASSSSGNNFLSGSPASPMGDILQTPQFQMRRLKKQLADERSNRDELELELAENRKLLTEKDAQIAMMQQRIDRLALLNEKQAASPLEPKELEELRDKNESLTMRLHETLKQCQDLKTEKSQMDRKINQLSEENGDLSFKLREFASHLQQLQDALNELTEEHSKATQEWLEKQAQLEKELSAALQDKKCLEEKNEILQGKLSQLEEHLSQLQDNPPQEKGEVLGDVLQLETLKQEAATLAANNTQLQARVEMLETERGQQEAKLLAERGHFEEEKQQLSSLITDLQSSISNLSQAKEELEQASQAHGARLTAQVASLTSELTTLNATIQQQDQELAGLKQQAKEKQAQLAQTLQQQEQASQGLRHQVEQLSSSLKQKEQQLKEVAEKQEATRQDHAQQLATAAEEREASLRERDAALKQLEALEKEKAAKLEILQQQLQVANEARDSAQTSVTQAQREKAELSRKVEELQACVETARQEQHEAQAQVAELELQLRSEQQKATEKERVAQEKDQLQEQLQALKESLKVTKGSLEEEKRRAADALEEQQRCISELKAETRSLVEQHKRERKELEEERAGRKGLEARLQQLGEAHQAETEVLRRELAEAMAAQHTAESECEQLVKEVAAWRERYEDSQQEEAQYGAMFQEQLMTLKEECEKARQELQEA

SEQ ID NO: 162567 - protein, 174 aa, Artificial Sequence
  derived and/or modified sequence
MTLHATRGAALLSWVNSLHVADPVEAVLQLQDCSIFIKIIDRIHGTEEGQQILKQPVSERLDFVCSFLQKNRKHPSSPECLVSAQKVLEGSELELAKMTMLLLYHSTMSSKSPRDWEQFEYKIQAELAVILKFVLDHEDGLNLNEDLENFLQKAPVPSTCSSTFPEELSPPSHQ

SEQ ID NO: 162568 - protein, 201 aa, Artificial Sequence
  derived and/or modified sequence
MTLHATRGAALLSWVNSLHVADPVEAVLQLQDCSIFIKIIDRIHGTEEGQQILKQPVSERLDFVCSFLQKNRKHPSSPECLVSAQKVLEGSELELAKMTMLLLYHSTMSSKSPRDWEQFEYKIQAELAVILKFVLDHEDGLNLNEDLENFLQKAPVPSTCSSTFPEELSPPSHQAKREIRFLELQKVASSSSGNNFLSGSP

SEQ ID NO: 162569 - protein, 56 aa, Artificial Sequence
  derived and/or modified sequence
MTLHATRGAALLSWVNSLHVADPVEAVLQLQDCSIFIKIIDRIHGTEEGQQILKQP

SEQ ID NO: 162570 - DNA, 6348 bp, Artificial Sequence
  derived and/or modified sequence
atgacactacacgccactagaggagccgctttattatcatgggtgaactctctgcacgtggcagaccctgtcgaggcagtactacagctccaggactgctcaattttcatcaaaataattgaccggatacatggaaccgaagagggccagcaaattctgaagcagcccgtgtcagagcgcctggactttgtgtgctctttcctgcagaaaaatcgaaagcacccctcgagtcctgaatgtctcgtctccgctcagaaggttttggagggcagcgaactcgagctcgctaagatgaccatgcttcttctgtaccatagtaccatgtccagcaaatcaccacgggactgggaacagtttgagtacaaaatccaggccgaattggctgtgattttaaagttcgtgcttgatcatgaggatggactaaacctgaacgaggacctcgagaacttcttgcagaaggcaccagtcccgtctacttgttcctccacattccctgaagaattgagtccaccttctcaccaggctaaacgcgaaatccgatttctggagctccagaaggtagcttcatcctcatccggaaacaatttcctctctggttccccagcgagtccaatgggagacattctgcaaactccgcagttccagatgagaaggcttaagaaacagctcgcagatgagcgctccaatcgagatgagctggagctcgagttggctgaaaatcgcaaattgctcacagagaaggatgcccagatcgcgatgatgcagcaaaggatagatcgacttgctctgctcaatgagaagcaggcggcatcacctctggaacctaaggagttggaggagctgagggacaagaacgagtctctgaccatgcgcttacatgaaactctgaagcagtgtcaggacctcaagaccgagaagtctcagatggaccgaaaaatcaatcaactctctgaggagaatggcgacctgagcttcaaactgcgggagttcgcatctcatctgcagcagttgcaggatgctcttaacgaattgactgaggagcatagcaaggcgacacaggagtggctggaaaaacaagcccagctggaaaaggagctgagtgctgctctccaggacaaaaagtgccttgaagaaaaaaacgaaattctgcagggcaaactgagtcagctggaggaacacctgtcacagctgcaggacaaccccccccaagaaaaaggtgaggtgttgggagatgttttgcaactggagacccttaaacaggaagccgcaacactcgctgctaacaacacacaactccaggcacgcgtggaaatgctggaaacagaaagggggcagcaagaagctaaattgctcgccgagcgtggccacttcgaagaagagaagcaacagctgagcagcctcatcactgaccttcagagcagcatatctaacctgtctcaagctaaggaggagctcgaacaagccagtcaggctcacggagccaggctaaccgcccaagtggcttccctaacctccgagctgaccaccctcaatgccactatccagcagcaggatcaggaactggcaggtctgaagcaacaggccaaggaaaaacaggctcagctggcccaaacactgcagcagcaggagcaggcaagccagggccttcgccatcaggtggagcagcttagctcttcactgaagcagaaagagcaacagctgaaagaagtggcagagaagcaggaggctacacggcaggatcatgcccagcaactggctactgccgcagaagagagagaggcctccctcagagaaagagacgccgctctgaagcagttagaggccctggaaaaagagaaagctgccaaactggagattctgcagcaacagctgcaggttgctaacgaagcccgtgattcagcacagacctcagtgactcaggcgcaaagggagaaagccgaactaagcaggaaggtggaggaattgcaagcatgcgtggagacagctagacaggaacagcatgaagcacaagcgcaagtagcggagttggagctgcaattaaggtccgaacaacaaaaggctaccgaaaaagagcgagtggcccaagagaaggatcaactgcaggagcagcttcaggcgctgaaggaatctctgaaagtgaccaaggggagtctggaggaggaaaagcgtcgcgccgccgacgcactcgaggaacagcagagatgcatttctgagctgaaagccgaaactaggtccttggtcgagcaacacaagagagagagaaaggaactcgaggaggaacgcgcagggagaaagggcctggaggcccgtctgcagcagcttggagaagcccatcaagctgagactgaggttcttcgtcgagagctggccgaggctatggccgctcagcatacagccgagtccgaatgtgaacagctcgtcaaggaagtggcagcttggcgggaaagatacgaagactctcagcaggaagaagcccagtatggcgcaatgttccaggagcagttaatgactctgaaggaagagtgcgaaaaagcacggcaggagctgcaagaagccaaggagaaggtcgctggcatcgagagtcattctgagttgcagatctcacggcagcaaaatgaactggctgagcttcacgccaatctcgctcgggcactccagcaggtccaggagaaagaagtcagggctcagaaacttgcggatgacctctctacgctgcaggaaaaaatggccgcgacgtccaaagaagtggcaagactggagactctggttcggaaggctggtgagcaacaggagacagcttctagggaactcgtaaaggagccagcgcgggcgggggatagacagccagagtggcttgaggaacagcaaggaaggcagttttgttcaacccaggccgccctccaggccatggagcgggaggccgaacagatgggcaatgaactggagaggttgcgcgccgccctgatggaatctcaaggccaacagcaggaagagcgcggccaacaagagcgcgaagtggcgcggctgacacaggaaagaggaagagcccaagccgacttggcgttagagaaggcagcgagagccgagttggaaatgaggctgcaaaatgctctgaacgagcagcgagtggaatttgccacattgcaggaagcattggcccatgcgctgaccgaaaaagaaggcaaggaccaagagcttgcaaaactgcgcggcttggaggctgctcagattaaggaactcgaggaactgcgacagactgtaaaacagttaaaggagcaattggccaagaaggaaaaagaacatgcatcaggctcgggggcacagagcgaggcagctgggcgaaccgagcccaccggccccaaattggaagcactgcgggcggaggtgagcaaacttgagcagcagtgtcagaaacagcaggagcaggcagattcactagagcgatcgctggaagctgagagagcatcccgcgccgagagggactctgcacttgaaactttgcagggacaactcgaagaaaaagctcaagaactgggccacagccagtccgctttagcctccgcccagagggagctcgcagctttccgtaccaaggtgcaggaccacagcaaagccgaggatgaatggaaagcccaggtggctcgggggagacaggaagccgagcgtaaaaactctcttatctcctctcttgaagaggaggtaagtattctgaaccgtcaggtgcttgaaaaggagggagagtctaaggagctgaagaggctcgtaatggccgaaagtgagaaatctcagaaactcgaggagaggcttcgcctcctgcaggctgagaccgcctccaactcagcacgcgccgccgaaagatcatctgctcttcgcgaggaggtacaaagcctgcgagaggaggctgagaaacagcgagtcgccagtgagaatctgcgacaggagctgacatcacaggcagagcgggccgaggagctgggacaggagcttaaggcgtggcaggaaaaattctttcaaaaagagcaagccctaagtacactccagcttgagcacacttcaacacaggccctagtttcggagctgcttccggccaagcatctgtgtcaacagcttcaggctgagcaggcggccgccgagaagcggcacagggaagaactcgaacagtccaaacaggccgctgggggccttagggctgaattactgagggcccagcgcgaactgggggagctcatcccgcttcgtcagaaagttgcagagcaagagagaacagcacagcaacttagagcagagaaagccagctatgcagagcaactgagcatgttgaaaaaggcccatgggctcttagctgaagaaaatcgaggacttggtgagagagcgaacctggggcgccaattcctggaagtcgaactggaccaggcaagggagaaatacgtgcaggagctcgcagctgtgcgagcagatgccgagactcgtctggccgaggtacagcgcgaggctcaatcgacggctagggagttggaggtgatgaccgcaaaatatgagggcgcaaaagtgaaagttttagaagagcggcagcgcttccaggaagaacgtcagaaactgacagctcaggtcgaacaactggaagtttttcagagggagcagaccaaacaggtagaagagctttcgaagaaactggccgacagcgatcaggcatcgaaggtccagcaacagaaactaaaggcagttcaggctcaagggggcgaatctcagcaggaggctcagcgactccaggcccagttgaatgaattgcaggcccaactgtctcaaaaagaacaggctgccgaacactacaagctacagatggaaaaggcaaagactcactacgacgctaagaagcagcagaaccaagagctgcaggaacaactgagatccctcgaacagctgcagaaagaaaacaaggaacttcgagccgaggccgagcgcctgggtcacgagctacagcaggctggcctcaaaacaaaggaagccgaacaaacgtgtagacacctgacagcacaggtgagatcactggaagcccaggttgctcacgccgaccagcagctcagggatcttggaaagttccaggtagctaccgatgcccttaaatcaagagaaccccaggcgaagccacagttggatttgagcatagactcactggacctttcttgtgaagagggcacaccactgtctattacaagcaaactcccacgcactcagccagatggtacgtcggtgcccggggagcccgcctccccaatcagtcaacgccttccccccaaggtcgaaagtctggagagcctgtactttacgcccatcccagctagatcgcaggccccactcgaatcttcactggactcactcggcgacgtgttcctcgattctggccgcaaaaccagatcagcccggaggagaacaactcagatcataaacattaccatgacgaagaagcttgatgtggaagagcccgatagcgctaattcgagcttctattccactaggtcagcccccgccagccaagccagccttcgggccacctctagcacccagtcactggccaggctcggcagccctgattatggtaacagcgcactgctttcactgccagggtataggcccacaacccgaagcagcgctagacgttcccaggccggcgtgtcatcgggggcacccccgggccgcaacagtttttatatggggacttgccaagatgagccagaacagttggacgattggaatcgaatcgccgagctacagcagagaaatcgggtctgtccaccgcatctcaagacctgctaccccctcgaaagcagaccgtctctaagcctcggcacgattaccgacgaagagatgaagacaggagatccccaggaaactctcagaagagcctccatgcaacctatccagatcgccgaggggacaggtattacaactaggcagcagcggaaacgggtgagcttggagccacaccagggccccggtacaccggagagtaagaaagcaaccagttgcttcccccggcctatgacccctcgtgaccggcatgaaggccgcaaacagagcacgaccgaggcccaaaagaaggccgccccagcaagcacaaagcaagctgatcgcaggcagtctatggccttctcgatattgaacactcccaagaagctggggaattccctgctacgccgtggcgcgagcaagaaagcgctaagcaaggcttcgcctaacacacggtccggtactcgacgcagtcctcggatcgccacgactaccgcctctgctgcaacagctgcagctattggagcaacaccacgcgctaagggcaaagcaaagcattag

SEQ ID NO: 162571 - DNA, 2076 bp, Artificial Sequence
  derived and/or modified sequence
atgaccctgcacgcaacccgcggggctgcactgctctcctgggtaaatagtctccacgtggccgaccccgtggaggccgtgctgcaactccaggactgttccatcttcatcaagatcatcgataggatccacggaaccgaagaaggccagcaaatcttgaagcagccagtgagtgaacgactggattttgtttgctcattcttacagaagaatagaaagcaccctagctcccccgagtgcctggtttcagcacagaaagttcttgaggggagtgagttagaacttgccaaaatgaccatgttgctcctgtatcactctactatgtccagcaagtccccgcgagattgggagcagttcgaatataaaatccaggcagagctcgccgtgatactgaagttcgttttggaccacgaggatgggctcaatttaaatgaagatctggagaatttccttcagaaagcaccggtacctagcacctgttcctcgacttttcctgaagaactaagcccccccagccaccaagccaaacgcgaaatacgtttcctggagcttcagaaagtagcctcctccagcagtggcaacaattttctttctggttctccggcatccccaatgggtgatatactccagacgcctcagttccaaatgcggagactgaagaagcaacttgccgatgagcgctcaaatcgcgacgagctcgagttggaactcgctgaaaatagaaagctattgacagagaaagacgcgcagatcgccatgatgcaacagcggatcgaccgcttagccctgttgaacgaaaagcaagcagctagcccacttgagcctaaagagttggaggagctccgagataagaacgagtctctgactatgcggttgcatgaaaccctcaagcaatgtcaggacctaaagaccgaaaagtcgcagatggatcggaaaattaaccagctatctgaagagaacggtgacttatccttcaagctgagagagttcgcgtcccacctacagcaactccaggacgctctgaatgagctgactgaagagcactctaaggcaacgcaggagtggctcgagaagcaggcgcagctggagaaagaattatctgcagctctgcaggacaagaaatgcctcgaagagaagaacgagattcttcagggtaagctgtctcagctggaggagcatctgtcccagctccaggacaatccgccacaagagaaaggcgaagtactgggcgatgttttacagctggaaactttaaagcaggaggcagcgacactggccgcgaataacactcagttgcaagctcgggtggaaatgctagagactgagagggggcagcaggaagctaaactgcttgccgagaggggccactttgaagaggaaaagcaacaactgtcgagcttaattactgatctgcagtcctcaattagtaacctttcacaagccaaagaagaattagaacaggccagccaggcacacggagcacggctcacagcgcaggtggcgagtctgacaagcgaactcactactcttaatgcgacaatacagcaacaagatcaggaactcgccggcctgaaacaacaagcaaaggagaagcaggctcagctcgcccaaacactccagcagcaagagcaagcatcccaaggattaagacaccaggtggagcagctgtcctcatcccttaaacaaaaggagcaacagcttaaagaagtagccgagaagcaggaggcaaccagacaagatcacgcgcagcagttggcgactgcagccgaagagagagaggcatcattgcgcgagagagacgccgccttaaagcaactggaagctttggagaaagagaaggccgccaagttggaaatcctgcagcagcaactgcaggtggccaatgaggccagggacagcgctcaaacaagcgtcacccaggcacagcgagaaaaagccgagttgagcagaaaggtggaagagttgcaagcttgtgtagagaccgctaggcaggaacaacatgaggctcaggcgcaggtggctgagcttgaattgcagctccggagcgagcagcaaaaagccacagaaaaggagtag

SEQ ID NO: 162572 - DNA, 2559 bp, Artificial Sequence
  derived and/or modified sequence
atgaccctgcacgccacgagaggagcagctctgctgagttgggtgaactctctccacgtcgcagaccccgtggaggcggtgttgcagctccaggactgcagcatttttatcaagataatcgacagaatccatggcacagaggagggtcaacagatcctcaagcaaccagtgagcgaaagactggactttgtgtgttccttcctgcaaaaaaacagaaaacatccatcatcccccgaatgtttggtaagcgcccagaaagtcctggaaggctccgagctcgagctggcaaaaatgaccatgctcctgctctaccatagtactatgagttctaagagcccccgggactgggagcagttcgagtataagattcaggccgaactggctgttatcctgaagtttgtgctcgaccacgaagacggcctgaacttgaacgaagacctcgagaattttctccagaaagcccctgttccatctacgtgctccagcacattcccggaagagctgagtccacctagccaccaggctaaaagagagatccgatttctggagctgcagaaggtcgcctcttccagctcaggtaataactttctgtctgggtctccggcctcgcctatgggagacatactgcagactcctcagtttcagatgaggcgactaaagaagcagttagccgacgagagaagcaatcgcgatgagctggagctggagctcgcggagaaccggaaactactcaccgaaaaggatgctcaaattgcgatgatgcaacaaaggatagaccggctggccttgctgaatgagaagcaggcagcgagtccactggagcctaaagagctggaagagctccgagacaaaaatgagagcctaacaatgcggttacatgagacactaaaacagtgtcaggacctaaaaactgagaaatctcaaatggatcggaagattaatcagctgtccgaggaaaatggcgacctttctttcaagctcagggaattcgccagccatctgcaacaattgcaagatgcactaaatgaactgaccgaggaacactcaaaagcaacccaggaatggcttgaaaaacaggcccagctcgagaaagagttatccgccgctctccaagataaaaaatgcttagaggagaagaacgaaatactccaagggaagctatcccaattggaggaacacctatcacagcttcaggacaacccaccccaggaaaagggagaggtcctgggcgacgttttacagctcgaaaccctgaaacaggaggcggccacactggccgccaataacacgcagttacaagcaagagtcgagatgctcgagacagagcggggccaacaggaggcaaagctccttgcagaaaggggtcactttgaggaagaaaagcagcaactaagctccttgattaccgaccttcagtccagcatctcaaacttaagccaggctaaggaagagctggaacaggcctcacaggcccacggcgctcggctcaccgcacaggtggccagtctgacatcagagctaaccactcttaacgctacaatacagcaacaggaccaagagctggctggactgaaacaacaggctaaggaaaagcaggcccagctcgcccagacactgcaacaacaggaacaggcttcgcagggtttacggcaccaggttgaacagctgagctcatcactcaagcagaaagagcagcagctcaaggaagtcgcggagaagcaagaagctacgcgccaagatcatgctcagcagttagctacagcagccgaggagagggaagcttctttgcgggagcgcgatgctgctctaaagcaactggaagccctggagaaagagaaagccgctaagcttgaaatccttcaacagcagttgcaggtggccaacgaggccagagatagtgcccagacatcagtcacccaggcccagcgagagaaagccgaactttcccgaaaggtggaggagctgcaggcttgcgtagaaacagcgcgccaggagcagcacgaggcacaagctcaggttgctgaattggaattgcagctgcgcagtgagcaacaaaaggccacagaaaaggagcgagtggctcaggaaaaagaccaactccaggagcagctccaagcactaaaggaaagtctgaaagttaccaaaggaagcctagaggaagagaagagacgtgctgcggatgcattagaagaacaacagaggtgtatcagcgaactgaaagccgagactcggtccctcgtcgagcagcacaagcgtgagcgtaaagagctggaagaggaaagggcaggtcgcaaaggactggaggcccgtctacagcagttgggcgaggcacatcaagccgaaaccgaggtgttacgccgcgaattggctgaggctatggctgctcagcacacagccgaatcggagtgtgagcagttggttaaggaggtggcggcatggcgtgagaggtacgaggacagccagcaggaggaagcccagtatggcgctatgtttcaagaacagctgatgacgctgaaagaggagtgtgaaaaggctcgccaagaacttcaagaagcctag

SEQ ID NO: 162573 - DNA, 6348 bp, Artificial Sequence
  derived and/or modified sequence
atgaccctgcacgccaccagaggagctgccctgctgtcctgggtgaacagcctgcacgtggccgaccctgtggaggccgtgctgcagctgcaggactgcagcatcttcatcaagatcatcgaccgcatccacggcacagaggagggccagcagatcctgaagcagcctgtgtctgagcggctggactttgtgtgcagcttcctgcagaagaacaggaagcaccccagcagcccagaatgtctggtgtctgcccagaaggtgctggagggcagcgagctggagctggccaagatgaccatgctgctgctgtaccacagcaccatgagcagcaagagcccccgggactgggagcagtttgagtacaagatccaggccgagctggccgtcatcctgaagtttgtgctggaccatgaagatggcctgaacctgaatgaagacctggagaacttcctgcagaaggcccctgtgcccagcacctgcagcagcaccttccctgaggagctgagcccccccagccaccaggccaagcgggagatccgcttcctggagctgcagaaggtggccagcagcagcagcggcaacaacttcctgagcggcagccctgccagccccatgggagacatcctgcagaccccccagttccagatgaggcggctgaagaagcagctggctgatgagaggagcaacagagatgagctggagctggagctggctgaaaataggaagctgctgacagagaaggatgcccagatcgccatgatgcagcagagaattgaccggctggccctgctgaatgagaagcaggccgccagccccctggagcccaaggagctggaggagctgcgggacaagaatgaaagcctgaccatgaggctgcacgagaccctgaagcagtgccaggacctgaagacagagaagagccagatggacaggaagatcaaccagctgtctgaagaaaatggagacctgtccttcaagctgcgggagtttgccagccacctgcagcagctgcaggatgccctgaatgagctgacagaggagcacagcaaggccacccaggagtggctggagaagcaggcccagctggagaaggagctgtctgctgccctgcaggacaagaagtgcctggaggagaagaatgagatcctgcagggcaagctgagccagctggaggagcacctgagccagctgcaggacaaccccccccaggagaagggggaggtgctgggagatgtgctgcagctggagaccctgaagcaggaggccgccaccctggccgccaacaacacccagctgcaggcccgggtggagatgctggagacagagcggggccagcaggaggccaagctgctggccgagcggggccactttgaggaggagaagcagcagctgagcagcctcatcacagacctgcagagcagcatcagcaacctgagccaggccaaggaggagctggagcaggccagccaggcccacggggcccggctgacagcccaggtggccagcctgaccagcgagctgaccaccctgaatgccaccatccagcagcaggaccaggagctggccggcctgaagcagcaggccaaggagaagcaggcccagctggcccagaccctgcagcagcaggagcaggccagccagggcctgcggcaccaggtggagcagctgagcagcagcctgaagcagaaggagcagcagctgaaggaggtggccgagaagcaggaggccacccggcaggaccacgcccagcagctggccacagctgctgaggagcgggaggccagcctgcgggagagagatgctgccctgaagcagctggaggccctggagaaggagaaggccgccaagctggagatcctgcagcagcagctgcaggtggccaatgaggcccgggacagcgcccagacctctgtgacccaggcccagcgggagaaggccgagctgagcaggaaggtggaggagctgcaggcctgtgtggagacagcccggcaggagcagcacgaggcccaggcccaggtggccgagctggagctgcagctgcggtctgagcagcagaaggccacagagaaggagcgggtggcccaggagaaggaccagctgcaggagcagctgcaggccctgaaggagagcctgaaggtgaccaagggcagcctggaggaggagaagagaagagctgctgatgccctggaggagcagcagcgctgcatcagcgagctgaaggccgagaccaggagcctggtggagcagcacaagcgggagaggaaggagctggaggaggagcgggccggcaggaagggcctggaggcccggctgcagcagctgggggaggcccaccaggccgagacagaggtgctgcggcgggagctggccgaggccatggccgcccagcacacagctgagagtgaatgtgagcagctggtgaaggaggtggccgcctggagggagagatatgaggacagccagcaggaggaggcccagtatggagccatgttccaggagcagctgatgaccctgaaggaggagtgtgagaaggcccggcaggagctgcaggaggccaaggagaaggtggccggcatcgagagccacagcgagctgcagatcagccggcagcagaatgagctggccgagctgcacgccaacctggcccgggccctgcagcaggtgcaggagaaggaggtgcgggcccagaagctggctgatgacctgagcaccctgcaggagaagatggccgccaccagcaaggaggtggcccggctggagaccctggtgaggaaggccggggagcagcaggagacagccagccgggagctggtgaaggagcccgcccgggccggggaccggcagcctgagtggctggaggagcagcagggccggcagttctgcagcacccaggccgccctgcaggccatggagcgggaggccgagcagatgggaaatgagctggagcggctgcgggccgccctgatggagagccagggccagcagcaggaggagcggggccagcaggagcgggaggtggcccggctgacccaggagcggggccgggcccaggccgacctggccctggagaaggccgcccgggcagagctggagatgaggctgcagaatgccctgaatgagcagagggtggagtttgccaccctgcaggaggccctggcccacgccctgacagagaaggagggcaaggaccaggagctggccaagctgcggggcctggaggccgcccagatcaaggagctggaggagctgcggcagacagtgaagcagctgaaggagcagctggccaagaaggagaaggagcacgccagcggcagcggggcccagagcgaggccgccggccgcacagagcccaccggccccaagctggaggccctgcgggcagaggtgtccaagctggagcagcagtgccagaagcagcaggagcaggccgacagcctggagaggagcctggaggccgagcgggccagcagagctgagcgggacagcgccctggagaccctgcagggccagctggaggagaaggcccaggagctgggccacagccagagcgccctggccagcgcccagcgggagctggccgccttccgcaccaaggtgcaggaccacagcaaggccgaggatgagtggaaggcccaggtggcccggggccggcaggaggccgagaggaagaacagcctcatcagcagcctggaggaggaggtgtccatcctgaaccggcaggtgctggagaaggagggggagagcaaggagctgaagaggctggtgatggccgagagcgagaagagccagaagctggaggagcggctgcggctgctgcaggccgagacagccagcaacagcgcccgggctgctgagaggagcagcgccctgcgggaggaggtgcagagcctgcgggaggaggccgagaagcagagggtggccagcgagaacctgcggcaggagctgaccagccaggccgagcgggcagaggagctgggccaggagctgaaggcctggcaggagaagttcttccagaaggagcaggccctgagcaccctgcagctggagcacaccagcacccaggccctggtgtctgagctgctgcctgccaagcacctgtgccagcagctgcaggccgagcaggccgctgctgagaagaggcaccgggaggagctggagcagagcaagcaggccgccggcggcctgcgggcagagctgctgcgggcccagcgggagctgggggagctgatccccctgcggcagaaggtggccgagcaggagaggacagcccagcagctgcgggcagagaaggccagctatgcagagcagctgtccatgctgaagaaggcccacggcctgctggccgaggagaacagaggcctgggggagcgggccaacctgggccggcagttcctggaggtggagctggaccaggcccgggagaagtatgtgcaggagctggccgctgtgcgggcagatgctgagacccggctggccgaggtgcagcgggaggcccagagcacagcccgggagctggaggtgatgacagccaagtatgagggcgccaaggtgaaggtgctggaggagcggcagcgcttccaggaggagcggcagaagctgacagcccaggtggagcagctggaggtgttccagcgggagcagaccaagcaggtggaggagctgagcaagaagctggccgacagcgaccaggccagcaaggtgcagcagcagaagctgaaggctgtgcaggcccagggcggggagagccagcaggaggcccagaggctgcaggcccagctgaatgagctgcaggcccagctgagccagaaggagcaggccgctgagcactacaagctgcagatggagaaggccaagacccactatgatgccaagaagcagcagaaccaggagctgcaggagcagctgcggagcctggagcagctgcagaaggagaacaaggagctgcgggcagaggccgagcggctgggccacgagctgcagcaggccggcctgaagaccaaggaggccgagcagacctgccgccacctgacagcccaggtgcgcagcctggaggcccaggtggcccacgccgaccagcagctgcgggacctgggcaagttccaggtggccacagatgccctgaagagccgggagccccaggccaagccccagctggacctgagcattgacagcctggacctgagctgtgaggagggcacccccctgagcatcaccagcaagctgcccaggacccagccagatggcacctctgtgcctggagagcccgccagccccatcagccagaggctgccccccaaggtggagagcctggagagcctgtacttcacccccatcccagcccggagccaggcccccctggagagcagcctggacagcctgggagatgtgttcctggacagcggcaggaagaccaggtctgcccggcggaggaccacccagatcatcaacatcaccatgaccaagaagctggatgtggaggagccagacagcgccaacagcagcttctacagcaccaggtctgccccagccagccaggccagcctgcgggccaccagcagcacccagagcctggcccggctgggcagcccagactatggcaacagcgccctgctgagcctgcccggctaccggcccaccaccaggagcagcgcccggcgcagccaggccggcgtgtcctctggggcccctcctggaagaaattccttctacatgggcacctgccaggatgagcctgagcagctggatgactggaacagaattgctgagctgcagcagaggaacagagtgtgccccccccacctgaagacctgctaccccctggagagccggcccagcctgagcctgggcaccatcacagatgaggagatgaagacaggagacccccaggagaccctgcggcgggcctccatgcagcccatccagattgctgagggcaccggcatcaccacccggcagcagaggaagagggtgtccctggagccccaccagggccctggcaccccagagagcaagaaggccaccagctgcttcccccggcccatgaccccccgggacagacatgagggcaggaagcagagcaccacagaggcccagaagaaggccgccccagccagcaccaagcaggccgaccggcggcagagcatggccttcagcatcctgaacacccccaagaagctgggcaacagcctgctgcggcggggggccagcaagaaggccctgagcaaggccagccccaacaccaggagcggcaccaggaggagcccccgcatcgccaccaccacagccagcgctgccacagctgctgccatcggggccaccccccgggccaagggcaaggccaagcactag

SEQ ID NO: 162574 - DNA, 2076 bp, Artificial Sequence
  derived and/or modified sequence
atgaccctgcacgccaccagaggagctgccctgctgtcctgggtgaacagcctgcacgtggccgaccctgtggaggccgtgctgcagctgcaggactgcagcatcttcatcaagatcatcgaccgcatccacggcacagaggagggccagcagatcctgaagcagcctgtgtctgagcggctggactttgtgtgcagcttcctgcagaagaacaggaagcaccccagcagcccagaatgtctggtgtctgcccagaaggtgctggagggcagcgagctggagctggccaagatgaccatgctgctgctgtaccacagcaccatgagcagcaagagcccccgggactgggagcagtttgagtacaagatccaggccgagctggccgtcatcctgaagtttgtgctggaccatgaagatggcctgaacctgaatgaagacctggagaacttcctgcagaaggcccctgtgcccagcacctgcagcagcaccttccctgaggagctgagcccccccagccaccaggccaagcgggagatccgcttcctggagctgcagaaggtggccagcagcagcagcggcaacaacttcctgagcggcagccctgccagccccatgggagacatcctgcagaccccccagttccagatgaggcggctgaagaagcagctggctgatgagaggagcaacagagatgagctggagctggagctggctgaaaataggaagctgctgacagagaaggatgcccagatcgccatgatgcagcagagaattgaccggctggccctgctgaatgagaagcaggccgccagccccctggagcccaaggagctggaggagctgcgggacaagaatgaaagcctgaccatgaggctgcacgagaccctgaagcagtgccaggacctgaagacagagaagagccagatggacaggaagatcaaccagctgtctgaagaaaatggagacctgtccttcaagctgcgggagtttgccagccacctgcagcagctgcaggatgccctgaatgagctgacagaggagcacagcaaggccacccaggagtggctggagaagcaggcccagctggagaaggagctgtctgctgccctgcaggacaagaagtgcctggaggagaagaatgagatcctgcagggcaagctgagccagctggaggagcacctgagccagctgcaggacaaccccccccaggagaagggggaggtgctgggagatgtgctgcagctggagaccctgaagcaggaggccgccaccctggccgccaacaacacccagctgcaggcccgggtggagatgctggagacagagcggggccagcaggaggccaagctgctggccgagcggggccactttgaggaggagaagcagcagctgagcagcctcatcacagacctgcagagcagcatcagcaacctgagccaggccaaggaggagctggagcaggccagccaggcccacggggcccggctgacagcccaggtggccagcctgaccagcgagctgaccaccctgaatgccaccatccagcagcaggaccaggagctggccggcctgaagcagcaggccaaggagaagcaggcccagctggcccagaccctgcagcagcaggagcaggccagccagggcctgcggcaccaggtggagcagctgagcagcagcctgaagcagaaggagcagcagctgaaggaggtggccgagaagcaggaggccacccggcaggaccacgcccagcagctggccacagctgctgaggagcgggaggccagcctgcgggagagagatgctgccctgaagcagctggaggccctggagaaggagaaggccgccaagctggagatcctgcagcagcagctgcaggtggccaatgaggcccgggacagcgcccagacctctgtgacccaggcccagcgggagaaggccgagctgagcaggaaggtggaggagctgcaggcctgtgtggagacagcccggcaggagcagcacgaggcccaggcccaggtggccgagctggagctgcagctgcggtctgagcagcagaaggccacagagaaggagtag

SEQ ID NO: 162575 - DNA, 2559 bp, Artificial Sequence
  derived and/or modified sequence
atgaccctgcacgccaccagaggagctgccctgctgtcctgggtgaacagcctgcacgtggccgaccctgtggaggccgtgctgcagctgcaggactgcagcatcttcatcaagatcatcgaccgcatccacggcacagaggagggccagcagatcctgaagcagcctgtgtctgagcggctggactttgtgtgcagcttcctgcagaagaacaggaagcaccccagcagcccagaatgtctggtgtctgcccagaaggtgctggagggcagcgagctggagctggccaagatgaccatgctgctgctgtaccacagcaccatgagcagcaagagcccccgggactgggagcagtttgagtacaagatccaggccgagctggccgtcatcctgaagtttgtgctggaccatgaagatggcctgaacctgaatgaagacctggagaacttcctgcagaaggcccctgtgcccagcacctgcagcagcaccttccctgaggagctgagcccccccagccaccaggccaagcgggagatccgcttcctggagctgcagaaggtggccagcagcagcagcggcaacaacttcctgagcggcagccctgccagccccatgggagacatcctgcagaccccccagttccagatgaggcggctgaagaagcagctggctgatgagaggagcaacagagatgagctggagctggagctggctgaaaataggaagctgctgacagagaaggatgcccagatcgccatgatgcagcagagaattgaccggctggccctgctgaatgagaagcaggccgccagccccctggagcccaaggagctggaggagctgcgggacaagaatgaaagcctgaccatgaggctgcacgagaccctgaagcagtgccaggacctgaagacagagaagagccagatggacaggaagatcaaccagctgtctgaagaaaatggagacctgtccttcaagctgcgggagtttgccagccacctgcagcagctgcaggatgccctgaatgagctgacagaggagcacagcaaggccacccaggagtggctggagaagcaggcccagctggagaaggagctgtctgctgccctgcaggacaagaagtgcctggaggagaagaatgagatcctgcagggcaagctgagccagctggaggagcacctgagccagctgcaggacaaccccccccaggagaagggggaggtgctgggagatgtgctgcagctggagaccctgaagcaggaggccgccaccctggccgccaacaacacccagctgcaggcccgggtggagatgctggagacagagcggggccagcaggaggccaagctgctggccgagcggggccactttgaggaggagaagcagcagctgagcagcctcatcacagacctgcagagcagcatcagcaacctgagccaggccaaggaggagctggagcaggccagccaggcccacggggcccggctgacagcccaggtggccagcctgaccagcgagctgaccaccctgaatgccaccatccagcagcaggaccaggagctggccggcctgaagcagcaggccaaggagaagcaggcccagctggcccagaccctgcagcagcaggagcaggccagccagggcctgcggcaccaggtggagcagctgagcagcagcctgaagcagaaggagcagcagctgaaggaggtggccgagaagcaggaggccacccggcaggaccacgcccagcagctggccacagctgctgaggagcgggaggccagcctgcgggagagagatgctgccctgaagcagctggaggccctggagaaggagaaggccgccaagctggagatcctgcagcagcagctgcaggtggccaatgaggcccgggacagcgcccagacctctgtgacccaggcccagcgggagaaggccgagctgagcaggaaggtggaggagctgcaggcctgtgtggagacagcccggcaggagcagcacgaggcccaggcccaggtggccgagctggagctgcagctgcggtctgagcagcagaaggccacagagaaggagcgggtggcccaggagaaggaccagctgcaggagcagctgcaggccctgaaggagagcctgaaggtgaccaagggcagcctggaggaggagaagagaagagctgctgatgccctggaggagcagcagcgctgcatcagcgagctgaaggccgagaccaggagcctggtggagcagcacaagcgggagaggaaggagctggaggaggagcgggccggcaggaagggcctggaggcccggctgcagcagctgggggaggcccaccaggccgagacagaggtgctgcggcgggagctggccgaggccatggccgcccagcacacagctgagagtgaatgtgagcagctggtgaaggaggtggccgcctggagggagagatatgaggacagccagcaggaggaggcccagtatggagccatgttccaggagcagctgatgaccctgaaggaggagtgtgagaaggcccggcaggagctgcaggaggcctag

SEQ ID NO: 162576 - DNA, 6348 bp, Artificial Sequence
  derived and/or modified sequence
atgaccctgcacgccacccggggcgccgccctgctgagctgggtgaacagcctccacgtcgcagatcccgtggaggcggtgctccaactgcaggactgttccattttcattaaaatcatcgatagaattcatggtaccgaagaggggcagcagatactaaagcagccggtatcagaacggctggactttgtctgtagctttctccagaagaaccgtaaacacccatcatctccagagtgcctggtctctgcacagaaagtgctagagggcagtgagcttgaactcgctaaaatgacaatgctgctgctctatcattctactatgagctctaagagcccacgcgactgggagcagttcgagtacaagatccaggctgagcttgctgtcatactgaagtttgtgctggatcatgaagatggccttaatctcaacgaagacctcgaaaactttctacagaaagcacccgtaccttcgacatgctccagtacctttcccgaagagctgagtccgccctctcatcaagcaaagagggaaatacggttccttgaattacagaaagtcgcaagctcgagctccggcaacaatttcctgtccggctctccagcttcacctatgggcgacattctgcaaacacctcagttccagatgaggcgtctaaagaagcaactggctgacgaacgctcaaatagggacgaactcgagcttgagctcgcggagaatcggaagctcctgactgaaaaggacgcacagatcgccatgatgcagcagcgaatagatcgtttagctcttctcaatgaaaaacaggcagccagtcccctggaaccaaaggagctcgaggagctgcgggacaaaaatgagtctttgactatgcgacttcacgaaacactgaagcagtgtcaggacttaaaaacggagaagagccagatggaccgtaagatcaatcagttaagcgaggagaacggcgatctctccttcaagttacgggagttcgcttctcatttgcagcagttacaggatgctctgaatgagctcacggaagaacattcgaaggctacacaggaatggctggaaaagcaagctcagctcgagaaagagctatccgccgcactgcaggataagaagtgcctggaagagaaaaacgaaatactgcagggcaaactttcacaactcgaagagcacttatcacagttacaagataaccccccacaggagaagggagaagtgctcggagacgttctgcaattagagacgctgaaacaggaggcagctacgctcgccgccaataatactcagctgcaggccagagtggagatgttggaaacagaacgcggacagcaggaggccaaactcctggccgaacggggtcactttgaggaggagaagcaacagctctcttccttaattacggatctccagtcaagtatcagtaacctatcccaggccaaggaagagttagagcaagcaagccaggcacacggcgctcggcttactgctcaggtggcatctctgactagtgagcttactacactcaacgcaacaattcagcaacaggatcaggagctcgcaggcctgaagcagcaggctaaggaaaaacaggctcaactggcccaaacactgcaacagcaggaacaggccagccagggtttgcgccaccaagtagagcagctcagtagctcactaaaacagaaagaacaacagcttaaagaagtggctgaaaaacaggaagctaccagacaggatcatgctcaacagctggctacagctgccgaggagcgtgaggcatccctgagagaacgtgatgccgccctaaagcagctcgaagccctcgagaaagaaaaagcagccaagctggagattcttcagcagcagctccaggtcgcaaacgaagccagagacagcgcccagacctctgtgacccaggcgcagagagagaaggctgagcttagcagaaaggttgaagaacttcaggcttgcgttgagactgcaaggcaggaacaacacgaagctcaagcgcaggttgccgaactggaacttcagctgaggtccgagcagcagaaggccaccgagaaggagagagtcgctcaagagaaggatcagctgcaagagcagcttcaggcgctgaaagagtcactgaaagtcactaaaggctcgctagaggaggaaaaaagaagagctgcagatgcattagaagaacaacaacgatgcatctccgagctgaaggcggagacccgatcacttgtcgaacagcacaaaagggagcgtaaagaacttgaagaggaaagggccggccgtaaaggtctcgaagctcggctgcagcagctgggggaggctcaccaagcagaaaccgaagtcctgagaagagagctagccgaggctatggccgcacagcacaccgctgagagtgaatgtgagcagctggtcaaggaagtagccgcttggcgggaacgttacgaggactctcaacaggaagaagcccagtacggcgcgatgtttcaggaacagctcatgactctgaaagaagagtgcgagaaagccaggcaggaactgcaggaagccaaagagaaggtggcaggtatcgaaagccattctgaactgcaaatttcacgacagcaaaacgaactagcagagctacatgcaaacctcgcgcgggccttgcagcaggtccaggaaaaggaggtcagggcccagaaactcgcagacgatctgagcacccttcaggagaagatggcagctacgtccaaagaagtggctcgcctggagaccctggtgcggaaggcgggggaacaacaagagaccgccagcagggagctcgtaaaagaacccgcccgagccggtgacagacagcccgagtggctggaggagcagcagggtagacagttctgtagcacccaagccgctctgcaggctatggagagggaagctgaacagatggggaatgagctggaaagactcagggcagccctgatggaaagtcagggtcagcagcaggaggaacgtggccagcaggagcgagaggtagccagacttactcaggagaggggtcgcgcacaggcggacctggctcttgagaaggcagctagagctgagctggaaatgcgtttgcaaaacgccctcaatgaacagcgtgtcgaattcgccacactacaggaggcactcgcccacgcgctgactgagaaagaaggtaaggaccaagaattggccaaactgcgagggctggaagctgcccaaatcaaggagttggaagagctgaggcagactgtgaagcaactgaaagaacagttggcaaagaaagagaaagagcatgctagcggttccggggctcagtctgaggcagctggccgcaccgagccaacggggccaaagctggaggcactgagggctgaggtgtcgaaacttgaacagcagtgccagaaacaacaggaacaagccgactccctggagcggtctttggaagctgaacgggcgtcaagagcggaaagagactctgccctggagaccctccaaggacaacttgaggagaaagcccaagagcttggtcactcacagtctgctttggcctccgcccagcgcgagctggccgcctttcggacaaaagtgcaggaccactctaaagcggaggatgagtggaaggcacaggtagctcgaggcagacaagaagcggagaggaagaactctctcataagctccctggaggaggaagtgagtatcctcaaccgccaggttctcgagaaagagggtgagagcaaagagcttaagaggcttgtgatggccgaatctgaaaagtcccagaagctggaggagcggctgaggttgttacaggcggaaaccgctagcaacagcgcccgtgctgcagagcgttcctcggccctgcgcgaggaagtgcaaagccttcgcgaggaagcggaaaaacaacgagtggcctccgaaaatttgagacaggagcttaccagccaggctgagagagcggaagagcttgggcaagaactgaaagcatggcaagagaaattcttccagaaggagcaggctctttccacactgcaactggagcataccagcacacaggccctcgtgagcgagctgctccctgccaagcacctttgccagcagttacaggccgagcaggcggcggcagagaaacgccacagagaggaactggagcagagtaagcaggcagcaggcggtctaagggctgaattactccgtgcccaaagagagctcggagagttgatcccattgcggcagaaagtggccgagcaggagcggaccgctcagcagcttcgcgctgaaaaagccagctatgctgagcagcttagcatgctaaaaaaagcccacggccttcttgccgaggagaacagaggcctgggcgagagagcaaacttaggacgacagttcctggaggtggagttggaccaagctcgcgaaaagtacgtgcaggagctcgccgctgtacgggcagacgctgagactcgccttgccgaggtacagagggaggcacagtcaacagccagagaactcgaggtgatgacagctaagtacgaaggggcaaaggtgaaagtcctggaagagagacagcggtttcaggaggaacggcagaagctgactgcacaggtggagcagctggaagtgtttcagcgtgagcagactaaacaggtggaggaattgtcaaaaaaattggctgattccgatcaggctagcaaagtgcagcagcagaaactcaaagccgtccaggcacagggtggggagtcacagcaagaggcacagagattgcaggcacagcttaatgagcttcaggctcagctgtcacagaaggaacaggcggccgagcactacaagctgcagatggaaaaggcaaaaacacactacgatgcgaaaaagcagcagaatcaggagctgcaggagcagctgcgctccctagaacagctacagaaggaaaataaagagctgcgcgctgaggctgagagattgggccatgaactccagcaggccggcctaaagaccaaggaagcagaacagacgtgtaggcatttaacagcccaggtccgtagtctggaggcgcaggtggcccacgcggaccagcagctccgagatctcggcaaatttcaggtggccaccgacgccctgaagagccgagagccacaagctaaaccccagctcgacctctccattgattcattggatctgtcatgcgaggagggaacacctctgagcatcacttctaaactgcccagaacacagccagatgggacctctgtgcccggagaacctgcatctccaatttctcagcgcctcccgcctaaagtggaatccttagagagcctgtacttcacccctattcccgcccgctcccaggctcccctggagagttcattagactctctgggggacgtatttcttgatagcggcaggaagactcgctctgcacggcggcgcactactcagatcattaatatcactatgacaaagaaattggacgttgaagaacccgactcagccaatagctccttctattccactcgttccgcgcccgcgtctcaggcgtccttacgcgctacaagttctacccagtcgttagccagattgggtagccctgactatggaaatagtgcactgctgtcactcccaggctacaggcctactacaagatcaagtgccagacgctcccaagcaggagtctcatctggcgccccccccgggcggaactcattttacatgggaacttgccaggatgagccagagcagctggatgattggaacagaatcgctgagctgcaacaaaggaacagagtctgccctccccatctgaagacatgttatcccctcgaatccaggccatcactgagtctggggaccatcacggacgaagaaatgaagacaggagaccctcaggagacgctgcgccgtgcttcgatgcagcctatccagatagccgagggtactgggatcactacccgccagcagagaaaacgcgtgagcttggaaccccatcaaggacctggaactcccgagtccaagaaggccacttcatgtttccctcgccctatgacaccccgagaccggcacgaaggcagaaagcagtcaacaactgaggcccagaagaaggccgctccagccagtactaagcaagcagaccggcgtcagtctatggcatttagtatactgaatacccccaaaaaattagggaactcgttgctgagacgcggggccagtaaaaaagccctctcaaaagctagtcccaatacccgatctggaacacgccggagccctagaattgccaccacaaccgcttctgcagccacagctgcagcgatcggtgcaacaccccgcgccaagggcaaagccaaacattag

SEQ ID NO: 162577 - DNA, 2076 bp, Artificial Sequence
  derived and/or modified sequence
atgaccctgcacgccacccggggcgccgccctgctgagctgggtgaacagcctgcatgtggcagacccggtggaggctgtgctacagctccaggactgcagtatatttattaaaattattgaccggattcacgggacagaggaaggtcagcagatactgaaacagcccgtctcagagagacttgactttgtgtgcagctttttgcagaagaataggaaacacccttcatcgccagaatgcctcgtttccgctcaaaaagtcttggaaggctctgagttagagttagccaagatgactatgctgttgctgtatcacagtaccatgtcatccaagagcccacgcgactgggaacagttcgaatacaaaatccaagccgaattggctgtgattcttaagtttgttctcgatcatgaagacgggctaaatctcaacgaagatctggaaaattttctgcaaaaagcccctgtcccttcgacatgttcctccacatttcctgaggaactgagccctccatcacatcaggccaaaagagagatcaggttcttggagcttcagaaagtagcatcaagcagcagtggaaataatttcctttccggctcccctgctagcccaatgggcgatatcctgcagactccccagtttcagatgcgtcgcctaaagaagcaactggctgacgaacgttcgaatagagatgaactagaactcgagctcgcagagaataggaagctccttactgaaaaagatgctcaaatcgccatgatgcagcagcgaatcgatcggttagcactgctcaatgagaaacaggctgcgagccccctggaacccaaagagttggaagaattaagggacaaaaatgagagcctcacaatgcgtcttcacgaaaccctgaagcagtgccaggatcttaaaacggaaaaaagccaaatggaccgcaaaataaaccagttgagcgaggagaacggagacctgagttttaagctgcgggaatttgcctctcacctgcagcaattgcaggacgctcttaatgagctgaccgaggagcattccaaagctacccaggaatggctggagaaacaggctcagctggaaaaagaactgagtgccgctctacaggacaagaaatgccttgaggaaaagaacgagattctgcagggcaagctgtcgcaacttgaagagcacctcagccagttgcaggataaccctccccaagaaaagggtgaagttctgggggacgtcctacagcttgagacgctgaaacaggaggccgcaacactggctgccaacaatacacagctgcaggcacgagtggaaatgctcgaaactgaacgcggccagcaagaggctaagctgctggccgagaggggccactttgaggaggagaagcagcagctcagcagcctgattactgatctgcagagctccatcagtaacttgagccaggccaaagaagagctggaacaagcatctcaggcccacggcgcaagattgacagcgcaggtggcatcacttacgagtgagctcaccaccctgaatgcaaccattcagcagcaagatcaggagctggcaggactgaaacagcaggctaaggagaagcaggcccagctagcacagaccctgcagcagcaagagcaagctagccaaggcctgcgtcaccaagtagagcagctatcatccagcttgaagcagaaggaacagcagctcaaagaggtggcagagaaacaggaggcgacacggcaggatcacgctcagcagctggctaccgctgccgaagagcgcgaggctagtttaagggagagggacgcagcgctgaagcagctggaggcccttgagaaagagaaggcagccaagctggagatcctgcagcagcagctgcaggtggctaacgaggcccgggattctgctcagacgtccgtaacgcaggctcaacgcgagaaagcggagctgagcaggaaagtggaagaattgcaggcctgtgtcgaaaccgctcgccaggagcagcatgaggcccaagcccaggtagccgaacttgagcttcagctgcgctccgaacagcaaaaggccactgaaaaagagtag

SEQ ID NO: 162578 - DNA, 2559 bp, Artificial Sequence
  derived and/or modified sequence
atgaccctgcacgccacccggggcgccgccctgctgagctgggtgaactcactgcacgttgcagatcccgtggaggccgtcctgcaactccaggattgtagtatcttcattaagattatcgatagaatccatggtactgaagagggccagcagatactaaagcagcctgtttctgagagactcgacttcgtatgtagtttccttcagaagaaccgaaagcatccatcctcacctgagtgcttggtgtctgcccagaaggttttggagggcagtgagctcgaactggccaaaatgaccatgttgctgctttatcacagcactatgagcagtaaaagcccacgggattgggagcagtttgaatacaaaatccaggcagagcttgccgtcattttgaagttcgtgcttgaccacgaggatggactgaatcttaatgaggacctggagaacttcctccagaaagctccagtgccatcaacatgcagttccacctttcccgaggagttgtctcctccttcccaccaagccaagcgcgaaatacggttcctggagcttcagaaagtggcttccagcagttcgggtaacaacttcctgtcaggaagcccggcgagtcctatgggagacattctgcagacccctcagttccagatgcggcggttgaaaaaacagttagcagacgaacggagcaacagagatgagctcgagctcgagctggctgagaataggaaacttcttaccgagaaggatgctcaaatagctatgatgcagcagcgtatcgatcgacttgccctcctcaacgaaaagcaggccgccagtcccctggaaccaaaggagttggaagaattacgagacaagaacgaaagcctaaccatgagactgcacgagactttaaagcagtgtcaggaccttaagaccgagaaatcacagatggaccggaaaattaatcagctgtccgaggaaaacggagacttgagttttaagcttagagagttcgcctctcacctgcagcagctgcaggacgccctaaacgaactgactgaggaacactcgaaggcgacacaggaatggttagagaaacaggctcagcttgagaaggagctgtcagccgccttacaggataagaagtgcctggaggaaaagaacgagatcctccagggcaaactgagccagctcgaagagcatctctcccagcttcaggataaccccccacaggagaagggcgaagtgttgggggatgtcctgcagctggagacgctgaagcaggaggcagccacacttgcagcgaataatacccagctccaggccagagtcgaaatgctggagacggagagaggacagcaggaagccaaattgctcgccgagaggggccacttcgaggaagaaaagcagcagttatcctctctcattaccgacttgcagtcatccatatccaacctatcccaggcaaaggaggaactggaacaggcctcccaagctcacggtgcacgcctgacggcccaagtcgcttctctgacctcagagctgaccactctgaatgcgacaatccagcagcaggaccaggaactggccggtcttaagcagcaggcgaaggaaaaacaggcacagctcgcccagaccctgcaacaacaagagcaagcttcccaggggttgagacaccaggtagaacagcttagttctagtttgaagcaaaaagagcagcagctcaaagaggtggctgagaagcaggaagctacaagacaggatcatgctcagcaattggcgactgccgccgaggagcgtgaagccagcttacgcgaacgggatgccgcactgaagcagctcgaagcgctggaaaaggaaaaggctgcaaagcttgaaatcctgcaacaacagctgcaggtcgccaacgaggctcgcgactcagcccaaaccagcgtgactcaggcccagagggagaaggcagagctgagtagaaaggttgaggagcttcaggcctgtgtagaaaccgcccgacaggagcagcacgaggcacaggcccaggtggcggagctcgagctgcagttgcgatccgaacagcagaaagccactgaaaaggagagagtcgcacaggaaaaagaccagctccaggagcagcttcaggcccttaaagagagcttgaaagtgaccaaagggtcattggaggaggagaaacgtcgtgctgcagacgctttagaagaacagcagcgctgtatttcggaactgaaagccgagacccggtcactggttgaacagcataaaagagaaaggaaggagcttgaggaagagagggcgggccgaaaaggacttgaggcccgactacagcaactgggagaggcccaccaggccgagaccgaggtgctgcggagagagctggccgaggctatggcggcacaacacacggcggaaagcgagtgtgagcaactggtgaaagaggtggctgcttggagagagcggtatgaagatagccagcaagaggaggctcagtacggcgccatgttccaggagcaattgatgacgctgaaagaagagtgcgaaaaggcccgccaggagcttcaggaggcctag

SEQ ID NO: 162579 - DNA, 7343 bp, Artificial Sequence
  derived and/or modified sequence
aagtacaggccggggtccggaagcggtgataccccttctctttcccagtggccctcaaacttccttttcccgggtccttaagcgggccccgccgacagaggccaatcagagggcagcgcgagggggcggggccatagtttaaactaattgtgcgctcacagcgctggcgcgagcccacgaagaggtacgattccggagaatcgcgaggcagagcgggagcgcgcagccaggtggaaactaattctaagccagactgctggagatcaccctgttctagtgtgtggaggcttccaccaggaggcgcattggagtgactgtctggcatcaccaagatgacactccacgccacccggggggctgcactcctctcttgggtgaacagtctacacgtggctgaccctgtggaggctgtgctgcagctccaggactgcagcatcttcatcaagatcattgacagaatccatggcactgaagagggacagcaaatcttgaagcagccggtgtcagagagactggactttgtgtgcagttttctgcagaaaaatcgaaaacatccctcttccccagaatgcctggtatctgcacagaaggtgctagagggatcagagctggaactggcgaagatgaccatgctgctcttataccactctaccatgagctccaaaagtcccagggactgggaacagtttgaatataaaattcaggctgagttggctgtcattcttaaatttgtgctggaccatgaggacgggctaaaccttaatgaggacctagagaacttcctacagaaagctcctgtgccttctacctgttctagcacattccctgaagagctctccccacctagccaccaggccaagagggagattcgcttcctagagctacagaaggttgcctcctcttccagtgggaacaactttctctcaggttctccagcttctcccatgggtgatatcctgcagaccccacagttccagatgagacggctgaagaagcagcttgctgatgagagaagtaatagggatgagctggagctggagctagctgagaaccgcaagctcctcaccgagaaggatgcacagatagccatgatgcagcagcgcattgaccgcctagccctgctgaatgagaagcaggcggccagcccactggagcccaaggagcttgaggagctgcgtgacaagaatgagagccttaccatgcggctgcatgaaaccctgaagcagtgccaggacctgaagacagagaagagccagatggatcgcaaaatcaaccagctttcggaggagaatggagacctttcctttaagctgcgggagtttgccagtcatctgcagcagctacaggatgccctcaatgagctgacggaggagcacagcaaggccactcaggagtggctagagaagcaggcccagctggagaaggagctcagcgcagccctgcaggacaagaaatgccttgaagagaagaacgaaatccttcagggaaaactttcacagctggaagaacacttgtcccagctgcaggataacccaccccaggagaagggcgaggtgctgggtgatgtcttgcagctggaaaccttgaagcaagaggcagccactcttgctgcaaacaacacacagctccaagccagggtagagatgctggagactgagcgaggccagcaggaagccaagctgcttgctgagcggggccacttcgaagaagaaaagcagcagctgtctagcctgatcactgacctgcagagctccatctccaacctcagccaggccaaggaagagctggagcaggcctcccaggctcatggggcccggttgactgcccaggtggcctctctgacctctgagctcaccacactcaatgccaccatccagcaacaggatcaagaactggctggcctgaagcagcaggccaaagagaagcaggcccagctagcacagaccctccaacagcaagaacaggcctcccagggcctccgccaccaggtggagcagctaagcagtagcctgaagcagaaggagcagcagttgaaggaggtagcggagaagcaggaggcaactaggcaggaccatgcccagcaactggccactgctgcagaggagcgagaggcctccttaagggagcgggatgcggctctcaagcagctggaggcactggagaaggagaaggctgccaagctggagattctgcagcagcaacttcaggtggctaatgaagcccgggacagtgcccagacctcagtgacacaggcccagcgggagaaggcagagctgagccggaaggtggaggaactccaggcctgtgttgagacagcccgccaggaacagcatgaggcccaggcccaggttgcagagctagagttgcagctgcggtctgagcagcaaaaagcaactgagaaagaaagggtggcccaggagaaggaccagctccaggagcagctccaggccctcaaagagtccttgaaggtcaccaagggcagccttgaagaggagaagcgcagggctgcagatgccctggaagagcagcagcgttgtatctctgagctgaaggcagagacccgaagcctggtggagcagcataagcgggaacgaaaggagctggaagaagagagggctgggcgcaaggggctggaggctcgattacagcagcttggggaggcccatcaggctgagactgaagtcctgcggcgggagctggcagaggccatggctgcccagcacacagctgagagtgagtgtgagcagctcgtcaaagaagtagctgcctggcgtgagcggtatgaggatagccagcaagaggaggcacagtatggcgccatgttccaggaacagctgatgactttgaaggaggaatgtgagaaggcccgccaggagctgcaggaggcaaaggagaaggtggcaggcatagaatcccacagcgagctccagataagccggcagcagaacgaactagctgagctccatgccaacctggccagagcactccagcaggtccaagagaaggaagtcagggcccagaagcttgcagatgacctctccactctgcaggaaaagatggctgccaccagcaaagaggtggcccgcttggagaccttggtgcgcaaggcaggtgagcagcaggaaacagcctcccgggagttagtcaaggagcctgcgagggcaggagacagacagcccgagtggctggaagagcaacagggacgccagttctgcagcacacaggcagcgctgcaggctatggagcgggaggcagagcagatgggcaatgagctggaacggctgcgggccgcgctgatggagagccaggggcagcagcaggaggagcgtgggcagcaggaaagggaggtggcgcggctgacccaggagcggggccgtgcccaggctgaccttgccctggagaaggcggccagagcagagcttgagatgcggctgcagaacgccctcaacgagcagcgtgtggagttcgctaccctgcaagaggcactggctcatgccctgacggaaaaggaaggcaaggaccaggagttggccaagcttcgtggtctggaggcagcccagataaaagagctggaggaacttcggcaaaccgtgaagcaactgaaggaacagctggctaagaaagaaaaggagcacgcatctggctcaggagcccaatctgaggctgctggcaggacagagccaacaggccccaagctggaggcactgcgggcagaggtgagcaagctggaacagcaatgccagaagcagcaggagcaggctgacagcctggaacgcagcctcgaggctgagcgggcctcccgggctgagcgggacagtgctctggagactctgcagggccagttagaggagaaggcccaggagctagggcacagtcagagtgccttagcctcggcccaacgggagttggctgccttccgcaccaaggtacaagaccacagcaaggctgaagatgagtggaaggcccaggtggcccggggccggcaagaggctgagaggaaaaatagcctcatcagcagcttggaggaggaggtgtccatcctgaatcgccaggtcctggagaaggagggggagagcaaggagttgaagcggctggtgatggccgagtcagagaagagccagaagctggaggagaggctgcgcctgctgcaggcagagacagccagcaacagtgccagagctgcagaacgcagctctgctctgcgggaggaggtgcagagcctccgggaggaggctgagaaacagcgggtggcttcagagaacctgcggcaggagctgacctcacaggctgagcgtgcggaggagctgggccaagaattgaaggcgtggcaggagaagttcttccagaaagagcaggccctctccaccctgcagctcgagcacaccagcacacaggccctggtgagtgagctgctgccagctaagcacctctgccagcagctgcaggccgagcaggccgctgccgagaaacgccaccgtgaggagctggagcagagcaagcaggccgctgggggactgcgggcagagctgctgcgggcccagcgggagcttggggagctgattcctctgcggcagaaggtggcagagcaggagcgaacagctcagcagctgcgggcagagaaggccagctatgcagagcagctgagcatgctgaagaaggcgcatggcctgctggcagaggagaaccgggggctgggtgagcgggccaaccttggccggcagtttctggaagtggagttggaccaggcccgggagaagtatgtccaagagttggcagccgtacgtgctgatgctgagacccgtctggctgaggtgcagcgagaagcacagagcactgcccgggagctggaggtgatgactgccaagtatgagggtgccaaggtcaaggtcctggaggagaggcagcggttccaggaagagaggcagaaactcactgcccaggtggagcagctagaggtatttcagagagagcaaactaagcaggtggaagaactgagtaagaaactggctgactctgaccaagccagcaaggtgcagcagcagaagctgaaggctgtccaggctcagggaggcgagagccagcaggaggcccagcgcctccaggcccagctgaatgaactgcaagcccagttgagccagaaggagcaggcagctgagcactataagctgcagatggagaaagccaaaacacattatgatgccaagaagcagcagaaccaagagctgcaggagcagctgcggagcctggagcagctgcagaaggaaaacaaagagctgcgagctgaagctgaacggctgggccatgagctacagcaggctgggctgaagaccaaggaggctgaacagacctgccgccaccttactgcccaggtgcgcagcctggaggcacaggttgcccatgcagaccagcagcttcgagacctgggcaaattccaggtggcaactgatgctttaaagagccgtgagccccaggctaagccccagctggacttgagtattgacagcctggatctgagctgcgaggaggggaccccactcagtatcaccagcaagctgcctcgtacccagccagacggcaccagcgtccctggagaaccagcctcacctatctcccagcgcctgccccccaaggtagaatccctggagagtctctacttcactcccatccctgctcggagtcaggcccccctggagagcagcctggactccctgggagacgtcttcctggactcgggtcgtaagacccgctccgctcgtcggcgcaccacgcagatcatcaacatcaccatgaccaagaagctagatgtggaagagccagacagcgccaactcatcgttctacagcacgcggtctgctcctgcttcccaggctagcctgcgagccacctcctctactcagtctctagctcgcctgggttctcccgattatggcaactcagccctgctcagcttgcctggctaccgccccaccactcgcagttctgctcgtcgttcccaggccggggtgtccagtggggcccctccaggaaggaacagcttctacatgggcacttgccaggatgagcctgagcagctggatgactggaaccgcattgcagagctgcagcagcgcaatcgagtgtgccccccacatctgaagacctgctatcccctggagtccaggccttccctgagcctgggcaccatcacagatgaggagatgaaaactggagacccccaagagaccctgcgccgagccagcatgcagccaatccagatagccgagggcactggcatcaccacccggcagcagcgcaaacgggtctccctagagccccaccagggccctggaactcctgagtctaagaaggccaccagctgtttcccacgccccatgactccccgagaccgacatgaagggcgcaaacagagcactactgaggcccagaagaaagcagctccagcttctactaaacaggctgaccggcgccagtcgatggccttcagcatcctcaacacacccaagaagctagggaacagccttctgcggcggggagcctcaaagaaggccctgtccaaggcttcccccaacactcgcagtggaacccgccgttctccgcgcattgccaccaccacagccagcgccgccactgctgccgccattggtgccacccctcgagccaagggcaaggcaaagcactaaagggccagtaccagtgagtggccccacctgtgtccccgatgctgacctcacctggtcctccgcctactgtccctctcagtgccttctctcagctcccaggccaacagtagccaaacccctagagacagtgatgcctgcccgcaccctggcctggtccctggtccttcactggcgccttctcggagctggcccagggggcctggagcatggacagtgtgggcgctctccctaccttgcctccttttttcttaaagcaaagtcacttctccatcacaaccagatttgaggctggttttgatggctgggtccttgggcctggccagtcttcctcttagcctctggatctagaagggaccataagaggagtaggccctggttcctgctgtcctggtggctgggcccagcaggggccctcactcttgaagtccaggactgggtctgacctggtgggagcacctgccagaggatgctctttcccaggacggatgggccctatgtctcaggagtggggttgggggacagccttcagcagcagctcacaccctaccttccccagacttgcactggggtgggatttggagtgatgggaaggtttttaagggccggggatggatcttttctaaatgttattacttgtaaataaagtctatttttctcccgtga

SEQ ID NO: 162580 - DNA, 2331 bp, Artificial Sequence
  derived and/or modified sequence
cgggagcgcgcagccaggtaaccggcgcgggcccgcgtttggcgtgcggcctgggcacccctgcgggtgctcaggcctaaaaggggtgctggagaggccgctgcgagcggaaggcctcctccataaccgagtccgaaagggcagaatctatgggggtggaaactaattctaagccagactgctggagatcaccctgttctagtgtgtggaggcttccaccaggaggcgcattggagtgactgtctggcatcaccaagatgacactccacgccacccggggggctgcactcctctcttgggtgaacagtctacacgtggctgaccctgtggaggctgtgctgcagctccaggactgcagcatcttcatcaagatcattgacagaatccatggcactgaagagggacagcaaatcttgaagcagccggtgtcagagagactggactttgtgtgcagttttctgcagaaaaatcgaaaacatccctcttccccagaatgcctggtatctgcacagaaggtgctagagggatcagagctggaactggcgaagatgaccatgctgctcttataccactctaccatgagctccaaaagtcccagggactgggaacagtttgaatataaaattcaggctgagttggctgtcattcttaaatttgtgctggaccatgaggacgggctaaaccttaatgaggacctagagaacttcctacagaaagctcctgtgccttctacctgttctagcacattccctgaagagctctccccacctagccaccaggccaagagggagattcgcttcctagagctacagaaggttgcctcctcttccagtgggaacaactttctctcaggttctccagcttctcccatgggtgatatcctgcagaccccacagttccagatgagacggctgaagaagcagcttgctgatgagagaagtaatagggatgagctggagctggagctagctgagaaccgcaagctcctcaccgagaaggatgcacagatagccatgatgcagcagcgcattgaccgcctagccctgctgaatgagaagcaggcggccagcccactggagcccaaggagcttgaggagctgcgtgacaagaatgagagccttaccatgcggctgcatgaaaccctgaagcagtgccaggacctgaagacagagaagagccagatggatcgcaaaatcaaccagctttcggaggagaatggagacctttcctttaagctgcgggagtttgccagtcatctgcagcagctacaggatgccctcaatgagctgacggaggagcacagcaaggccactcaggagtggctagagaagcaggcccagctggagaaggagctcagcgcagccctgcaggacaagaaatgccttgaagagaagaacgaaatccttcagggaaaactttcacagctggaagaacacttgtcccagctgcaggataacccaccccaggagaagggcgaggtgctgggtgatgtcttgcagctggaaaccttgaagcaagaggcagccactcttgctgcaaacaacacacagctccaagccagggtagagatgctggagactgagcgaggccagcaggaagccaagctgcttgctgagcggggccacttcgaagaagaaaagcagcagctgtctagcctgatcactgacctgcagagctccatctccaacctcagccaggccaaggaagagctggagcaggcctcccaggctcatggggcccggttgactgcccaggtggcctctctgacctctgagctcaccacactcaatgccaccatccagcaacaggatcaagaactggctggcctgaagcagcaggccaaagagaagcaggcccagctagcacagaccctccaacagcaagaacaggcctcccagggcctccgccaccaggtggagcagctaagcagtagcctgaagcagaaggagcagcagttgaaggaggtagcggagaagcaggaggcaactaggcaggaccatgcccagcaactggccactgctgcagaggagcgagaggcctccttaagggagcgggatgcggctctcaagcagctggaggcactggagaaggagaaggctgccaagctggagattctgcagcagcaacttcaggtggctaatgaagcccgggacagtgcccagacctcagtgacacaggcccagcgggagaaggcagagctgagccggaaggtggaggaactccaggcctgtgttgagacagcccgccaggaacagcatgaggcccaggcccaggttgcagagctagagttgcagctgcggtctgagcagcaaaaagcaactgagaaagaaa

SEQ ID NO: 162581 - DNA, 2766 bp, Artificial Sequence
  derived and/or modified sequence
gcacttctggctgtcagccaggaagatcgctcctgccaggcagactgagaagaaaaccaacaacttttcttttgtgtgtggggttactttccactggcccccccttcctcctctcctttcaagatttaaatgctaatggcggattaaaacctgtagatacgtttggctttaggagtctggcgcattggagtgactgtctggcatcaccaagatgacactccacgccacccggggggctgcactcctctcttgggtgaacagtctacacgtggctgaccctgtggaggctgtgctgcagctccaggactgcagcatcttcatcaagatcattgacagaatccatggcactgaagagggacagcaaatcttgaagcagccggtgtcagagagactggactttgtgtgcagttttctgcagaaaaatcgaaaacatccctcttccccagaatgcctggtatctgcacagaaggtgctagagggatcagagctggaactggcgaagatgaccatgctgctcttataccactctaccatgagctccaaaagtcccagggactgggaacagtttgaatataaaattcaggctgagttggctgtcattcttaaatttgtgctggaccatgaggacgggctaaaccttaatgaggacctagagaacttcctacagaaagctcctgtgccttctacctgttctagcacattccctgaagagctctccccacctagccaccaggccaagagggagattcgcttcctagagctacagaaggttgcctcctcttccagtgggaacaactttctctcaggttctccagcttctcccatgggtgatatcctgcagaccccacagttccagatgagacggctgaagaagcagcttgctgatgagagaagtaatagggatgagctggagctggagctagctgagaaccgcaagctcctcaccgagaaggatgcacagatagccatgatgcagcagcgcattgaccgcctagccctgctgaatgagaagcaggcggccagcccactggagcccaaggagcttgaggagctgcgtgacaagaatgagagccttaccatgcggctgcatgaaaccctgaagcagtgccaggacctgaagacagagaagagccagatggatcgcaaaatcaaccagctttcggaggagaatggagacctttcctttaagctgcgggagtttgccagtcatctgcagcagctacaggatgccctcaatgagctgacggaggagcacagcaaggccactcaggagtggctagagaagcaggcccagctggagaaggagctcagcgcagccctgcaggacaagaaatgccttgaagagaagaacgaaatccttcagggaaaactttcacagctggaagaacacttgtcccagctgcaggataacccaccccaggagaagggcgaggtgctgggtgatgtcttgcagctggaaaccttgaagcaagaggcagccactcttgctgcaaacaacacacagctccaagccagggtagagatgctggagactgagcgaggccagcaggaagccaagctgcttgctgagcggggccacttcgaagaagaaaagcagcagctgtctagcctgatcactgacctgcagagctccatctccaacctcagccaggccaaggaagagctggagcaggcctcccaggctcatggggcccggttgactgcccaggtggcctctctgacctctgagctcaccacactcaatgccaccatccagcaacaggatcaagaactggctggcctgaagcagcaggccaaagagaagcaggcccagctagcacagaccctccaacagcaagaacaggcctcccagggcctccgccaccaggtggagcagctaagcagtagcctgaagcagaaggagcagcagttgaaggaggtagcggagaagcaggaggcaactaggcaggaccatgcccagcaactggccactgctgcagaggagcgagaggcctccttaagggagcgggatgcggctctcaagcagctggaggcactggagaaggagaaggctgccaagctggagattctgcagcagcaacttcaggtggctaatgaagcccgggacagtgcccagacctcagtgacacaggcccagcgggagaaggcagagctgagccggaaggtggaggaactccaggcctgtgttgagacagcccgccaggaacagcatgaggcccaggcccaggttgcagagctagagttgcagctgcggtctgagcagcaaaaagcaactgagaaagaaagggtggcccaggagaaggaccagctccaggagcagctccaggccctcaaagagtccttgaaggtcaccaagggcagccttgaagaggagaagcgcagggctgcagatgccctggaagagcagcagcgttgtatctctgagctgaaggcagagacccgaagcctggtggagcagcataagcgggaacgaaaggagctggaagaagagagggctgggcgcaaggggctggaggctcgattacagcagcttggggaggcccatcaggctgagactgaagtcctgcggcgggagctggcagaggccatggctgcccagcacacagctgagagtgagtgtgagcagctcgtcaaagaagtagctgcctggcgtgagcggtatgaggatagccagcaagaggaggcacagtatggcgccatgttccaggaacagctgatgactttgaaggaggaatgtgagaaggcccgccaggagctgcaggaggc

SEQ ID NO: 162582 - DNA, 6347 bp, Artificial Sequence
  derived and/or modified sequence
atgacgttgcacgccaccagaggagctgcgctcctgtcctgggtgaattcactccacgttgccgacccagttgaggctgtcttgcaattacaggattgctcaattttcattaaaatcatagaccggatccatgggactgaagaaggacagcaaatcttgaagcaaccagtgagcgagagattggatttcgtgtgtagctttttacagaagaaccggaagcatcctagctctcctgagtgtctagtgtccgcccaaaaggttctggaagggtccgagctggagctggccaagatgacaatgctcttgctttaccatagtacaatgtcatccaagagcccaagggactgggaacaatttgagtataaaattcaagcggagctcgcagtgattctcaaatttgtcttggaccatgaggacggacttaatctgaatgaggacctggaaaacttccttcagaaggccccagtcccaagtacttgctcctcgaccttcccagaggaactctcacctcctagtcaccaggctaagcgtgaaatcagattcttagaacttcagaaagtggcctcctcatcctccgggaataactttcttagcgggtcgcctgctagtcctatgggtgacattttacagacaccccagtttcaaatgcgcaggctgaagaaacagcttgccgacgagcgcagtaacagggatgagctcgagctggaactcgccgaaaatcggaagttgttgaccgagaaggatgcccagatcgccatgatgcaacagcggattgaccggttggctctgctcaacgaaaagcaagccgcatcacctctggaaccaaaagaactagaggagctcagggataaaaacgaaagcttgacgatgagactccatgaaaccctgaaacagtgtcaggacctaaagactgaaaagagccagatggacagaaaaataaaccagctatcagaggagaatggcgacttgtcattcaaattgagggaattcgccagccatcttcaacagttgcaggatgctctgaacgaacttaccgaagaacacagcaaggccacccaggagtggctggaaaagcaggcccagctggaaaaagaactaagcgctgccctccaggataaaaagtgcctggaggagaagaatgaaattctccaggggaaattgtcgcagttagaggaacacctctcgcaactccaagacaaccccccacaggaaaagggagaagtgctcggggacgtgttacaacttgaaactttgaaacaggaagctgcaacattagctgccaacaatacccaattgcaggccagggtggaaatgctggaaacagaaagaggtcagcaggaggcaaaacttctggccgaaagagggcattttgaagaggagaagcagcagctgagctccctgattacagatcttcagagcagtatctcaaacttgagtcaggcgaaggaggagttggagcaggcgagtcaggcacatggtgcgagattgacggcccaagtggccagcctgaccagtgagctaacgacgctcaacgctacaattcagcagcaagaccaagagcttgccggacttaaacagcaggcgaaagagaaacaggctcagttggctcaaacattacaacagcaagagcaagcttcacagggactaaggcaccaggtggagcaactgtcatccagtttaaaacagaaagagcaacagcttaaagaagtggctgagaagcaagaggctacaagacaggatcatgcccagcaattggctaccgctgcagaagagcgggaggcctctctgagagagagagacgcggcactaaaacagctggaggccctggagaaagaaaaggcagccaaactcgaaatattgcaacagcaactgcaagttgccaacgaggcaagagactcagcccagacgtcagtaacccaggctcaacgtgaaaaagctgagcttagtaggaaggtggaagagctccaggcatgtgtggagactgcgaggcaggagcaacacgaagcgcaggctcaggtggccgaactcgagctgcaattgcgaagtgagcaacagaaagctaccgaaaaggaacgagtggcccaagagaaggaccagctgcaggaacaactccaggccctgaaggaaagtctgaaggtgacaaaaggctctctggaggaggaaaagcggagggcggctgatgctttggaagagcagcagcgttgcatttctgagttgaaagctgagactaggtccctggtggaacaacacaaaagggagcggaaggagctcgaggaagaaagggctgggaggaagggcctggaggcgcgtctccagcagctaggggaggcgcaccaagccgaaaccgaggtactccgccgagagctagctgaggctatggcagcccagcacaccgctgagagcgaatgtgagcagctcgttaaagaagtcgccgcatggcgtgaaagatatgaggattcgcagcaagaggaggctcagtacggggcaatgtttcaggagcaactgatgactctgaaagaggaatgcgaaaaagctaggcaggagctgcaagaggcaaaggaaaaggtggccggtatcgagtctcattcggagctgcagattagtaggcagcaaaacgaactggcagagctacacgcgaacctggcaagggcgctgcagcaggtgcaggaaaaagaggtgagagcccaaaaattggctgacgatctttctacactgcaagaaaagatggcagccacatctaaagaagtggcccgtcttgagactctggtccggaaggcgggagagcagcaggaaactgctagccgtgaacttgtcaaggaacctgccagagcaggtgaccgacagcccgagtggctcgaggagcagcagggtcggcaattttgctctacacaggcggcactgcaggcaatggagcgggaggctgagcagatgggaaatgagctggagcgccttcgtgcagccttaatggaatctcagggccagcagcaggaggagcggggacaacaggagcgtgaggttgcaaggctgacgcaagaacggggaagggctcaggctgatctcgcgcttgagaaggccgcacgagctgaactggaaatgcgattgcagaacgccctgaatgagcagagggtcgagtttgcaacgctgcaggaggcattagcacatgccctcactgaaaaggagggcaaagatcaggagctggccaagctgagaggactggaagctgcccagattaaagagctggaagagcttcgccagaccgtgaagcagttgaaggagcaactcgcaaaaaaggagaaggaacatgcctcagggtccggcgctcaatctgaggcagctggacgtaccgagcctacagggccaaaacttgaagctctgcgggcagaagtgagcaagctggaacagcagtgccaaaagcagcaagaacaggctgactcacttgaacgcagtttagaagccgagagggcctcgagggccgagagagattcagcactcgagacactccaggggcagctagaggagaaagctcaggagttaggacactcacagtctgcactcgcatccgctcaaagggagctcgccgcttttcggacaaaggttcaagatcactcaaaggcagaagacgagtggaaggcccaagtggccagaggccgtcaagaagctgagcggaagaatagtctaatttcttcacttgaggaggaagtgtccattttgaatcggcaggtcctggaaaaggaaggtgagtcgaaagaactgaagaggctggtgatggcggagagcgaaaagagccagaaactagaggagaggctgagacttctgcaggctgaaactgccagtaactccgctcgagccgctgaacggtccagtgcactaagggaagaagtccaaagcctgcgggaagaggccgagaagcagagggtcgctagcgagaacctgagacaggagcttacaagccaagcagaaagggccgaagagctgggacaggagctcaaggcctggcaggaaaagttcttccaaaaagagcaggctctgtctaccctgcaactggaacatacatcaacccaagctttggtttccgagctcctccctgccaaacacttatgccagcaactgcaggccgagcaagccgcagcagagaagcggcaccgcgaagagctggagcagagtaagcaggcagcaggaggcctacgtgcagagttgctgcgggcacaacgggaattaggtgaactgatccccctcaggcagaaagtggctgagcaggaaaggacagcccagcaactccgcgctgagaaggcctcttacgccgagcagcttagcatgctaaaaaaagcacatggactgcttgccgaggagaaccgtgggctgggagaacgcgcaaaccttgggagacagttcctcgaagttgagttggaccaggccagggaaaaatacgtacaagaactggccgcagtccgggcagatgctgaaaccagattggctgaagtacagcgggaggcacaaagcaccgctagggagttggaagtgatgacagccaagtacgaaggcgcaaaggtgaaggttctggaagagaggcagagattccaggaggagcggcagaaactcaccgcacaggtggaacagttggaagtgttccagcgggaacaaaccaagcaggtcgaggagttaagcaagaagctggctgatagtgatcaggcctccaaggttcagcagcagaagctaaaggcggtccaagcccagggtggcgagagtcaacaggaggcacagagactacaggcacagcttaatgaattgcaggcacaactcagccaaaaggagcaggccgctgagcactacaaactccagatggaaaaagccaagacccattacgacgccaagaaacaacaaaaccaggagctccaggagcagctgcggtctctagaacagctccagaaggagaacaaggagctgagggcagaagctgaaaggctgggtcatgagttacaacaggcgggacttaagaccaaggaagctgaacaaacctgtagacacttgactgcccaggtccgctccctggaggcgcaggtcgctcatgccgatcaacagctgcgcgaccttggaaaatttcaggtggccaccgacgcacttaagagccgcgaaccacaggccaagccacagctggacctgagtattgactcactggacctttcctgcgaagagggaactcctctgtccataacaagcaagctcccaagaacacaaccagatggcacatccgtccctggcgaacctgcctcacccatttctcagagactgccccctaaggtggagagcctcgaaagtctgtacttcacccctatacctgcaagatctcaggctccactggaaagttcattggattccctgggagacgtgttcctcgacagcggcagaaaaacccgctctgcgaggagaaggaccactcagattataaacataaccatgactaaaaagttggatgtagaggagcctgactcagcaaatagttccttttacagcacacggtccgctcctgcctcccaggccagtctgagagcgacctctagcactcagtcgttagcccgactggggtcaccagactacggaaactccgccctgttgtctctgccagggtatcgccctacgactaggtcttccgccaggcgcagccaggctggtgtcagttccggtgccccacctggcagaaactccttctacatgggcacttgccaagacgagcctgagcagctcgacgactggaaccgcatcgccgagcttcaacaacgaaacagggtctgcccccctcatctcaaaacatgttatcctcttgaatctcggccttccctgtcgctcgggacgataacagatgaggagatgaagaccggcgatcctcaagaaactcttcgcagggccagtatgcagcccatccagatcgctgaaggtacagggattactactagacaacagagaaaacgcgtcagcctggagccacaccaagggccaggcacacccgagagtaagaaggccacgtcatgtttccctaggcctatgacacctcgagatagacatgagggccgtaaacagtcaacaacagaggcacagaagaaagccgctcccgcttccacaaagcaggccgatagacgccagagcatggcatttagcatccttaataccccgaagaagctgggcaactcactcctgaggaggggagcttccaagaaagcgctgagcaaggcttcccccaatactaggagcggaacgcgccgaagccccaggatagcgaccaccacggccagcgccgcaacagccgctgccataggggcaactccaagagccaaagggaaagcaaagcacta

SEQ ID NO: 162583 - DNA, 2076 bp, Artificial Sequence
  derived and/or modified sequence
atgaccttgcatgccacacggggagcagctttgctgtcttgggtgaacagcctccatgtagctgatccagtcgaagctgtgctgcaacttcaggattgctcaatatttattaaaatcatcgaccggattcacggcactgaggaaggacaacaaattctgaagcagccagtgagtgaaaggctggacttcgtgtgctcttttcttcaaaagaatagaaaacatccctcatcccccgagtgcctcgtgagcgcccagaaggttttggaaggctcagagctggagctggccaaaatgactatgcttttgttgtaccacagcacgatgtcttcaaaatctccacgtgactgggagcagttcgagtacaaaattcaggccgaacttgcagtaatactgaagtttgtcctcgaccacgaggacggtctgaatctcaacgaagatctggagaatttccttcagaaagccccagtgccatcgacctgtagctctacattccccgaagagctgagtcccccatcccatcaagccaagagggagattcgattcttagagctgcagaaagtggcttcttccagctccgggaataatttcctatctggttcccccgcttcccccatgggagatatcctccaaactccacagtttcagatgcggaggctcaaaaaacagttggccgatgaacggtctaatcgcgacgaactggagttggagctggccgaaaatcggaaactcctgaccgagaaggacgctcagatagccatgatgcagcagcggatagataggcttgccctacttaatgaaaagcaggcagcaagcccactggaacctaaggagctggaagagctgcgggacaaaaatgagtccttgacaatgaggcttcacgaaactctgaagcagtgccaagatttgaagacggaaaagagccagatggataggaaaattaaccagttgtctgaggaaaacggcgacctttcatttaagttgcgagagttcgcatcgcatctccagcagctacaagacgcgctgaacgaactgacagaagagcattctaaggccactcaggagtggttggagaagcaggctcaactggagaaggaattatctgccgctctgcaggacaaaaaatgtttagaggaaaaaaacgagatccttcagggcaagttgtcccagctcgaagaacacctctcacagttacaggataacccgcctcaagaaaaaggtgaggtgctgggggacgttttacaactcgagacgcttaagcaggaggcggctacactcgccgctaacaatacacaattacaagcccgagtggagatgctcgaaaccgagcgaggtcagcaggaagccaagctactggcagagagggggcattttgaggaagaaaagcaacaactgtcttctctgatcacggatctgcagtcctccatctcgaacctgtcacaggctaaggaggagctggaacaagctagccaggctcatggagccaggctgaccgcccaggttgcctcattaacctccgagctgacaacgttgaacgcgactatccaacagcaggatcaggagctcgccggtttgaagcaacaagcgaaagagaaacaggcccagctagctcaaactctgcaacagcaggaacaggccagccaaggtctcagacaccaagtcgagcagttgagctccagtctgaagcaaaaggagcagcagttaaaggaagtcgctgagaagcaggaagcaacacgccaagaccatgcacagcagctggccaccgccgcagaagagcgagaagcctctcttagagagcgagatgcggctctgaagcagttggaagcactagagaaggagaaagctgctaagctagagatattgcagcagcagctccaggtggcgaacgaggcacgcgattctgctcaaacaagtgttacacaggcccagagagaaaaagctgagctgtctcgcaaagttgaagaactgcaggcttgcgtggagacagcacgccaggaacagcacgaagctcaggcacaagttgccgaacttgaactgcagctgaggtccgagcagcaaaaagccacagagaaggagtag

SEQ ID NO: 162584 - DNA, 2559 bp, Artificial Sequence
  derived and/or modified sequence
atgaccctccacgctaccaggggggctgctcttctttcatgggttaacagcctgcacgtggcagaccccgtggaggctgttctgcaactgcaagattgtagcatcttcatcaagattatcgataggattcacggcaccgaggagggacagcaaattctcaaacagcccgttagcgaacgtctcgactttgtttgcagcttcctccagaaaaatagaaagcatccgtcatcccccgaatgtctggtcagcgcccagaaagtcctggaggggtccgaactagagctggcaaaaatgacaatgttgctcttataccattccactatgagttccaaatcccccagggactgggaacaatttgagtataaaatccaggcagagcttgccgttattctgaaattcgtcctcgatcacgaggacggtttgaacctgaacgaggatttggagaactttctccagaaagctcctgtgccgtctacttgctcatccacattcccagaggagctgagtcctccctcccatcaggccaaacgcgaaatcaggtttctggaacttcagaaagttgcaagcagttccagcggcaacaattttttgagtggctcccccgcttccccaatgggtgatattcttcagactcctcagttccagatgcgtagattaaagaagcagctggccgatgagcggtccaatagagacgagctggagctggagctcgctgaaaatcgaaaactgctgactgagaaggatgcgcagatcgctatgatgcaacagcgcattgacagactggcacttctgaacgagaaacaagcggcatcccctttggagcccaaagagttggaggagttacgggacaaaaatgagtcccttacgatgcggctccacgagactttaaagcaatgtcaggacttgaagacagaaaagagtcagatggaccggaaaataaatcagttgtcagaggaaaatggcgatttatccttcaagctcagagaattcgcttctcacctgcaacagttacaagacgctctcaacgagctgacggaggaacactcaaaggccacacaggagtggctcgaaaagcaggctcagctggaaaaagagctatcagccgcactccaagataaaaaatgcttggaagagaaaaacgaaattctgcaaggcaaactttcgcaactggaggagcatttgagccaactccaggataaccccccacaggaaaaaggagaggttttaggggatgtcctgcaactcgaaaccctgaagcaggaagctgctacactggccgcaaacaacacacagcttcaggcacgggtggagatgctggaaacagagcgcggacaacaggaggcgaagttgctggcagaacgcggtcactttgaggaggaaaagcagcagttatcctctcttatcactgatcttcagagtagcatttcaaacctctcccaggccaaggaggaactagaacaggcaagtcaggcccacggggcacggttaaccgctcaagtagctagcctcacctctgagctcacaacactgaacgccacaattcagcagcaagatcaggagctggccggacttaaacagcaggccaaagagaagcaggctcaacttgcacagaccctccaacaacaggagcaggcttcgcagggactgcgccaccaggttgagcagctctcttcctcactgaagcagaaggaacagcaacttaaagaagttgcagaaaaacaggaagctacacgccaggatcacgcacagcagttagctaccgcagcggaggagagggaagcctcattgagggagagggacgccgcactcaaacagctggaggcactcgaaaaagaaaaggccgctaaactagaaattcttcagcagcaattgcaggtggccaatgaagcgagagacagcgcccaaacgtcggtaacccaggcccagagagagaaggctgaactgtcaaggaaagttgaagagctgcaggcctgcgtcgaaacagcaagacaggagcaacacgaagcgcaggctcaggtggccgaattggagctgcagctgcggtctgagcagcaaaaagccactgagaaggaacgagttgcacaggaaaaagatcaactgcaggaacaactccaggctcttaaggagtcgctcaaagtgaccaaagggtcactggaagaagaaaaaagacgggcagctgacgcattggaggaacagcaacgctgcatttctgagcttaaggccgagacaaggtccctcgtcgagcaacataagcgggagcgcaaggaactcgaggaagaaagagctggccgaaaggggctggaggccagactgcagcagctgggcgaggctcaccaggccgaaactgaagtgcttagacgagaactggccgaagccatggcggctcagcacactgctgagtccgagtgcgaacagctggtcaaagaagtggcagcctggcgagaaaggtatgaggacagtcaacaggaggaggcacagtacggggctatgttccaggaacagctgatgacactcaaagaagagtgcgagaaggccagacaagaactgcaggaggcatag

SEQ ID NO: 162585 - DNA, 6348 bp, Artificial Sequence
  derived and/or modified sequence
atgaccctgcacgccaccagaggcgccgccctgctgagctgggtgaacagcctgcacgtggccgaccccgtggaggccgtgctgcagctgcaggactgcagcatcttcatcaagatcatcgacagaatccacggcaccgaggagggccagcagatcctgaagcagcccgtgagcgagagactggacttcgtgtgcagcttcctgcagaagaacagaaagcaccccagcagccccgagtgcctggtgagcgcccagaaggtgctggagggcagcgagctggagctggccaagatgaccatgctgctgctgtaccacagcaccatgagcagcaagagccccagagactgggagcagttcgagtacaagatccaggccgagctggccgtgatcctgaagttcgtgctggaccacgaggacggcctgaacctgaacgaggacctggagaacttcctgcagaaggcccccgtgcccagcacctgcagcagcaccttccccgaggagctgagcccccccagccaccaggccaagagagagatcagattcctggagctgcagaaggtggccagcagcagcagcggcaacaacttcctgagcggcagccccgccagccccatgggcgacatcctgcagaccccccagttccagatgagaagactgaagaagcagctggccgacgagagaagcaacagagacgagctggagctggagctggccgagaacagaaagctgctgaccgagaaggacgcccagatcgccatgatgcagcagagaatcgacagactggccctgctgaacgagaagcaggccgccagccccctggagcccaaggagctggaggagctgagagacaagaacgagagcctgaccatgagactgcacgagaccctgaagcagtgccaggacctgaagaccgagaagagccagatggacagaaagatcaaccagctgagcgaggagaacggcgacctgagcttcaagctgagagagttcgccagccacctgcagcagctgcaggacgccctgaacgagctgaccgaggagcacagcaaggccacccaggagtggctggagaagcaggcccagctggagaaggagctgagcgccgccctgcaggacaagaagtgcctggaggagaagaacgagatcctgcagggcaagctgagccagctggaggagcacctgagccagctgcaggacaaccccccccaggagaagggcgaggtgctgggcgacgtgctgcagctggagaccctgaagcaggaggccgccaccctggccgccaacaacacccagctgcaggccagagtggagatgctggagaccgagagaggccagcaggaggccaagctgctggccgagagaggccacttcgaggaggagaagcagcagctgagcagcctgatcaccgacctgcagagcagcatcagcaacctgagccaggccaaggaggagctggagcaggccagccaggcccacggcgccagactgaccgcccaggtggccagcctgaccagcgagctgaccaccctgaacgccaccatccagcagcaggaccaggagctggccggcctgaagcagcaggccaaggagaagcaggcccagctggcccagaccctgcagcagcaggagcaggccagccagggcctgagacaccaggtggagcagctgagcagcagcctgaagcagaaggagcagcagctgaaggaggtggccgagaagcaggaggccaccagacaggaccacgcccagcagctggccaccgccgccgaggagagagaggccagcctgagagagagagacgccgccctgaagcagctggaggccctggagaaggagaaggccgccaagctggagatcctgcagcagcagctgcaggtggccaacgaggccagagacagcgcccagaccagcgtgacccaggcccagagagagaaggccgagctgagcagaaaggtggaggagctgcaggcctgcgtggagaccgccagacaggagcagcacgaggcccaggcccaggtggccgagctggagctgcagctgagaagcgagcagcagaaggccaccgagaaggagagagtggcccaggagaaggaccagctgcaggagcagctgcaggccctgaaggagagcctgaaggtgaccaagggcagcctggaggaggagaagagaagagccgccgacgccctggaggagcagcagagatgcatcagcgagctgaaggccgagaccagaagcctggtggagcagcacaagagagagagaaaggagctggaggaggagagagccggcagaaagggcctggaggccagactgcagcagctgggcgaggcccaccaggccgagaccgaggtgctgagaagagagctggccgaggccatggccgcccagcacaccgccgagagcgagtgcgagcagctggtgaaggaggtggccgcctggagagagagatacgaggacagccagcaggaggaggcccagtacggcgccatgttccaggagcagctgatgaccctgaaggaggagtgcgagaaggccagacaggagctgcaggaggccaaggagaaggtggccggcatcgagagccacagcgagctgcagatcagcagacagcagaacgagctggccgagctgcacgccaacctggccagagccctgcagcaggtgcaggagaaggaggtgagagcccagaagctggccgacgacctgagcaccctgcaggagaagatggccgccaccagcaaggaggtggccagactggagaccctggtgagaaaggccggcgagcagcaggagaccgccagcagagagctggtgaaggagcccgccagagccggcgacagacagcccgagtggctggaggagcagcagggcagacagttctgcagcacccaggccgccctgcaggccatggagagagaggccgagcagatgggcaacgagctggagagactgagagccgccctgatggagagccagggccagcagcaggaggagagaggccagcaggagagagaggtggccagactgacccaggagagaggcagagcccaggccgacctggccctggagaaggccgccagagccgagctggagatgagactgcagaacgccctgaacgagcagagagtggagttcgccaccctgcaggaggccctggcccacgccctgaccgagaaggagggcaaggaccaggagctggccaagctgagaggcctggaggccgcccagatcaaggagctggaggagctgagacagaccgtgaagcagctgaaggagcagctggccaagaaggagaaggagcacgccagcggcagcggcgcccagagcgaggccgccggcagaaccgagcccaccggccccaagctggaggccctgagagccgaggtgagcaagctggagcagcagtgccagaagcagcaggagcaggccgacagcctggagagaagcctggaggccgagagagccagcagagccgagagagacagcgccctggagaccctgcagggccagctggaggagaaggcccaggagctgggccacagccagagcgccctggccagcgcccagagagagctggccgccttcagaaccaaggtgcaggaccacagcaaggccgaggacgagtggaaggcccaggtggccagaggcagacaggaggccgagagaaagaacagcctgatcagcagcctggaggaggaggtgagcatcctgaacagacaggtgctggagaaggagggcgagagcaaggagctgaagagactggtgatggccgagagcgagaagagccagaagctggaggagagactgagactgctgcaggccgagaccgccagcaacagcgccagagccgccgagagaagcagcgccctgagagaggaggtgcagagcctgagagaggaggccgagaagcagagagtggccagcgagaacctgagacaggagctgaccagccaggccgagagagccgaggagctgggccaggagctgaaggcctggcaggagaagttcttccagaaggagcaggccctgagcaccctgcagctggagcacaccagcacccaggccctggtgagcgagctgctgcccgccaagcacctgtgccagcagctgcaggccgagcaggccgccgccgagaagagacacagagaggagctggagcagagcaagcaggccgccggcggcctgagagccgagctgctgagagcccagagagagctgggcgagctgatccccctgagacagaaggtggccgagcaggagagaaccgcccagcagctgagagccgagaaggccagctacgccgagcagctgagcatgctgaagaaggcccacggcctgctggccgaggagaacagaggcctgggcgagagagccaacctgggcagacagttcctggaggtggagctggaccaggccagagagaagtacgtgcaggagctggccgccgtgagagccgacgccgagaccagactggccgaggtgcagagagaggcccagagcaccgccagagagctggaggtgatgaccgccaagtacgagggcgccaaggtgaaggtgctggaggagagacagagattccaggaggagagacagaagctgaccgcccaggtggagcagctggaggtgttccagagagagcagaccaagcaggtggaggagctgagcaagaagctggccgacagcgaccaggccagcaaggtgcagcagcagaagctgaaggccgtgcaggcccagggcggcgagagccagcaggaggcccagagactgcaggcccagctgaacgagctgcaggcccagctgagccagaaggagcaggccgccgagcactacaagctgcagatggagaaggccaagacccactacgacgccaagaagcagcagaaccaggagctgcaggagcagctgagaagcctggagcagctgcagaaggagaacaaggagctgagagccgaggccgagagactgggccacgagctgcagcaggccggcctgaagaccaaggaggccgagcagacctgcagacacctgaccgcccaggtgagaagcctggaggcccaggtggcccacgccgaccagcagctgagagacctgggcaagttccaggtggccaccgacgccctgaagagcagagagccccaggccaagccccagctggacctgagcatcgacagcctggacctgagctgcgaggagggcacccccctgagcatcaccagcaagctgcccagaacccagcccgacggcaccagcgtgcccggcgagcccgccagccccatcagccagagactgccccccaaggtggagagcctggagagcctgtacttcacccccatccccgccagaagccaggcccccctggagagcagcctggacagcctgggcgacgtgttcctggacagcggcagaaagaccagaagcgccagaagaagaaccacccagatcatcaacatcaccatgaccaagaagctggacgtggaggagcccgacagcgccaacagcagcttctacagcaccagaagcgcccccgccagccaggccagcctgagagccaccagcagcacccagagcctggccagactgggcagccccgactacggcaacagcgccctgctgagcctgcccggctacagacccaccaccagaagcagcgccagaagaagccaggccggcgtgagcagcggcgccccccccggcagaaacagcttctacatgggcacctgccaggacgagcccgagcagctggacgactggaacagaatcgccgagctgcagcagagaaacagagtgtgccccccccacctgaagacctgctaccccctggagagcagacccagcctgagcctgggcaccatcaccgacgaggagatgaagaccggcgacccccaggagaccctgagaagagccagcatgcagcccatccagatcgccgagggcaccggcatcaccaccagacagcagagaaagagagtgagcctggagccccaccagggccccggcacccccgagagcaagaaggccaccagctgcttccccagacccatgacccccagagacagacacgagggcagaaagcagagcaccaccgaggcccagaagaaggccgcccccgccagcaccaagcaggccgacagaagacagagcatggccttcagcatcctgaacacccccaagaagctgggcaacagcctgctgagaagaggcgccagcaagaaggccctgagcaaggccagccccaacaccagaagcggcaccagaagaagccccagaatcgccaccaccaccgccagcgccgccaccgccgccgccatcggcgccacccccagagccaagggcaaggccaagcactag

SEQ ID NO: 162586 - DNA, 2076 bp, Artificial Sequence
  derived and/or modified sequence
atgaccctgcacgccaccagaggcgccgccctgctgagctgggtgaacagcctgcacgtggccgaccccgtggaggccgtgctgcagctgcaggactgcagcatcttcatcaagatcatcgacagaatccacggcaccgaggagggccagcagatcctgaagcagcccgtgagcgagagactggacttcgtgtgcagcttcctgcagaagaacagaaagcaccccagcagccccgagtgcctggtgagcgcccagaaggtgctggagggcagcgagctggagctggccaagatgaccatgctgctgctgtaccacagcaccatgagcagcaagagccccagagactgggagcagttcgagtacaagatccaggccgagctggccgtgatcctgaagttcgtgctggaccacgaggacggcctgaacctgaacgaggacctggagaacttcctgcagaaggcccccgtgcccagcacctgcagcagcaccttccccgaggagctgagcccccccagccaccaggccaagagagagatcagattcctggagctgcagaaggtggccagcagcagcagcggcaacaacttcctgagcggcagccccgccagccccatgggcgacatcctgcagaccccccagttccagatgagaagactgaagaagcagctggccgacgagagaagcaacagagacgagctggagctggagctggccgagaacagaaagctgctgaccgagaaggacgcccagatcgccatgatgcagcagagaatcgacagactggccctgctgaacgagaagcaggccgccagccccctggagcccaaggagctggaggagctgagagacaagaacgagagcctgaccatgagactgcacgagaccctgaagcagtgccaggacctgaagaccgagaagagccagatggacagaaagatcaaccagctgagcgaggagaacggcgacctgagcttcaagctgagagagttcgccagccacctgcagcagctgcaggacgccctgaacgagctgaccgaggagcacagcaaggccacccaggagtggctggagaagcaggcccagctggagaaggagctgagcgccgccctgcaggacaagaagtgcctggaggagaagaacgagatcctgcagggcaagctgagccagctggaggagcacctgagccagctgcaggacaaccccccccaggagaagggcgaggtgctgggcgacgtgctgcagctggagaccctgaagcaggaggccgccaccctggccgccaacaacacccagctgcaggccagagtggagatgctggagaccgagagaggccagcaggaggccaagctgctggccgagagaggccacttcgaggaggagaagcagcagctgagcagcctgatcaccgacctgcagagcagcatcagcaacctgagccaggccaaggaggagctggagcaggccagccaggcccacggcgccagactgaccgcccaggtggccagcctgaccagcgagctgaccaccctgaacgccaccatccagcagcaggaccaggagctggccggcctgaagcagcaggccaaggagaagcaggcccagctggcccagaccctgcagcagcaggagcaggccagccagggcctgagacaccaggtggagcagctgagcagcagcctgaagcagaaggagcagcagctgaaggaggtggccgagaagcaggaggccaccagacaggaccacgcccagcagctggccaccgccgccgaggagagagaggccagcctgagagagagagacgccgccctgaagcagctggaggccctggagaaggagaaggccgccaagctggagatcctgcagcagcagctgcaggtggccaacgaggccagagacagcgcccagaccagcgtgacccaggcccagagagagaaggccgagctgagcagaaaggtggaggagctgcaggcctgcgtggagaccgccagacaggagcagcacgaggcccaggcccaggtggccgagctggagctgcagctgagaagcgagcagcagaaggccaccgagaaggagtag

SEQ ID NO: 162587 - DNA, 2559 bp, Artificial Sequence
  derived and/or modified sequence
atgaccctgcacgccaccagaggcgccgccctgctgagctgggtgaacagcctgcacgtggccgaccccgtggaggccgtgctgcagctgcaggactgcagcatcttcatcaagatcatcgacagaatccacggcaccgaggagggccagcagatcctgaagcagcccgtgagcgagagactggacttcgtgtgcagcttcctgcagaagaacagaaagcaccccagcagccccgagtgcctggtgagcgcccagaaggtgctggagggcagcgagctggagctggccaagatgaccatgctgctgctgtaccacagcaccatgagcagcaagagccccagagactgggagcagttcgagtacaagatccaggccgagctggccgtgatcctgaagttcgtgctggaccacgaggacggcctgaacctgaacgaggacctggagaacttcctgcagaaggcccccgtgcccagcacctgcagcagcaccttccccgaggagctgagcccccccagccaccaggccaagagagagatcagattcctggagctgcagaaggtggccagcagcagcagcggcaacaacttcctgagcggcagccccgccagccccatgggcgacatcctgcagaccccccagttccagatgagaagactgaagaagcagctggccgacgagagaagcaacagagacgagctggagctggagctggccgagaacagaaagctgctgaccgagaaggacgcccagatcgccatgatgcagcagagaatcgacagactggccctgctgaacgagaagcaggccgccagccccctggagcccaaggagctggaggagctgagagacaagaacgagagcctgaccatgagactgcacgagaccctgaagcagtgccaggacctgaagaccgagaagagccagatggacagaaagatcaaccagctgagcgaggagaacggcgacctgagcttcaagctgagagagttcgccagccacctgcagcagctgcaggacgccctgaacgagctgaccgaggagcacagcaaggccacccaggagtggctggagaagcaggcccagctggagaaggagctgagcgccgccctgcaggacaagaagtgcctggaggagaagaacgagatcctgcagggcaagctgagccagctggaggagcacctgagccagctgcaggacaaccccccccaggagaagggcgaggtgctgggcgacgtgctgcagctggagaccctgaagcaggaggccgccaccctggccgccaacaacacccagctgcaggccagagtggagatgctggagaccgagagaggccagcaggaggccaagctgctggccgagagaggccacttcgaggaggagaagcagcagctgagcagcctgatcaccgacctgcagagcagcatcagcaacctgagccaggccaaggaggagctggagcaggccagccaggcccacggcgccagactgaccgcccaggtggccagcctgaccagcgagctgaccaccctgaacgccaccatccagcagcaggaccaggagctggccggcctgaagcagcaggccaaggagaagcaggcccagctggcccagaccctgcagcagcaggagcaggccagccagggcctgagacaccaggtggagcagctgagcagcagcctgaagcagaaggagcagcagctgaaggaggtggccgagaagcaggaggccaccagacaggaccacgcccagcagctggccaccgccgccgaggagagagaggccagcctgagagagagagacgccgccctgaagcagctggaggccctggagaaggagaaggccgccaagctggagatcctgcagcagcagctgcaggtggccaacgaggccagagacagcgcccagaccagcgtgacccaggcccagagagagaaggccgagctgagcagaaaggtggaggagctgcaggcctgcgtggagaccgccagacaggagcagcacgaggcccaggcccaggtggccgagctggagctgcagctgagaagcgagcagcagaaggccaccgagaaggagagagtggcccaggagaaggaccagctgcaggagcagctgcaggccctgaaggagagcctgaaggtgaccaagggcagcctggaggaggagaagagaagagccgccgacgccctggaggagcagcagagatgcatcagcgagctgaaggccgagaccagaagcctggtggagcagcacaagagagagagaaaggagctggaggaggagagagccggcagaaagggcctggaggccagactgcagcagctgggcgaggcccaccaggccgagaccgaggtgctgagaagagagctggccgaggccatggccgcccagcacaccgccgagagcgagtgcgagcagctggtgaaggaggtggccgcctggagagagagatacgaggacagccagcaggaggaggcccagtacggcgccatgttccaggagcagctgatgaccctgaaggaggagtgcgagaaggccagacaggagctgcaggaggcctag

SEQ ID NO: 162588 - protein, 598 aa, Artificial Sequence
  derived and/or modified sequence
MPCVQAQYGSSPQGASPASQSYSYHSSGEYSSDFLTPEFVKFSMDLTNTEITATTSLPSFSTFMDNYSTGYDVKPPCLYQMPLSGQQSSIKVEDIQMHNYQQHSHLPPQSEEMMPHSGSVYYKPSSPPTPTTPGFQVQHSPMWDDPGSLHNFHQNYVATTHMIEQRKTPVSRLSLFSFKQSPPGTPVSSCQMRFDGPLHVPMNPEPAGSHHVVDGQTFAVPNPIRKPASMGFPGLQIGHASQLLDTQVPSPPSRGSPSNEGLCAVCGDNAACQHYGVRTCEGCKGFFKRTVQKNAKYVCLANKNCPVDKRRRNRCQYCRFQKCLAVGMVKEVVRTDSLKGRRGRLPSKPKSPQEPSPPSPPVSLISALVRAHVDSNPAMTSLDYSRFQANPDYQMSGDDTQHIQQFYDLLTGSMEIIRGWAEKIPGFADLPKADQDLLFESAFLELFVLRLAYRSNPVEGKLIFCNGVVLHRLQCVRGFGEWIDSIVEFSSNLQNMNIDISAFSCIAALAMVTERHGLKEPKRVEELQNKIVNCLKDHVTFNNGGLNRPNYLSKLLGKLPELRTLCTQGLQRIFYLKLEDLVPPPAIIDKLFLDTLPF

SEQ ID NO: 162589 - protein, 258 aa, Artificial Sequence
  derived and/or modified sequence
MPCVQAQYGSSPQGASPASQSYSYHSSGEYSSDFLTPEFVKFSMDLTNTEITATTSLPSFSTFMDNYSTGYDVKPPCLYQMPLSGQQSSIKVEDIQMHNYQQHSHLPPQSEEMMPHSGSVYYKPSSPPTPTTPGFQVQHSPMWDDPGSLHNFHQNYVATTHMIEQRKTPVSRLSLFSFKQSPPGTPVSSCQMRFDGPLHVPMNPEPAGSHHVVDGQTFAVPNPIRKPASMGFPGLQIGHASQLLDTQVPSPPSRGSPS

SEQ ID NO: 162590 - protein, 535 aa, Artificial Sequence
  derived and/or modified sequence
MDNYSTGYDVKPPCLYQMPLSGQQSSIKVEDIQMHNYQQHSHLPPQSEEMMPHSGSVYYKPSSPPTPTTPGFQVQHSPMWDDPGSLHNFHQNYVATTHMIEQRKTPVSRLSLFSFKQSPPGTPVSSCQMRFDGPLHVPMNPEPAGSHHVVDGQTFAVPNPIRKPASMGFPGLQIGHASQLLDTQVPSPPSRGSPSNEGLCAVCGDNAACQHYGVRTCEGCKGFFKRTVQKNAKYVCLANKNCPVDKRRRNRCQYCRFQKCLAVGMVKEVVRTDSLKGRRGRLPSKPKSPQEPSPPSPPVSLISALVRAHVDSNPAMTSLDYSRFQANPDYQMSGDDTQHIQQFYDLLTGSMEIIRGWAEKIPGFADLPKADQDLLFESAFLELFVLRLAYRSNPVEGKLIFCNGVVLHRLQCVRGFGEWIDSIVEFSSNLQNMNIDISAFSCIAALAMVTERHGLKEPKRVEELQNKIVNCLKDHVTFNNGGLNRPNYLSKLLGKLPELRTLCTQGLQRIFYLKLEDLVPPPAIIDKLFLDTLPF

SEQ ID NO: 162591 - DNA, 3546 bp, Artificial Sequence
  derived and/or modified sequence
gctgacgcgcgctgacgcgcggagactttaggtgcatgttggcagcggcagcgcaagccacataaacaaaggcacattggcggccagggccagtccgcccggcggctcgcgcacggctccgcggtcccttttgcctgtccagccggccgcctgtccctgctccctccctccgtgaggtgtccgggttcccttcgcccagctctcccacccctacccgaccccggcgcccgggctcccagagggaactgcacttcggcagagttgaatgaatgaagagagacgcggagaactcctaaggaggagattggacaggctggactccccattgcttttctaaaaatcttggaaactttgtccttcattgaattacgacactgtccacctttaatttcctcgaaaacgcctgtaactcggctgaagccatgccttgtgttcaggcgcagtatgggtcctcgcctcaaggagccagccccgcttctcagagctacagttaccactcttcgggagaatacagctccgatttcttaactccagagtttgtcaagtttagcatggacctcaccaacactgaaatcactgccaccacttctctccccagcttcagtacctttatggacaactacagcacaggctacgacgtcaagccaccttgcttgtaccaaatgcccctgtccggacagcagtcctccattaaggtagaagacattcagatgcacaactaccagcaacacagccacctgcccccccagtctgaggagatgatgccgcactccgggtcggtttactacaagccctcctcgcccccgacgcccaccaccccgggcttccaggtgcagcacagccccatgtgggacgacccgggatctctccacaacttccaccagaactacgtggccactacgcacatgatcgagcagaggaaaacgccagtctcccgcctctccctcttctcctttaagcaatcgccccctggcaccccggtgtctagttgccagatgcgcttcgacgggcccctgcacgtccccatgaacccggagcccgccggcagccaccacgtggtggacgggcagaccttcgctgtgcccaaccccattcgcaagcccgcgtccatgggcttcccgggcctgcagatcggccacgcgtctcagctgctcgacacgcaggtgccctcaccgccgtcgcggggctccccctccaacgaggggctgtgcgctgtgtgtggggacaacgcggcctgccaacactacggcgtgcgcacctgtgagggctgcaaaggcttctttaagcgcacagtgcaaaaaaatgcaaaatacgtgtgtttagcaaataaaaactgcccagtggacaagcgtcgccggaatcgctgtcagtactgccgatttcagaagtgcctggctgttgggatggtcaaagaagtggttcgcacagacagtttaaaaggccggagaggtcgtttgccctcgaaaccgaagagcccacaggagccctctcccccttcgcccccggtgagtctgatcagtgccctcgtcagggcccatgtcgactccaacccggctatgaccagcctggactattccaggttccaggcgaaccctgactatcaaatgagtggagatgacacccagcatatccagcaattctatgatctcctgactggctccatggagatcatccggggctgggcagagaagatccctggcttcgcagacctgcccaaagccgaccaagacctgctttttgaatcagctttcttagaactgtttgtccttcgattagcatacaggtccaacccagtggagggtaaactcatcttttgcaatggggtggtcttgcacaggttgcaatgcgttcgtggctttggggaatggattgattccattgttgaattctcctccaacttgcagaatatgaacatcgacatttctgccttctcctgcattgctgccctggctatggtcacagagagacacgggctcaaggaacccaagagagtggaagaactgcaaaacaagattgtaaattgtctcaaagaccacgtgactttcaacaatggggggttgaaccgccccaattatttgtccaaactgttggggaagctcccagaacttcgtaccctttgcacacaggggctacagcgcattttctacctgaaattggaagacttggtgccaccgccagcaataattgacaaacttttcctggacactttacctttctaagacctcctcccaagcacttcaaaggaactggaatgataatggaaactgtcaagagggggcaagtcacatgggcagagatagccgtgtgagcagtctcagctcaagctgccccccatttctgtaaccctcctagcccccttgatccctaaagaaaacaaacaaacaaacaaaaactgttgctatttcctaacctgcaggcagaacctgaaagggcattttggctccggggcatcctggatttagaacatggactacacacaatacagtggtataaactttttattctcagtttaaaaatcagtttgttgttcagaagaaagattgctataatgtataatgggaaatgtttggccatgcttggttgttgcagttcagacaaatgtaacacacacacacatacacacacacacacacacacagagacacatcttaaggggacccacaagtattgccctttaacaagacttcaaagttttctgctgtaaagaaagctgtaatatatagtaaaactaaatgttgcgtgggtggcatgagttgaagaaggcaaaggcttgtaaatttacccaatgcagtttggctttttaaattattttgtgcctatttatgaataaatattacaaattctaaaagataagtgtgtttgcaaaaaaaaagaaaataaatacataaaaaagggacaagcatgttgattctaggttgaaaatgttataggcacttgctacttcagtaatgtctatattatataaatagtatttcagacactatgtagtctgttagattttataaagattggtagttatctgagcttaaacattttctcaattgtaaaataggtgggcacaagtattacacatcagaaaatcctgacaaaagggacacatagtgtttgtaacaccgtccaacattccttgtttgtaagtgttgtatgtaccgttgatgttgataaaaagaaagtttatatcttgattattttgttgtctaaagctaaacaaaacttgcatgcagcagcttttgactgtttccagagtgcttataatatacataactccctggaaataactgagcactttgaattttttttatgtctaaaattgtcagttaatttattattttgtttgagtaagaattttaatattgccatattctgtagtatttttctttgtatatttctagtatggcacatgatatgagtcactgcctttttttctatggtgtatgacagttagagatgctgattttttttctgataaattctttctttgagaaagacaattttaatgtttacaacaataaaccatgtaaatgaacagaaaaaaaaaaaaaaaaa

SEQ ID NO: 162592 - DNA, 1797 bp, Artificial Sequence
  derived and/or modified sequence
atgccttgcgtccaggcgcaatatggatccagtcctcaaggggcctctcccgcatcccagagctactcctaccactcgagcggggagtactctagcgatttcttgacccctgagttcgtgaaattctcgatggacctgaccaacacagagatcacggcaactacttccttgccctcctttagcactttcatggacaactactcgacaggctacgatgttaaacccccatgcttataccagatgccgctgtccggtcagcagagtagcataaaagttgaggacatccaaatgcacaattaccaacagcacagccacctcccgccacagagtgaggaaatgatgccccacagcgggtctgtatattacaagccaagcagcccaccaacacccacaactcccggatttcaggtccagcactcccctatgtgggacgatccaggttcactgcacaactttcaccagaattatgtcgcaaccacccacatgattgagcagagaaaaacccctgtgtccagactgtctctcttcagctttaagcagtcacctcctggcacaccagtgagtagctgtcagatgaggttcgacggccccctgcacgtaccaatgaatcccgagcccgctggtagccaccacgtagtggacggccaaacattcgctgtgccaaaccccataagaaaacccgcatctatgggctttcctgggttgcaaatcggccatgcgagccagctactggacacacaagtcccctctcccccttccagaggatcgccgtccaacgaaggcctgtgcgcagtctgtggagacaatgccgcatgtcaacactacggagtgcgaacttgcgagggctgtaaaggcttctttaaacggaccgttcagaagaatgccaagtacgtctgtttagctaataagaactgtccagtggataaaaggaggaggaataggtgccagtactgtcggtttcaaaagtgtctcgcagtgggaatggtgaaagaggtggtcaggaccgatagcctgaaagggaggcgcggccgtctcccaagcaagccgaaaagtccccaggagccatcgccaccttccccccccgtcagcttgatttctgccctggtgagagcccatgtagactctaaccccgcaatgacatcgttagattattccaggttccaagctaacccagactatcagatgtcaggagacgatactcagcacatccagcagttctatgacctgctaaccgggtctatggagatcatacgggggtgggccgaaaaaatccctggctttgccgacctgcctaaagcagaccaggacctgttgttcgaatcggccttcctggagctcttcgtgctgaggcttgcgtataggtccaaccctgtggaggggaagttaattttctgcaatggcgttgtgctccaccgtctccagtgtgtgcgaggattcggggaatggatagattccatagtggaattttccagcaatttgcagaacatgaatattgatataagtgcgttctcttgcattgcggccctcgccatggtgacggagcggcacggattaaaggaacccaaacgggttgaggaactccagaacaaaatcgtgaattgtctgaaggatcacgtgacgttcaataacggaggcctgaacaggcctaattatctctcgaagcttctgggcaagctccctgagctgcggaccctttgtactcagggacttcagcgcattttttatcttaaattagaggacctcgttccgccacctgccataattgataaactgttcctggataccctgcctttctag

SEQ ID NO: 162593 - DNA, 1797 bp, Artificial Sequence
  derived and/or modified sequence
atgccatgtgtgcaggcacagtacggaagcagccctcagggagctagcccggcctcccagtcatactcgtatcattcgtccggcgagtactcttcggatttcttgacccccgagttcgtaaagtttagtatggatctgactaacactgaaatcaccgcaaccacgtccctgccttcgttttcaaccttcatggataattacagcacaggctatgacgtgaaacctccctgcctttatcagatgcccctaagcgggcaacagtcttctatcaaggtcgaggacatccaaatgcacaactatcaacaacactcacacctcccgccacagagtgaagagatgatgcctcactctggctccgtttactataagcctagtagtccgcccaccccgacgacaccaggattccaggtccagcactccccgatgtgggacgacccaggcagcctacacaacttccaccagaactatgtggccaccacgcatatgatcgagcagcgcaaaacgcctgtgtctagactgtccctcttctccttcaagcagtcacctcctggaacacctgtgtcttcttgccagatgcggttcgatggtccactgcatgtgccaatgaacccagaacctgcaggcagccaccatgttgtggacggtcaaacatttgcggttcccaaccctatccgcaagcctgcaagcatgggattccccgggctgcagatagggcacgcatctcagcttctggacactcaggttccttcccccccgagccgagggtccccaagcaatgaaggcctgtgtgccgtgtgtggagacaacgccgcttgccagcactacggcgtgaggacctgtgagggatgtaaggggttcttcaagcggacagtacagaagaatgcaaaatacgtttgcctcgctaacaaaaactgccctgtcgataaaaggagacgcaatcgatgccaatattgccgcttccagaaatgtctggccgtggggatggtcaaagaggtcgtccgaaccgattccttgaagggacggagaggccggcttccatccaagcccaaatctccccaggaaccaagtccgccctcgccacccgttagcctgatcagcgccctcgttcgggcccatgtggactcaaatcctgcgatgacttccctggattatagcaggtttcaggcaaatcctgattaccaaatgtccggtgacgatacacaacatatccagcagttttacgacttgttaacgggctcaatggaaattatacggggatgggctgagaagatccctggatttgctgatctgcctaaggcagaccaggatttgctattcgagtccgcattcctcgaactcttcgtgttgaggctcgcctaccggtcaaatccagtggaagggaagttaatcttttgcaacggagttgtactgcaccgactacagtgtgtacgcgggttcggcgaatggatcgattcaatagtagaattctcttccaacctccagaacatgaatattgatatctctgccttttcatgcattgccgcactcgccatggtcaccgagaggcacggattaaaggagcctaagagggtggaggagctgcagaacaaaatcgtgaattgtctgaaagatcatgttacttttaataacggaggcctcaacagacccaattatctgtctaagctcctgggaaagctgccagagctgcggacactatgtacccaagggctgcagcgcattttctatttaaaacttgaggatcttgtgcccccccccgcaataattgataaactgtttctggacaccctgcccttttag

SEQ ID NO: 162594 - DNA, 1608 bp, Artificial Sequence
  derived and/or modified sequence
atggataattactcaacaggttatgatgtgaaacccccttgtttataccagatgcccctatctgggcagcaaagcagcatcaaagtggaggacatccagatgcacaactatcaacaacattctcaccttcctccacagagtgaggaaatgatgcctcattctggatccgtttattataagccaagttctcctccaactcctacaactcccgggttccaggtacagcattccccaatgtgggacgatcctggatctttgcacaacttccaccagaattatgtcgccactacccacatgattgaacaaaggaagacaccagtatcaaggctgagcctgttctcattcaaacagagcccccccggcactccagtaagcagttgccagatgaggtttgacgggcccctgcatgtgccaatgaatccagagccggcaggcagccatcacgtagtcgatggacaaacattcgccgtccccaaccctattagaaagccggcaagcatgggcttccctggccttcagatcgggcacgcgtcccagctcttggacacccaggtaccaagccccccaagtaggggctctccttccaacgagggtctgtgtgccgtttgcggcgacaacgcagcctgccagcactatggcgtgcgaacatgcgagggctgcaaaggtttcttcaagcgtactgtgcagaagaatgccaagtacgtgtgcctcgcaaacaagaattgccccgtggataagcgccgacggaacaggtgccagtattgtcgcttccagaagtgtctggccgtagggatggtgaaagaagtggtgcgaacagattctctgaaggggagacgcggccgtctgcctagcaagcccaagtcgcctcaggagccatctccacccagcccacccgtctctctgattagtgcgctagtgcgtgctcacgtggacagtaaccccgcaatgacaagtctggactactcccgtttccaagcaaatccagattaccaaatgagcggcgacgatacccagcatatccagcaattctatgatttactcaccggcagcatggaaattattagaggatgggccgagaagattcccgggttcgcagacttgcctaaagccgaccaggatctgctctttgagagcgcgtttctcgagttgttcgtgctcagactggcataccgctctaaccctgtagagggtaagctaatcttttgcaacggcgtagtgttgcacagactgcagtgcgtgcgtggattcggcgaatggattgatagtatcgtggagttctcatcaaaccttcagaatatgaatatcgatatttctgcctttagctgcatcgcggccctggccatggttactgagaggcatggtctcaaggaacccaagagagttgaggaattgcagaacaaaattgtgaattgtctcaaggaccacgttaccttcaacaatggggggctgaaccgaccaaattacttgtctaaattgctagggaagctccccgagctgaggaccctctgcacccagggccttcagcgaattttctatcttaaattagaggatcttgtgccgccacccgctattattgacaaactttttctggatacccttcccttctag

SEQ ID NO: 162595 - DNA, 1797 bp, Artificial Sequence
  derived and/or modified sequence
atgccctgtgtgcaggcccagtatggcagcagcccccagggcgccagccctgccagccagagctacagctaccacagcagtggagagtacagcagtgacttcctgaccccagagtttgtgaagttctccatggacctgaccaacacagagatcacagccaccaccagcctgcccagcttcagcaccttcatggacaactacagcacaggctatgatgtgaagccaccctgcctgtaccagatgcccctgagcggccagcagagcagcatcaaggtggaggacatccagatgcacaactaccagcagcacagccacctgcccccccagagcgaggagatgatgccccacagcggctctgtgtactacaagcccagcagcccccccacccccaccaccccaggcttccaggtgcagcacagccccatgtgggatgaccccggcagcctgcacaacttccaccagaactacgtggccaccacccacatgattgagcagaggaagacccctgtgtcccggctgagcctcttctccttcaagcagagccccccaggcacccctgtgagcagctgccagatgagatttgatggccccctgcacgtgcccatgaaccctgagcctgctggcagccaccacgtggtggatggccagacctttgctgtgcccaaccccatcaggaagccagcctccatgggcttccctggcctgcagattggacatgccagccagctgctggacacccaggtgcccagcccccccagccggggcagccccagcaatgaaggcctgtgtgctgtgtgtggggacaatgctgcctgccagcactatggagtgaggacctgtgagggctgcaagggcttcttcaagaggacagtgcagaagaatgccaagtatgtgtgcctggccaacaagaactgccctgtggacaagagaagaagaaaccgctgccagtactgccgcttccagaagtgcctggccgtgggcatggtgaaggaggtggtgaggacagacagcctgaagggcagaagaggccgcctgcccagcaagcccaagagcccccaggagcccagcccccccagcccccctgtgtccctcatcagcgccctggtgcgggcccacgtggacagcaacccagccatgaccagcctggactacagccgcttccaggccaacccagactaccagatgtctggagatgacacccagcacatccagcagttctatgacctgctgaccggctccatggagatcatccggggctgggccgagaagatccctggctttgctgacctgcccaaggctgaccaggacctgctgtttgaaagtgccttcctggagctgtttgtgctgcggctggcctaccgcagcaaccctgtggagggcaagctgatcttctgcaatggagtggtgctgcaccggctgcagtgtgtgcggggctttggagagtggattgacagcatcgtggagttcagcagcaacctgcagaacatgaacatcgacatcagcgccttcagctgcatcgccgccctggccatggtgacagagcggcacggcctgaaggagcccaagagggtggaggagctgcagaacaagatcgtgaactgcctgaaggaccacgtgaccttcaacaatggaggcctgaaccggcccaactacctgagcaagctgctgggcaagctgcctgagctgcggaccctgtgcacccagggcctgcagaggatcttctacctgaagctggaggacctggtgcccccaccagccatcatcgacaagctgttcctggacaccctgcccttctag

SEQ ID NO: 162596 - DNA, 1608 bp, Artificial Sequence
  derived and/or modified sequence
atggacaactacagcacaggctatgatgtgaagccaccctgcctgtaccagatgcccctgagcggccagcagagcagcatcaaggtggaggacatccagatgcacaactaccagcagcacagccacctgcccccccagagcgaggagatgatgccccacagcggctctgtgtactacaagcccagcagcccccccacccccaccaccccaggcttccaggtgcagcacagccccatgtgggatgatcctggcagcctgcacaacttccaccagaactacgtggccaccacccacatgattgagcagaggaagacccctgtgtcccggctgagcctcttctccttcaagcagagccccccaggcacccctgtgagcagctgccagatgagatttgatggccccctgcacgtgcccatgaaccctgagcccgccggcagccaccacgtggtggatggccagacctttgctgtgcccaaccccatcaggaagccagcctccatgggcttccctggcctgcagatcggccacgccagccagctgctggacacccaggtgcccagcccccccagccggggcagccccagcaatgaaggcctgtgtgctgtgtgtggggacaatgctgcctgccagcactacggcgtgaggacctgtgagggctgcaagggcttcttcaagaggacagtgcagaagaatgccaagtatgtgtgcctggccaacaagaactgccctgtggacaagagaagaagaaaccgctgccagtactgccgcttccagaagtgcctggccgtgggcatggtgaaggaggtggtgaggacagacagcctgaagggccggcggggccgcctgcccagcaagcccaagagcccccaggagcccagcccccccagcccccctgtgtccctcatcagcgccctggtgcgggcccacgtggacagcaacccagccatgaccagcctggactacagccgcttccaggccaacccagactaccagatgtctggagatgacacccagcacatccagcagttctatgacctgctgaccggctccatggagatcatccggggctgggccgagaagatccctggctttgctgacctgcccaaggctgaccaggacctgctgtttgagagcgccttcctggagctgtttgtgctgcggctggcctaccgcagcaaccctgtggagggcaagctgatcttctgcaatggagtggtgctgcaccggctgcagtgtgtgcggggctttggagagtggattgacagcatcgtggagttcagcagcaacctgcagaacatgaacatcgacatcagcgccttcagctgcatcgccgccctggccatggtgacagaaagacatggcctgaaggagcccaagagggtggaggagctgcagaacaagatcgtgaactgcctgaaggaccacgtgaccttcaacaacggcggcctgaaccggcccaactacctgagcaagctgctgggcaagctgcctgagctgcggaccctgtgcacccagggcctgcagaggatcttctacctgaagctggaggacctggtgcccccaccagccatcatcgacaagctgttcctggacaccctgcccttctag

SEQ ID NO: 162597 - DNA, 1797 bp, Artificial Sequence
  derived and/or modified sequence
atgccctgcgtgcaggcccagtacggcagcagcccccagggcgcctcccctgcctcacagagctactcttaccacagcagcggagagtactccagcgattttttgaccccagaatttgtgaaattcagcatggatttgacgaataccgagataactgccacgactagcctgccatcctttagtacatttatggataactattctaccggctatgatgttaagcctccttgcctgtaccaaatgccgctgtcgggtcagcagtcttccatcaaagtggaagatatacagatgcacaattatcagcagcacagccacctgccaccccaatctgaggagatgatgcctcatagcggctctgtgtactacaaaccctccagcccaccgactcccacgacgcccgggtttcaagtgcaacacagtccaatgtgggatgaccccggaagcctgcacaacttccatcagaactacgtcgctaccacacacatgatcgagcagcggaagacacctgttagtcggctgagcctctttagttttaaacaaagtccccccggcacccccgtgtccagttgtcagatgcggttcgatgggcccctccacgttcccatgaatccagaaccagctggtagtcaccatgtggtggatggccagactttcgcagttcccaaccctattcgtaagcccgcctcgatgggcttccctggactccagatcgggcacgcttcacagctcctcgatacccaggttccttcgccaccgagtcgcgggtctccctcaaacgagggactgtgtgccgtttgcggcgataatgcggcttgtcagcactacggagtgcgaacatgtgaagggtgcaaggggtttttcaaaagaacagtgcagaagaacgctaagtacgtgtgtcttgccaacaagaactgtcctgtggataaacgtaggcggaataggtgtcagtactgccgattccagaagtgtctggctgtcggaatggttaaagaagtggtgaggactgatagcctcaagggacgccgaggcaggttgccttctaaacccaagtcccctcaggagccttcccccccttctccacctgttagcctcattagtgccctggttcgagcccacgtggatagcaatccagctatgacatcattggattactcacggttccaggctaacccagactaccagatgagcggggacgatacgcagcatatccagcaattctatgacctgctgaccggtagcatggagatcattagagggtgggccgagaagattcctggttttgctgaccttcccaaagcagatcaggatctgctttttgagtccgctttcctggaattgttcgtgttgcggttggcatatcgaagcaaccccgtggaaggtaagctgatattctgcaatggtgtggtgctgcacaggctgcaatgcgttcggggatttggcgagtggatcgatagtatcgtggagttcagtagcaaccttcagaatatgaatatcgacatttcagccttctcgtgtattgcagctctcgccatggttacggaaagacatgggctcaaagaaccaaagagagtagaagaactgcagaataagattgttaattgtctaaaagaccatgtcacttttaacaacggcggactgaaccgtccaaattacttaagcaagctcctgggcaagctgccggaactaagaaccctatgcacccaggggctccaaaggatcttttatcttaagcttgaggacctggtcccaccccccgcaataatcgacaagctctttctcgacactcttcccttctag

SEQ ID NO: 162598 - DNA, 1797 bp, Artificial Sequence
  derived and/or modified sequence
atgccctgcgtgcaggcccagtacggcagcagcccccagggcgccagtccagcgtctcagtcctacagctaccattcttccggcgagtacagttctgacttcttaacacccgaattcgtcaagtttagcatggaccttactaatacagagataactgcaactacctcgcttccatccttctccacgttcatggataattactcaactggatatgacgtgaagcccccctgcctatatcagatgcccttgtccggacaacagagttcgataaaggtggaggacattcaaatgcataactaccagcagcactcccacttgcctcctcagagtgaagagatgatgcctcattcaggatccgtgtattataagccatcttctccaccaacgccaacgactcctgggtttcaggtccagcacagcccaatgtgggatgatccaggttcactgcacaactttcaccaaaactatgtggcgacaacacatatgatcgagcagcgcaagacccctgttagtcgactgtcgcttttctcctttaaacagtccccacccggaaccccggtatcatcctgccagatgcgttttgacggcccactgcacgtgccaatgaacccggagcccgccgggtcacaccatgtggtggacggccaaaccttcgctgtgcctaacccaatcagaaagcccgcttccatggggttccccgggctccaaataggccacgctagtcaactgctggatacacaggtgccatcgcctccctctcgggggtcaccgtcaaatgaaggattatgcgccgtgtgcggcgacaacgccgcttgccaacactatggggtcaggacctgcgaagggtgcaaggggtttttcaagaggaccgtacagaagaacgctaaatacgtgtgtctggctaataaaaattgtcctgtggataaaaggcggcggaataggtgccagtactgtagatttcaaaaatgcctggctgtgggcatggtgaaggaggtggtcaggacagatagcctgaagggacggcgtggacgcttaccctccaaacctaagtctccccaggagccatcccccccatctcctcctgtttccctgatatccgcgctggtgcgcgcacacgtggactctaatcccgccatgacctccctggactacagtcggtttcaggcgaatccagactatcagatgagcggcgatgacacccagcatattcagcagttttatgatcttctaaccggatctatggagataattcgagggtgggctgagaagattcccggatttgccgatttgccaaaggccgaccaagatttgctgtttgagtcagcctttcttgaacttttcgtcctccggcttgcctaccggtccaatccagttgaaggcaaactcatcttctgcaatggggtcgttctgcaccgccttcagtgtgtccggggcttcggcgaatggatcgactcgatcgttgaatttagcagcaatctccagaacatgaacattgatatttctgccttctcgtgcatcgcggccttggctatggtgactgaacgccacgggctaaaggaacccaagcgggttgaagaactacagaacaagatcgtcaactgcctgaaggatcatgtgactttcaacaatggtggactaaaccgtccaaactacctgtccaaattgctcggcaaattacctgagctccgtacattgtgtacacagggcttgcagcgaatcttctacctaaagctggaagatctagtgcctcctccggcaatcatcgacaagctcttcctggatactttgccattctag

SEQ ID NO: 162599 - DNA, 1608 bp, Artificial Sequence
  derived and/or modified sequence
atggacaactacagcaccggctacgacgtgaagcccccctgcctgtaccagatgccgctgagcggacaacagtcctccattaaggtagaagacatccaaatgcacaactatcagcagcactcgcacctgccaccccagtccgaagaaatgatgccacactcggggagcgtatattacaagccttcctcaccacctacccctaccacccccggatttcaagtccagcactctccaatgtgggatgatcccgggtctctgcataattttcaccagaattacgtagctaccacacatatgatcgaacagcgcaaaactcctgtatcacggctttcactctttagtttcaagcaatcccccccaggaacgccagtgagcagctgtcagatgaggttcgatggacccctgcacgttccaatgaatcccgagcccgcaggttcacaccacgttgttgatggccagactttcgcagtaccgaatccaatacggaagcctgcaagcatggggtttcccggcctgcagatcggacatgcgagtcaacttctggatacccaggtgccaagccccccctctaggggcagcccatccaatgagggtctgtgtgccgtttgtggagataatgccgcctgccaacactatggagtaagaacatgcgaaggctgcaaagggttctttaaacggactgtacaaaagaacgccaaatacgtgtgcctggcaaacaaaaattgtcctgttgacaagcgtagacgaaatcgatgtcagtactgcagatttcaaaagtgcctagcggtcggaatggtgaaagaagtcgtgagaacggattctctgaaggggcggagaggccgcctgccttccaagccaaagtctcctcaggaaccctccccccccagcccccctgtgtcactgatcagcgcactcgttcgggcgcatgtggattccaatcctgccatgaccagtttggattactctcgcttccaggctaaccctgactaccagatgagcggcgacgatactcagcacatccaacaattttatgatctgttgactggttcgatggaaatcatccgcggctgggcagaaaaaatccctggattcgcagacctcccgaaggcagaccaggacttactgtttgaatccgccttcctagaactctttgtcctgagactcgcctacaggtccaatccagtagaaggcaaactaatcttttgcaatggagtcgtgcttcaccgcttgcagtgcgtccgcggctttggcgaatggattgacagtattgtggagttctcctccaacttgcagaacatgaacatcgacatctccgcattcagctgtatagctgctctagccatggtaacagagcgtcacgggctgaaggagccaaagagagtggaggagttacagaacaagatcgtaaattgtctgaaggaccacgtcacctttaacaacggtggccttaatcggcctaactacctatcgaagctgctggggaagttacccgaacttcggaccctctgtacacagggcctccagcgcattttctatttgaagcttgaggatctagtgcctccccccgccatcattgataagctcttcctggacacattacctttctag

SEQ ID NO: 162600 - DNA, 3472 bp, Artificial Sequence
  derived and/or modified sequence
acataaacaaaggcacattggcggccagggccagtccgcccggcggctcgcgcacggctccgcggtcccttttgcctgtccagccggccgcctgtccctgctccctccctccgtgaggtgtccgggttcccttcgcccagctctcccacccctacccgaccccggcgcccgggctcccagagggaactgcacttcggcagagttgaatgaatgaagacagacgcggagaactcctaaggaggagattggacaggctggactccccattgcttttctaaaaatcttggaaactttgtccttcattgaattacgacactgtccacctttaatttcctcgaaaacgcctgtaactcggctgaagccatgccttgtgttcaggcgcagtatgggtcctcgcctcaaggagccagccccgcttctcagagctacagttaccactcttcgggagaatacagctccgatttcttaactccagagtttgtcaagtttagcatggacctcaccaacactgaaatcactgccaccacttctctccccagcttcagtacctttatggacaactacagcacaggctacgacgtcaagccaccttgcttgtaccaaatgcccctgtccggacagcagtcctccattaaggtagaagacattcagatgcacaactaccagcaacacagccacctgcccccccagtctgaggagatgatgccgcactccgggtcggtttactacaagccctcctcgcccccgacgcccaccaccccgggcttccaggtgcagcacagccccatgtgggacgacccgggatctctccacaacttccaccagaactacgtggccactacgcacatgatcgagcagaggaaaacgccagtctcccgcctctccctcttctcctttaagcaatcgccccctggcaccccggtgtctagttgccagatgcgcttcgacgggcccctgcacgtccccatgaacccggagcccgccggcagccaccacgtggtggacgggcagaccttcgctgtgcccaaccccattcgcaagcccgcgtccatgggcttcccgggcctgcagatcggccacgcgtctcagctgctcgacacgcaggtgccctcaccgccgtcgcggggctccccctccaacgaggggctgtgcgctgtgtgtggggacaacgcggcctgccaacactacggcgtgcgcacctgtgagggctgcaaaggcttctttaagcgcacagtgcaaaaaaatgcaaaatacgtgtgtttagcaaataaaaactgcccagtggacaagcgtcgccggaatcgctgtcagtactgccgatttcagaagtgcctggctgttgggatggtcaaagaagtggttcgcacagacagtttaaaaggccggagaggtcgtttgccctcgaaaccgaagagcccacaggagccctctcccccttcgcccccggtgagtctgatcagtgccctcgtcagggcccatgtcgactccaacccggctatgaccagcctggactattccaggttccaggcgaaccctgactatcaaatgagtggagatgacacccagcatatccagcaattctatgatctcctgactggctccatggagatcatccggggctgggcagagaagatccctggcttcgcagacctgcccaaagccgaccaagacctgctttttgaatcagctttcttagaactgtttgtccttcgattagcatacaggtccaacccagtggagggtaaactcatcttttgcaatggggtggtcttgcacaggttgcaatgcgttcgtggctttggggaatggattgattccattgttgaattctcctccaacttgcagaatatgaacatcgacatttctgccttctcctgcattgctgccctggctatggtcacagagagacacgggctcaaggaacccaagagagtggaagaactgcaaaacaagattgtaaattgtctcaaagaccacgtgactttcaacaatggggggttgaaccgccccaattatttgtccaaactgttggggaagctcccagaacttcgtaccctttgcacacaggggctacagcgcattttctacctgaaattggaagacttggtgccaccgccagcaataattgacaaacttttcctggacactttacctttctaagacctcctcccaagcacttcaaaggaactggaatgataatggaaactgtcaagagggggcaagtcacatgggcagagatagccgtgtgagcagtctcagctcaagctgccccccatttctgtaaccctcctagcccccttgatccctaaagaaaacaaacaaacaaacaaaaactgttgctatttcctaacctgcaggcagaacctgaaagggcattttggctccggggcatcctggatttagaacatggactacacacaatacagtggtataaactttttattctcagtttaaaaatcagtttgttgttcagaagaaagattgctataatgtataatgggaaatgtttggccatgcttggttgttgcagttcagacaaatgtaacacacacacacatacacacacacacacacacacagagacacatcttaaggggacccacaagtattgccctttaacaagacttcaaagttttctgctgtaaagaaagctgtaatatatagtaaaactaaatgttgcgtgggtggcatgagttgaagaaggcaaaggcttgtaaatttacccaatgcagtttggctttttaaattattttgtgcctatttatgaataaatattacaaattctaaaagataagtgtgtttgcaaaaaaaaagaaaataaatacataaaaaagggacaagcatgttgattctaggttgaaaatgttataggcacttgctacttcagtaatgtctatattatataaatagtatttcagacactatgtagtctgttagattttataaagattggtagttatctgagcttaaacattttctcaattgtaaaataggtgggcacaagtattacacatcagaaaatcctgacaaaagggacacatagtgtttgtaacaccgtccaacattccttgtttgtaagtgttgtatgtaccgttgatgttgataaaaagaaagtttatatcttgattattttgttgtctaaagctaaacaaaacttgcatgcagcagcttttgactgtttccagagtgcttataatatacataactccctggaaataactgagcactttgaattttttttatgtctaaaattgtcagttaatttattattttgtttgagtaagaattttaatattgccatattctgtagtatttttctttgtatatttctagtatggcacatgatatgagtcactgcctttttttctatggtgtatgacagttagagatgctgattttttttctgataaattctttctttgagaaagacaattttaatgtttacaacaataaaccatgtaaatgaacagaa

SEQ ID NO: 162601 - DNA, 2878 bp, Artificial Sequence
  derived and/or modified sequence
ctccccggctcccttcttggtcggccgcgaccccccgaaaggtaacaggcctctttcgcccccggccaggacctgggccctgtgggctttttttttttccattttatcagtaagttccccttgtcccagcctccgctttcacttcccgcgttccctccaccccaaaaaccgccccaacatgtccagagaggggcatctacccagccgcccagccaggggcgaccactttgtgagccccggggagcgggacccgtaccaggcgcgcccagcgggggatgcggtgaccgaggggccgggagcgccgggcagggaggagattggacaggctggactccccattgcttttctaaaaatcttggaaactttgtccttcattgaattacgacactgtccacctttaatttcctcgaaaacgcctgtaactcggctgaagccatgccttgtgttcaggcgcagtatgggtcctcgcctcaaggagccagccccgcttctcagagctacagttaccactcttcgggagaatacagctccgatttcttaactccagagtttgtcaagtttagcatggacctcaccaacactgaaatcactgccaccacttctctccccagcttcagtacctttatggacaactacagcacaggctacgacgtcaagccaccttgcttgtaccaaatgcccctgtccggacagcagtcctccattaaggtagaagacattcagatgcacaactaccagcaacacagccacctgcccccccagtctgaggagatgatgccgcactccgggtcggtttactacaagccctcctcgcccccgacgcccaccaccccgggcttccaggtgcagcacagccccatgtgggacgacccgggatctctccacaacttccaccagaactacgtggccactacgcacatgatcgagcagaggaaaacgccagtctcccgcctctccctcttctcctttaagcaatcgccccctggcaccccggtgtctagttgccagatgcgcttcgacgggcccctgcacgtccccatgaacccggagcccgccggcagccaccacgtggtggacgggcagaccttcgctgtgcccaaccccattcgcaagcccgcgtccatgggcttcccgggcctgcagatcggccacgcgtctcagctgctcgacacgcaggtgccctcaccgccgtcgcggggctccccctccaacgaggggctgtgcgctgtgtgtggggacaacgcggcctgccaacactacggcgtgcgcacctgtgagggctgcaaaggcttctttaagcgcacagtgcaaaaaaatgcaaaatacgtgtgtttagcaaataaaaactgcccagtggacaagcgtcgccggaatcgctgtcagtactgccgatttcagaagtgcctggctgttgggatggtcaaagaagtggttcgcacagacagtttaaaaggccggagaggtcgtttgccctcgaaaccgaagagcccacaggagccctctcccccttcgcccccggtgagtctgatcagtgccctcgtcagggcccatgtcgactccaacccggctatgaccagcctggactattccaggttccaggcgaaccctgactatcaaatgagtggagatgacacccagcatatccagcaattctatgatctcctgactggctccatggagatcatccggggctgggcagagaagatccctggcttcgcagacctgcccaaagccgaccaagacctgctttttgaatcagctttcttagaactgtttgtccttcgattagcatacaggtccaacccagtggagggtaaactcatcttttgcaatggggtggtcttgcacaggttgcaatgcgttcgtggctttggggaatggattgattccattgttgaattctcctccaacttgcagaatatgaacatcgacatttctgccttctcctgcattgctgccctggctatggtcacagagagacacgggctcaaggaacccaagagagtggaagaactgcaaaacaagattgtaaattgtctcaaagaccacgtgactttcaacaatggggggttgaaccgccccaattatttgtccaaactgttggggaagctcccagaacttcgtaccctttgcacacaggggctacagcgcattttctacctgaaattggaagacttggtgccaccgccagcaataattgacaaacttttcctggacactttacctttctaagacctcctcccaagcacttcaaaggaactggaatgataatggaaactgtcaagagggggcaagtcacatgggcagagatagccgtgtgagcagtctcagctcaagctgccccccatttctgtaaccctcctagcccccttgatccctaaagaaaacaaacaaacaaacaaaaactgttgctatttcctaacctgcaggcagaacctgaaagggcattttggctccggggcatcctggatttagaacatggactacacacaatacagtggtataaactttttattctcagtttaaaaatcagtttgttgttcagaagaaagattgctataatgtataatgggaaatgtttggccatgcttggttgttgcagttcagacaaatgtaacacacacacacatacacacacacacacacacacagagacacatcttaaggggacccacaagtattgccctttaacaagacttcaaagttttctgctgtaaagaaagctgtaatatatagtaaaactaaatgttgcgtgggtggcatgagttgaagaaggcaaaggcttgtaaatttacccaatgcagtttggctttttaaattattttgtgcctatttatgaataaatattacaaattctaaaagataagtgtgtttgcaa

SEQ ID NO: 162602 - DNA, 2642 bp, Artificial Sequence
  derived and/or modified sequence
ataaacaaaggcacattggcggccagggccagtccgcccggcggctcgcgcacggctccgcggtcccttttgcctgtccagccggccgcctgtccctgctccctccctccgtgaggtgtccgggttcccttcgcccagctctcccacccctacccgaccccggcgcccgggctcccagagggaactgcacttcggcagagttgaatgaatgaagacagacgcggagaactcctaaggaggagattggacaggctggactccccattgcttttctaaaaatcttggaaactttgtccttcattgaattacgacactgtccacctttaatttcctcgaaaacgcctgtaactcggctgaagcttcagtacctttatggacaactacagcacaggctacgacgtcaagccaccttgcttgtaccaaatgcccctgtccggacagcagtcctccattaaggtagaagacattcagatgcacaactaccagcaacacagccacctgcccccccagtctgaggagatgatgccgcactccgggtcggtttactacaagccctcctcgcccccgacgcccaccaccccgggcttccaggtgcagcacagccccatgtgggacgacccgggatctctccacaacttccaccagaactacgtggccactacgcacatgatcgagcagaggaaaacgccagtctcccgcctctccctcttctcctttaagcaatcgccccctggcaccccggtgtctagttgccagatgcgcttcgacgggcccctgcacgtccccatgaacccggagcccgccggcagccaccacgtggtggacgggcagaccttcgctgtgcccaaccccattcgcaagcccgcgtccatgggcttcccgggcctgcagatcggccacgcgtctcagctgctcgacacgcaggtgccctcaccgccgtcgcggggctccccctccaacgaggggctgtgcgctgtgtgtggggacaacgcggcctgccaacactacggcgtgcgcacctgtgagggctgcaaaggcttctttaagcgcacagtgcaaaaaaatgcaaaatacgtgtgtttagcaaataaaaactgcccagtggacaagcgtcgccggaatcgctgtcagtactgccgatttcagaagtgcctggctgttgggatggtcaaagaagtggttcgcacagacagtttaaaaggccggagaggtcgtttgccctcgaaaccgaagagcccacaggagccctctcccccttcgcccccggtgagtctgatcagtgccctcgtcagggcccatgtcgactccaacccggctatgaccagcctggactattccaggttccaggcgaaccctgactatcaaatgagtggagatgacacccagcatatccagcaattctatgatctcctgactggctccatggagatcatccggggctgggcagagaagatccctggcttcgcagacctgcccaaagccgaccaagacctgctttttgaatcagctttcttagaactgtttgtccttcgattagcatacaggtccaacccagtggagggtaaactcatcttttgcaatggggtggtcttgcacaggttgcaatgcgttcgtggctttggggaatggattgattccattgttgaattctcctccaacttgcagaatatgaacatcgacatttctgccttctcctgcattgctgccctggctatggtcacagagagacacgggctcaaggaacccaagagagtggaagaactgcaaaacaagattgtaaattgtctcaaagaccacgtgactttcaacaatggggggttgaaccgccccaattatttgtccaaactgttggggaagctcccagaacttcgtaccctttgcacacaggggctacagcgcattttctacctgaaattggaagacttggtgccaccgccagcaataattgacaaacttttcctggacactttacctttctaagacctcctcccaagcacttcaaaggaactggaatgataatggaaactgtcaagagggggcaagtcacatgggcagagatagccgtgtgagcagtctcagctcaagctgccccccatttctgtaaccctcctagcccccttgatccctaaagaaaacaaacaaacaaacaaaaactgttgctatttcctaacctgcaggcagaacctgaaagggcattttggctccggggcatcctggatttagaacatggactacacacaatacagtggtataaactttttattctcagtttaaaaatcagtttgttgttcagaagaaagattgctataatgtataatgggaaatgtttggccatgcttggttgttgcagttcagacaaatgtaacacacacacacatacacacacacacacacacacagagacacatcttaaggggacccacaagtattgccctttaacaagacttcaaagttttctgctgtaaagaaagctgtaatatatagtaaaactaaatgttgcgtgggtggcatgagttgaagaaggcaaaggcttgtaaatttacccaatgcagtttggctttttaaattattttgtgcctatttatgaataaatattacaaattctaaaagataagtgtgtttgcaaaaaaaaagaaaataaa

SEQ ID NO: 162603 - DNA, 1797 bp, Artificial Sequence
  derived and/or modified sequence
atgccatgtgtccaggcgcagtacggtagcagcccacaaggcgcatccccagccagccagtcttatagctaccattcatcaggtgaatattcttccgactttctcaccccagagttcgtgaaattttccatggacttaacaaatacagaaattaccgccactacaagtctgccgtcattctctactttcatggacaattattctaccggctatgatgtgaaacccccatgcctctatcagatgcctctcagcggccagcaaagcagcatcaaggttgaagatattcagatgcacaactaccagcagcacagccacctgcccccacagtctgaggaaatgatgccccattccgggtctgtgtactacaaaccctccagcccaccgaccccaacgactcctggttttcaggttcagcatagccctatgtgggatgaccccggtagtctgcacaattttcaccaaaattatgtagcaacgacacatatgatcgaacagagaaaaacacccgtctcccgattgtcattgttctctttcaagcagagcccacccggaactccagtgtcctcttgccaaatgcgatttgatgggcctctgcatgtgcctatgaaccctgagcccgcaggctctcaccacgtggtggacgggcagacgttcgccgtgccaaaccccatccgaaagccagcttccatggggtttccaggcctgcagattggacatgcctctcaactcctggacacacaggtgcctagcccaccatcccgcggtagtccctctaacgagggcctttgcgccgtttgcggagataacgcagcgtgtcagcattatggagtacgcacttgcgagggatgtaaaggattctttaaaagaacagttcagaagaatgccaagtacgtgtgcctcgctaacaaaaattgccccgtggataagagaagaagaaaccgctgtcagtattgccggtttcaaaagtgtctggccgtggggatggtgaaagaagtggtccgaactgattcccttaaaggcaggagaggcagactcccaagtaagcctaagtctccccaggagccctcgcccccttccccccctgtgtccctgattagcgctctcgtacgcgctcatgtggattccaacccggctatgacctctctcgattactctcggttccaagcaaacccagattatcagatgtcgggggacgatacccagcacattcagcaattttacgacttgctgacaggcagcatggagatcattcgtgggtgggccgaaaaaatccccggatttgccgacctgccgaaagcagaccaggatctgttatttgagagcgcttttctggaactattcgtacttcgactggcctataggagcaatcccgtagagggaaaattgattttctgcaatggcgtggtcttgcatcgcttacagtgcgtgcggggattcggagaatggatcgactcgattgtcgagttctcctcaaacttgcagaatatgaacatcgacatcagtgctttttcctgtatcgcagccctagcgatggtgactgagcgccatggactgaaagaaccaaagagagtggaagagctgcagaacaaaatcgtaaattgcctgaaggatcacgtcacattcaataacggtggcctcaacagaccaaattacctctctaagctcctaggtaaattgcccgagttaaggacactgtgcacacaagggttacagcggattttttacttgaaactggaagatttggtgccaccacccgcaatcatcgataagttatttctggacactttgccattctag

SEQ ID NO: 162604 - DNA, 1797 bp, Artificial Sequence
  derived and/or modified sequence
atgccctgtgtccaggctcagtatggcagtagcccacagggggcttctccagcctcacagagttactcctatcattcatctggggagtattcctctgacttcctgaccccggagtttgtgaaatttagtatggacctcacaaacaccgagatcactgcaacaaccagcctgccatcattttccaccttcatggataactactccaccggatatgacgtgaaacccccatgtctctaccaaatgcctcttagtggacagcagtcttccatcaaggttgaggatatccagatgcacaactaccagcagcacagtcacctccctccccagagtgaggagatgatgccacactcggggtctgtttattataagccttcctcaccacctacgcctaccacccctggattccaggtgcagcattcgccgatgtgggacgaccccggttccctacacaacttccatcaaaattacgtggccaccacgcatatgatagagcaaaggaaaacaccagtctccagattatcacttttctcattcaaacagtcaccccctggcacccccgtgagttcctgtcaaatgcgattcgacgggccattacacgttccaatgaacccagaacccgctggatcccatcacgtggttgatggccagacttttgccgttccaaatccaattcgaaaacctgccagtatgggtttccccggactgcagatagggcacgcgtcacagctgcttgatactcaggtgccaagccccccaagtcgtggttcgccaagcaatgaagggctgtgtgctgtctgcggggataacgctgcctgccagcactatggagtccgcacatgcgaaggatgcaaaggattcttcaagcggaccgtgcagaagaatgccaagtacgtttgccttgccaataagaattgtccagtcgacaagcgcaggcgcaacagatgtcagtattgtagatttcagaagtgtctcgcagtggggatggtgaaagaagtcgtgcgtacagacagcctcaaggggcgtagggggcgtctcccctctaagccaaaaagcccacaggaacccagtcccccatccccccctgtgagccttatatcagccttggttcgcgctcatgtggactctaatcctgctatgacttcactggactattccaggttccaggcgaacccagactaccagatgtccggcgacgatacacagcacattcaacagttctacgaccttctcaccgggtctatggagatcatccgcggttgggcggaaaaaatcccgggattcgcagatttacccaaggccgatcaggatcttctctttgagtccgcctttttggagttattcgtcctccgcctggcttacaggagcaacccagtggagggcaaattaatcttctgcaatggcgttgtacttcatcgccttcaatgcgtcagaggtttcggcgagtggatcgacagtattgttgagttcagttcaaacctgcagaatatgaatattgacattagcgcattcagctgcatcgctgccctagctatggttacagaaagacacggcttgaaagagcccaagagagtcgaagagttgcagaacaaaatcgtgaattgcctgaaggatcacgttactttcaacaacggcggactcaacaggccgaattacctttcaaagctgctcggaaagctgcctgagctgcgcacactctgtacccaaggactgcagaggatcttctacctaaaattagaggatcttgtgccgccaccagcaatcatcgacaaactgtttctagacactctccctttttag

SEQ ID NO: 162605 - DNA, 1608 bp, Artificial Sequence
  derived and/or modified sequence
atggacaactattctacagggtacgacgtcaaaccaccatgcttgtaccaaatgcctctatcaggccagcagtctagcattaaagttgaggatattcagatgcataattaccagcagcacagtcacctgccacctcaatctgaagagatgatgccacacagcggctccgtgtactataaaccatcaagtccccctacccctacaacccctggcttccaggtgcaacattccccaatgtgggatgatccaggctcgctacacaatttccatcagaattacgtcgcgactactcacatgatcgagcagcgcaagactccagtgagccgtttgtcactgttcagcttcaagcagtctccgccagggacacccgttagctcttgccagatgcgttttgatgggcctttacacgtgcccatgaaccccgagcctgcaggatctcatcacgtcgtcgatggacagacttttgcagtccccaaccctattagaaaacccgcatccatgggctttccaggcctacagatcggccacgctagtcagctcctggacacacaggtcccatccccaccgagcaggggtagtccttccaatgaggggctatgcgcagtgtgtggagacaacgctgcatgtcagcactacggtgtgagaacttgcgaaggctgtaagggcttcttcaaaaggaccgtgcagaagaacgctaagtatgtgtgcttagccaacaaaaactgtccggtcgacaaaagacggcgtaatcgctgccagtactgcaggtttcagaaatgcctcgccgtgggaatggtaaaagaggtggtcagaaccgactccctgaaaggtcggaggggtaggctgccaagtaagccaaagtcaccccaggaacctagccctccatctcctccagtgtcacttatatcagccctcgttagggctcatgttgacagcaatcccgctatgaccagcctggactattctcgttttcaagccaaccctgactaccagatgagcggcgatgacacacagcacattcagcagttctatgacttgcttacgggtagtatggagattattagaggctgggctgagaagatccctggattcgccgacctgcccaaagcggatcaggacctgctctttgaatctgcattccttgagttatttgtattaagactggcctacagatcgaatccagtagagggaaaattaatcttttgcaatggcgttgtcttgcatcgcttgcaatgtgtcagggggttcggtgagtggattgattcaatcgtggagttctcaagcaacctacagaatatgaatattgacatctcggcattcagctgcattgcagcgctggctatggtgacggagcggcacgggctaaaagaacccaaaagggtggaggagcttcagaataaaatcgtcaattgcttaaaagaccatgtgaccttcaacaacggcggtctcaacaggcccaactatctgtcaaaactgctgggcaagctgccagaactgcgcacactctgcacccagggactccaaaggatcttttatctgaagctggaggacctggtacccccaccagcaatcatcgacaaacttttccttgatactctacctttctag

SEQ ID NO: 162606 - DNA, 1797 bp, Artificial Sequence
  derived and/or modified sequence
atgccctgcgtgcaggcccagtacggcagcagcccccagggcgccagccccgccagccagagctacagctaccacagcagcggcgagtacagcagcgacttcctgacccccgagttcgtgaagttcagcatggacctgaccaacaccgagatcaccgccaccaccagcctgcccagcttcagcaccttcatggacaactacagcaccggctacgacgtgaagcccccctgcctgtaccagatgcccctgagcggccagcagagcagcatcaaggtggaggacatccagatgcacaactaccagcagcacagccacctgcccccccagagcgaggagatgatgccccacagcggcagcgtgtactacaagcccagcagcccccccacccccaccacccccggcttccaggtgcagcacagccccatgtgggacgaccccggcagcctgcacaacttccaccagaactacgtggccaccacccacatgatcgagcagagaaagacccccgtgagcagactgagcctgttcagcttcaagcagagcccccccggcacccccgtgagcagctgccagatgagattcgacggccccctgcacgtgcccatgaaccccgagcccgccggcagccaccacgtggtggacggccagaccttcgccgtgcccaaccccatcagaaagcccgccagcatgggcttccccggcctgcagatcggccacgccagccagctgctggacacccaggtgcccagcccccccagcagaggcagccccagcaacgagggcctgtgcgccgtgtgcggcgacaacgccgcctgccagcactacggcgtgagaacctgcgagggctgcaagggcttcttcaagagaaccgtgcagaagaacgccaagtacgtgtgcctggccaacaagaactgccccgtggacaagagaagaagaaacagatgccagtactgcagattccagaagtgcctggccgtgggcatggtgaaggaggtggtgagaaccgacagcctgaagggcagaagaggcagactgcccagcaagcccaagagcccccaggagcccagcccccccagcccccccgtgagcctgatcagcgccctggtgagagcccacgtggacagcaaccccgccatgaccagcctggactacagcagattccaggccaaccccgactaccagatgagcggcgacgacacccagcacatccagcagttctacgacctgctgaccggcagcatggagatcatcagaggctgggccgagaagatccccggcttcgccgacctgcccaaggccgaccaggacctgctgttcgagagcgccttcctggagctgttcgtgctgagactggcctacagaagcaaccccgtggagggcaagctgatcttctgcaacggcgtggtgctgcacagactgcagtgcgtgagaggcttcggcgagtggatcgacagcatcgtggagttcagcagcaacctgcagaacatgaacatcgacatcagcgccttcagctgcatcgccgccctggccatggtgaccgagagacacggcctgaaggagcccaagagagtggaggagctgcagaacaagatcgtgaactgcctgaaggaccacgtgaccttcaacaacggcggcctgaacagacccaactacctgagcaagctgctgggcaagctgcccgagctgagaaccctgtgcacccagggcctgcagagaatcttctacctgaagctggaggacctggtgcccccccccgccatcatcgacaagctgttcctggacaccctgcccttctag

SEQ ID NO: 162607 - DNA, 1608 bp, Artificial Sequence
  derived and/or modified sequence
atggacaactacagcaccggctacgacgtgaagcccccctgcctgtaccagatgcccctgagcggccagcagagcagcatcaaggtggaggacatccagatgcacaactaccagcagcacagccacctgcccccccagagcgaggagatgatgccccacagcggcagcgtgtactacaagcccagcagcccccccacccccaccacccccggcttccaggtgcagcacagccccatgtgggacgaccccggcagcctgcacaacttccaccagaactacgtggccaccacccacatgatcgagcagagaaagacccccgtgagcagactgagcctgttcagcttcaagcagagcccccccggcacccccgtgagcagctgccagatgagattcgacggccccctgcacgtgcccatgaaccccgagcccgccggcagccaccacgtggtggacggccagaccttcgccgtgcccaaccccatcagaaagcccgccagcatgggcttccccggcctgcagatcggccacgccagccagctgctggacacccaggtgcccagcccccccagcagaggcagccccagcaacgagggcctgtgcgccgtgtgcggcgacaacgccgcctgccagcactacggcgtgagaacctgcgagggctgcaagggcttcttcaagagaaccgtgcagaagaacgccaagtacgtgtgcctggccaacaagaactgccccgtggacaagagaagaagaaacagatgccagtactgcagattccagaagtgcctggccgtgggcatggtgaaggaggtggtgagaaccgacagcctgaagggcagaagaggcagactgcccagcaagcccaagagcccccaggagcccagcccccccagcccccccgtgagcctgatcagcgccctggtgagagcccacgtggacagcaaccccgccatgaccagcctggactacagcagattccaggccaaccccgactaccagatgagcggcgacgacacccagcacatccagcagttctacgacctgctgaccggcagcatggagatcatcagaggctgggccgagaagatccccggcttcgccgacctgcccaaggccgaccaggacctgctgttcgagagcgccttcctggagctgttcgtgctgagactggcctacagaagcaaccccgtggagggcaagctgatcttctgcaacggcgtggtgctgcacagactgcagtgcgtgagaggcttcggcgagtggatcgacagcatcgtggagttcagcagcaacctgcagaacatgaacatcgacatcagcgccttcagctgcatcgccgccctggccatggtgaccgagagacacggcctgaaggagcccaagagagtggaggagctgcagaacaagatcgtgaactgcctgaaggaccacgtgaccttcaacaacggcggcctgaacagacccaactacctgagcaagctgctgggcaagctgcccgagctgagaaccctgtgcacccagggcctgcagagaatcttctacctgaagctggaggacctggtgcccccccccgccatcatcgacaagctgttcctggacaccctgcccttctag

SEQ ID NO: 162608 - protein, 1087 aa, Artificial Sequence
  derived and/or modified sequence
MDLYSTPAAALDRFVARRLQPRKEFVEKARRALGALAAALRERGGRLGAAAPRVLKTVKGGSSGRGTALKGGCDSELVIFLDCFKSYVDQRARRAEILSEMRASLESWWQNPVPGLRLTFPEQSVPGALQFRLTSVDLEDWMDVSLVPAFNVLGQAGSGVKPKPQVYSTLLNSGCQGGEHAACFTELRRNFVNIRPAKLKNLILLVKHWYHQVCLQGLWKETLPPVYALELLTIFAWEQGCKKDAFSLAEGLRTVLGLIQQHQHLCVFWTVNYGFEDPAVGQFLQRQLKRPRPVILDPADPTWDLGNGAAWHWDLLAQEAASCYDHPCFLRGMGDPVQSWKGPGLPRAGCSGLGHPIQLDPNQKTPENSKSLNAVYPRAGSKPPSCPAPGPTGAASIVPSVPGMALDLSQIPTKELDRFIQDHLKPSPQFQEQVKKAIDIILRCLHENCVHKASRVSKGGSFGRGTDLRDGCDVELIIFLNCFTDYKDQGPRRAEILDEMRAQLESWWQDQVPSLSLQFPEQNVPEALQFQLVSTALKSWTDVSLLPAFDAVGQLSSGTKPNPQVYSRLLTSGCQEGEHKACFAELRRNFMNIRPVKLKNLILLVKHWYRQVAAQNKGKGPAPASLPPAYALELLTIFAWEQGCRQDCFNMAQGFRTVLGLVQQHQQLCVYWTVNYSTEDPAMRMHLLGQLRKPRPLVLDPADPTWNVGHGSWELLAQEAAALGMQACFLSRDGTSVQPWDVMPALLYQTPAGDLDKFISEFLQPNRQFLAQVNKAVDTICSFLKENCFRNSPIKVIKVVKGGSSAKGTALRGRSDADLVVFLSCFSQFTEQGNKRAEIISEIRAQLEACQQERQFEVKFEVSKWENPRVLSFSLTSQTMLDQSVDFDVLPAFDALGQLVSGSRPSSQVYVDLIHSYSNAGEYSTCFTELQRDFIISRPTKLKSLIRLVKHWYQQCTKISKGRGSLPPQHGLELLTVYAWEQGGKDSQFNMAEGFRTVLELVTQYRQLCIYWTINYNAKDKTVGDFLKQQLQKPRPIILDPADPTGNLGHNARWDLLAKEAAACTSALCCMGRNGIPIQPWPVKAAV

SEQ ID NO: 162609 - protein, 1086 aa, Artificial Sequence
  derived and/or modified sequence
MDLYSTPAAALDRFVARRLQPRKEFVEKARRALGALAAALRERGGRLGAAAPRVLKTVKGGSSGRGTALKGGCDSELVIFLDCFKSYVDQRARRAEILSEMRASLESWWQNPVPGLRLTFPEQSVPGALQFRLTSVDLEDWMDVSLVPAFNVLGQAGSGVKPKPQVYSTLLNSGCQGGEHAACFTELRRNFVNIRPAKLKNLILLVKHWYHQVCLQGLWKETLPPVYALELLTIFAWEQGCKKDAFSLAEGLRTVLGLIQQHQHLCVFWTVNYGFEDPAVGQFLQRQLKRPRPVILDPADPTWDLGNGAAWHWDLLAQEAASCYDHPCFLRGMGDPVQSWKGPGLPRAGCSGLGHPIQLDPNQKTPENSKSLNAVYPRAGSKPPSCPAPGPTGQPASSSVPGMALDLSQIPTKELDRFIQDHLKPSPQFQEQVKKAIDIILRCLHENCVHKASRVSKGGSFGRGTDLRDGCDVELIIFLNCFTDYKDQGPRRAEILDEMRAQLESWWQDQVPSLSLQFPEQNVPEALQFQLVSTALKSWTDVSLLPAFDAVGQLSSGTKPNPQVYSRLLTSGCQEGEHKACFAELRRNFMNIRPVKLKNLILLVKHWYRQVAAQNKGKGPAPASLPPAYALELLTIFAWEQGCRQDCFNMAQGFRTVLGLVQQHQQLCVYWTVNYSTEDPAMRMHLLGQLRKPRPLVLDPADPTWNVGHGSWELLAQEAAALGMQACFLSRDGTSVQPWDVMPALLYQTPAGDLDKFISEFLQPNRQFLAQVNKAVDTICSFLKENCFRNSPIKVIKVVKGGSSAKGTALRGRSDADLVVFLSCFSQFTEQGNKRAEIISEIRAQLEACQQERQFEVKFEVSKWENPRVLSFSLTSQTMLDQSVDFDVLPAFDALGQLVSGSRPSSQVYVDLIHSYSNAGEYSTCFTELQRDFIISRPTKLKSLIRLVKHWYQQCTKISKGRGSLPPQHGLELLTVYAWEQGGKDSQFNMAEGFRTVLELVTQYRQLCIYWTINYNAKDKTVGDFLKQQLQKPRPIILDPADPTGNLGHNARWDLLAKEAAACTSALCCMGRNGIPIQPWPVKAAV

SEQ ID NO: 162610 - DNA, 3264 bp, Artificial Sequence
  derived and/or modified sequence
atggatctttactccactccagctgccgccctagaccgtttcgtcgcccgccgtctgcagccaagaaaagagtttgtagagaaagcccgccgtgcactgggagccctggcggcggctcttcgagagagaggtggccggctaggtgctgccgccccccgcgtgctgaagaccgtgaaaggcgggtctagtgggcgcggaacagctcttaagggtgggtgcgatagcgaactggtaatattcctcgattgtttcaagtcatatgtcgatcagagagcccggcgcgccgaaatcctgtcagagatgcgcgcttcccttgagagctggtggcagaacccagtccctggtctccggctcacattcccagagcagagtgtgcccggagcgctgcaatttcgtctgacaagcgtcgacttggaggactggatggacgtctctttggtgccggccttcaacgttcttggtcaagctgggtctggagtcaagccaaaaccgcaggtgtactcaacactcctcaactccggttgtcagggaggagagcacgctgcctgtttcaccgagttaagaagaaattttgtgaacattcgccctgccaaactcaagaatctgattctgctcgttaagcactggtaccatcaggtttgcctacagggactctggaaggaaacattaccacccgtctacgcactcgagctgctgaccatcttcgcctgggaacagggatgtaaaaaagacgcattcagcctggctgaagggctgcgcactgtcctcggcttaattcagcagcatcagcatctgtgcgtgttttggacggtgaattatgggttcgaggacccagcagtgggtcagttcctccagcgccagcttaagcggccccggcccgtgattctagatcccgcagatccaacttgggatctcggtaacggcgcagcgtggcactgggacctgctggctcaggaggctgcttcttgttacgaccatccttgctttcttaggggcatgggtgatccagtgcagagctggaagggtccaggtcttccccgcgccggctgcagcgggttgggtcacccaattcagctcgatcctaatcagaagaccccagagaatagcaagtcgctcaatgccgtttaccctagggccggtagcaagcctccatcttgtcctgcccctggacccaccggcgcggcctcaatagtccccagcgtccctggaatggcattggatctgtctcagattccaacaaaggaactagacagattcattcaagaccacctcaaaccgtccccccagttccaggagcaggttaaaaaggctatcgacatcatcctgagatgtctgcacgagaattgtgtccacaaagcctctcgcgtatctaaaggtggaagttttggtcgcggcactgacctgagagatgggtgcgacgtagagctcatcatttttctgaactgttttaccgactataaggaccagggacctagaagggccgagattctggatgaaatgcgagcacagctcgaaagctggtggcaggaccaggtgccctctctatccctgcaatttccagagcagaacgtaccagaggccctgcagtttcagctggtgtctactgcgttgaagtcctggactgacgtgagcctattacctgccttcgatgcagttggacagctcagcagcgggaccaagccaaatcctcaggtttatagccgactcctcacttccggatgccaggagggagagcataaggcctgcttcgccgagctccggagaaatttcatgaacatccgccccgtgaaactgaagaacttgatactcctcgtgaaacattggtacaggcaagtggctgctcagaataaaggtaaggggccggccccagccagcctccctcctgcttacgcactcgaacttttgacaatctttgcctgggaacaaggttgtagacaagactgttttaacatggcgcaaggcttcaggactgtgttagggcttgtccagcagcatcagcagctctgcgtgtattggactgtaaactattccaccgaagaccctgctatgcgaatgcacctgctggggcaactgcgcaaaccaagaccactggtgctcgatcctgcagatcccacatggaacgtgggccacggaagttgggagctgctagctcaagaggcggcagcgttggggatgcaagcttgcttcttaagcagagatggaacaagcgtccagccttgggacgtcatgcccgccctactgtatcaaacgcccgcaggtgacctagataagttcatcagcgaattcctgcaacctaacaggcagtttttagcccaggtgaataaggcggtagatacgatttgtagcttcctcaaggagaattgcttccggaacagcccaattaaggtcatcaaggtcgtgaagggaggtagcagcgctaaaggaactgcactgcggggacgatctgacgctgatctggtcgtgtttctgtcctgtttttcacaattcactgagcaaggtaacaaaagggcagagattatcagtgagatcagagctcaacttgaggcttgtcaacaggaacggcagtttgaggtgaaattcgaggtcagcaagtgggagaaccctagagtgctcagctttagtctgacgtctcagacaatgttagatcagtcagtggatttcgatgtgctgcctgcattcgacgctctagggcaactagttagcggcagccgcccctccagtcaggtgtacgtcgaccttatccattcatatagcaatgccggtgaatatagcacctgcttcaccgagctgcagagggacttcatcatctcaaggccaacaaaactgaaaagcctgattcggttggtcaagcactggtaccagcagtgcaccaagatttcaaaggggcggggctcactgccacctcagcatggactggagctgctgaccgtgtacgcttgggaacagggaggaaaagactctcagtttaacatggcagaaggatttcgtacagtccttgaattggtgacccaatacaggcaactgtgcatctattggactattaattataatgctaaggataaaactgtgggcgactttctcaaacaacaactgcaaaaacctcgccctataattctggatccggctgatcccaccggaaacctcggtcacaatgccagatgggatctgctggccaaggaagcggccgcttgcacatccgctttgtgctgcatgggaagaaatgggatcccaatacaaccttggccggttaaggctgccgtttag

SEQ ID NO: 162611 - DNA, 3264 bp, Artificial Sequence
  derived and/or modified sequence
atggacctgtacagcaccccagctgctgccctggacagatttgtggcccggcggctgcagcccaggaaggagtttgtggagaaggcccggcgggccctgggcgccctggccgccgccctgcgggagcggggcggccgcctgggcgccgccgccccccgggtgctgaagacagtgaagggcggcagcagcggccggggcacagccctgaagggcggctgtgacagcgagctggtgatcttcctggactgcttcaagagctatgtggaccagagggccaggagagctgagatcctgtctgagatgagggccagcctggagagctggtggcagaaccctgtgcccggcctgcggctgaccttccctgagcagagcgtgcctggggccctgcagttccggctgacctctgtggacctggaggactggatggatgtgtccctggtgcctgccttcaacgtgctgggccaggccggcagcggcgtgaagcccaagccccaggtgtacagcaccctgctgaacagcggctgccagggcggggagcacgccgcctgcttcacagagctgcggaggaactttgtgaacatccggcctgccaagctgaagaacctgatcctgctggtgaagcactggtaccaccaggtgtgcctgcagggcctgtggaaggagaccctgccccctgtgtatgccctggagctgctgaccatctttgcctgggagcagggctgcaagaaggatgccttcagcctggccgagggcctgaggacagtgctgggcctcatccagcagcaccagcacctgtgtgtgttctggacagtgaactacggctttgaggaccctgctgtgggccagttcctgcagaggcagctgaagaggcccaggcctgtgatcctggaccctgctgaccccacctgggacctgggcaatggagctgcctggcactgggacctgctggcccaggaggccgccagctgctatgaccacccctgcttcctgcggggcatgggagaccctgtgcagagctggaagggccctggcctgccccgggccggctgcagcggcctgggccaccccatccagctggaccccaaccagaagaccccagagaacagcaagagcctgaatgctgtgtaccccagggctggcagcaagccacccagctgcccagcccctggccccaccggggccgccagcatcgtgcccagcgtgcccggcatggccctggacctgagccagatccccaccaaggagctggaccgcttcatccaggaccacctgaagcccagcccccagttccaggagcaggtgaagaaggccatcgacatcatcctgcgctgcctgcacgagaactgtgtgcacaaggccagccgggtgtccaagggcggcagctttggccggggcacagacctgagagatggctgtgatgtggagctgatcatcttcctgaactgcttcacagactacaaggaccagggcccccggcgggcagagatcctggatgagatgagggcccagctggagagctggtggcaggaccaggtgcccagcctgagcctgcagtttcctgagcagaatgtgcctgaggccctgcagttccagctggtgtccacagccctgaagtcctggacagatgtgtccctgctgcctgcctttgatgctgtgggccagctgagcagcggcaccaagcccaacccccaggtgtacagccggctgctgaccagcggctgccaggagggggagcacaaggcctgctttgctgagctgcggaggaacttcatgaacatccggcctgtgaagctgaagaacctgatcctgctggtgaagcactggtaccggcaggtggccgcccagaacaagggcaaaggacctgccccagccagcctgcccccagcctatgccctggagctgctgaccatctttgcctgggagcagggctgccggcaggactgcttcaacatggcccagggcttcagaacagtgctgggcctggtgcagcagcaccagcagctgtgtgtgtactggacagtgaactacagcacagaagatcctgccatgaggatgcacctgctgggccagctgaggaagccccggcccctggtgctggaccctgctgaccccacctggaatgtgggccacggctcctgggagctgctggcccaggaggccgccgccctgggcatgcaggcctgcttcctgagcagagatggcacctctgtgcagccctgggatgtgatgcctgccctgctgtaccagaccccagctggggacctggacaagttcatcagcgagttcctgcagcccaaccggcagttcctggcccaggtgaacaaggctgtggacaccatctgcagcttcctgaaggagaactgcttcaggaacagccccatcaaggtgatcaaggtggtgaagggcggcagcagcgccaagggcacagccctgcggggccgcagtgatgctgacctggtggtgttcctgagctgcttcagccagttcacagagcagggcaacaagagagctgagatcatcagcgagatccgggcccagctggaggcctgccagcaggagcggcagtttgaggtgaagtttgaggtgtccaagtgggagaacccccgggtgctgtccttcagcctgaccagccagaccatgctggaccagagcgtggactttgatgtgctgcctgcctttgatgccctgggccagctggtgtctggcagccggcccagcagccaggtgtatgtggacctgatccacagctacagcaatgctggggagtacagcacctgcttcacagagctgcagagggacttcatcatcagccggcccaccaagctgaagagcctcatccggctggtgaagcactggtaccagcagtgcaccaagatcagcaagggccggggcagcctgcccccccagcacggcctggagctgctgactgtgtatgcctgggagcagggcggcaaggacagccagttcaacatggccgagggcttcagaacagtgctggagctggtgacccagtaccggcagctgtgcatctactggaccatcaactacaatgccaaggacaagacagtgggggacttcctgaagcagcagctgcagaagccccggcccatcatcctggaccctgctgaccccactggaaacctgggccacaatgcccgctgggacctgctggccaaggaggccgccgcctgcaccagcgccctgtgctgcatgggcagaaatggcatccccatccagccctggcctgtgaaggctgctgtgtag

SEQ ID NO: 162612 - DNA, 3264 bp, Artificial Sequence
  derived and/or modified sequence
atggacctgtacagcacccccgccgccgccctggaccggttcgtggcccgcaggcttcaacctcgtaaggaatttgtggaaaaagcgcggagagccctcggagcactggcagcggccctcagagagcggggtggcagattgggggcagcagcacctagggtgcttaagactgtgaaagggggcagctcggggaggggtactgcgcttaagggcgggtgtgactcagagctggtaatattcctggactgttttaaaagttatgtggatcagcgagccagacgggctgagattctttccgagatgcgagcgagtttagagtcttggtggcaaaacccagtgccggggctcagactgacatttcctgagcaaagcgtgcctggggccctgcagttcaggctgactagcgtggaccttgaagattggatggatgtgagcttagttccagcattcaacgttctcggccaggctggatcgggggtgaagccgaagccacaggtctattcaacgctgttgaactcaggatgtcaagggggcgagcacgcagcctgttttacagagctccggcggaatttcgtcaacattcggccagccaagttaaaaaatctcattttgttagttaaacactggtatcaccaggtgtgtctgcaagggctgtggaaggaaacactccctcccgtctacgccctggagctactaacaatctttgcttgggagcagggctgcaagaaggatgctttttcacttgccgaaggccttaggactgttttgggccttattcagcagcaccagcacttgtgtgtattttggaccgtgaactatgggtttgaggatccggccgttggacagtttctgcagagacagttaaagcgtccacgccccgtgattctcgaccccgcagatcccacctgggatcttgggaatggggcagcttggcactgggacttgctggcacaagaagcagcttcctgctatgatcacccatgtttcctgagaggtatgggagacccagtgcagtcttggaaaggcccaggcctgcctcgagctgggtgctcagggctggggcaccccatacagcttgatcctaatcagaaaacccccgaaaattccaagtctctcaatgcagtttaccctcgggccggctcaaagccccccagctgccctgcgccaggtccaactggtgctgccagcattgtccctagcgtgcccgggatggccctcgatctgtcacaaattcctaccaaagagttagatcgcttcatccaggaccacttgaagcctagccctcagtttcaggaacaggtcaagaaggctatagacatcattctgagatgcctgcatgagaactgtgtccataaggcttctcgggtgtcaaaggggggaagtttcggaagggggaccgacctgcgggatgggtgcgatgtcgaactcattattttcctgaattgctttaccgactacaaggatcagggccccaggagagcagaaattttggacgagatgcgagcacaactggagagctggtggcaggaccaggtgccaagtctttctcttcagtttcccgaacagaatgtgccagaggccctccaattccagctggtctcaacagcccttaagagttggaccgacgtatcactcctgcctgcctttgatgccgtagggcaactgtcgtccggcaccaagcccaacccccaggtttactccagactgttaacttctggctgccaggaaggcgagcataaagcctgctttgccgagctgcgacgcaactttatgaacattagacctgtgaaactcaagaacctgattctcttggtgaagcactggtaccggcaggtggcagcccagaacaagggcaagggtccggctcctgcttctctgcctccggcctatgcgctcgaactgttgaccatattcgcctgggagcaggggtgcaggcaggactgcttcaatatggctcaggggttcagaaccgtattgggattggtccagcagcaccagcagttatgcgtgtattggacagttaactactccactgaggaccctgccatgcgaatgcatctgctaggacagctgcgaaagcctaggcctctggtgctggaccctgcggatccgacatggaacgtaggccatggaagctgggagttgcttgcccaggaggcagctgctctaggcatgcaggcctgttttctgagtcgcgatggcacatcagtccagccctgggatgtcatgcccgcattgctgtatcagacacctgccggcgatctagacaagtttattagcgagtttctacagcccaaccgacagttccttgcccaggtcaacaaggcggtcgacacaatctgcagtttcctgaaagagaactgctttaggaattccccaattaaggtgatcaaggtggttaagggagggtctagtgctaaaggcaccgctctcagaggccgcagtgacgccgatttagttgtgtttttgtcatgtttctcccagttcacggagcagggcaataagcgcgcagaaattatctctgagatacgggcccaacttgaggcctgccaacaggaacgccaattcgaggtgaagttcgaggtatccaagtgggaaaacccacgggtgctttcgttctccttaacatcacagacgatgctggatcagagcgtggacttcgacgttttaccagcctttgacgctcttggccagctcgtgtccggtagccgcccgagcagccaagtgtatgtggatctgatacattcctactccaacgccggcgaatatagtacctgttttaccgagctccagcgggacttcatcattagcagaccaactaagctgaagagcttaattcgcctggttaagcactggtaccagcagtgtacaaagatctcgaaagggcgaggatcactccccccccagcacggactcgaactgctgaccgtctacgcttgggaacaggggggaaaggattcccagttcaacatggcagagggattccggaccgtcttggaacttgtgacacagtacaggcagttatgtatctactggaccataaactacaatgctaaggacaagaccgtcggtgactttctgaaacaacaactgcaaaaacctagaccaataattcttgatccggctgatccaacgggaaacctgggccataacgctcggtgggacctgttagctaaggaggcagccgcctgtaccagcgcactgtgttgcatgggtaggaatggaattccaatacaaccttggcctgtgaaggccgccgtatag

SEQ ID NO: 162613 - DNA, 3264 bp, Artificial Sequence
  derived and/or modified sequence
atggacctctacagtacaccagcagccgctttggacagattcgtcgcccgacgtctgcagcccagaaaagagttcgtcgaaaaggcgaggagagcattgggggcactagcagccgctttgcgagaacgcggtggtagacttggcgctgcggcaccacgggtgcttaaaaccgtcaagggaggaagcagcggcagaggaactgccctgaaagggggttgtgatagtgagctcgtgatctttttggactgtttcaaaagctatgttgatcagagagcacgcagagcagaaattctgtcggaaatgagggcaagcctggagtcatggtggcagaacccggtgccagggctgcggcttactttccccgaacagtcggtgccaggcgcactacagtttagacttacttctgtagatctcgaggactggatggatgtcagtcttgtcccagcattcaacgtgctcggccaggcaggatccggagtgaaacccaagccacaggtttattcgaccttgcttaactctggctgtcagggaggagaacacgctgcatgcttcaccgagctgaggcgaaatttcgtgaacataaggcccgctaaactgaagaacctgattttgctggttaaacattggtaccaccaggtctgtttacagggcctttggaaggagaccctccctccagtctatgctctggagctactgactatattcgcgtgggagcaggggtgtaagaaagatgccttttctcttgcagaggggctcagaaccgtccttggcctgatccagcagcaccagcacctttgcgtgttttggactgtgaattatggtttcgaagaccctgccgtcggacaattcctacagcgacagctcaagcgcccacggcctgtgatcttagaccctgcagatcccacctgggacctcggcaatggtgccgcttggcactgggacctcttggcacaggaagccgcttcctgctacgatcacccttgttttcttaggggcatgggagatcccgtacagagctggaaggggcctggcctgccaagagcagggtgcagcggcctggggcacccgatccaacttgatccaaaccagaaaaccccagagaactccaaaagcttgaatgccgtttaccctagggccggatctaagcccccttcatgtcctgcgccaggcccaacaggtgcagcttcaatcgtgcctagtgtaccaggaatggcattagatttgagccagataccaaccaaggagttagacagatttatacaggaccatctgaagccctcccctcagttccaagaacaggttaagaaagccatcgacatcattctccgctgcctgcatgagaattgtgtgcacaaggcaagccgcgtgtctaaaggtggaagttttgggagaggaaccgacctgcgggatggatgtgatgtcgaactcattatctttcttaactgctttacagattacaaggaccagggcccaagacgagctgagattctcgacgaaatgagggcccagttggagagctggtggcaagatcaggtgccgtcccttagcctgcagttcccagaacagaatgtcccagaggctctccagttccaacttgtcagcaccgccctgaagtcttggactgatgtgagcctcctgcctgccttcgatgcggtgggacaactctcaagtggcaccaagccaaacccgcaggtctactcgcgacttttgactagtgggtgtcaggagggcgaacacaaagcgtgcttcgcggagctcagacgaaactttatgaacatccgcccagtcaagctgaagaatcttatcctgttagttaaacactggtacaggcaggtggccgctcagaacaaagggaaggggcctgcacccgcttcactaccccctgcttatgctctggagctcctgactattttcgcatgggaacaaggttgccgccaagattgcttcaacatggcccaagggttccggacagtcttaggtctcgttcagcagcatcaacagctctgcgtgtattggactgttaattattctacagaggatcccgctatgagaatgcatctactgggtcagctcagaaagcccaggccgctggtgctggacccagcagatcctacatggaatgtcggccatggctcgtgggagctgcttgctcaagaagccgctgccctggggatgcaagcatgtttcctttctcgcgacggcacatccgttcaaccctgggatgtcatgcccgctctcctttatcaaacacccgcaggggacctggataagttcatatctgaatttttgcaacccaaccggcagttcttggcccaagttaacaaagcagtggacaccatttgttccttcctgaaggagaattgttttagaaactctcccattaaagtcatcaaagtagtgaagggcggttcgagtgcaaaaggaacggcactgagaggacggtctgacgctgatctggttgtatttctgagctgcttctcgcaattcacagaacagggtaacaagagagcggaaattatctctgagatacgggctcagctggaggcatgtcagcaggaacgccagttcgaggtgaagtttgaggtgtctaagtgggagaatccacgtgttttgtcgttttcactgacctcccagacaatgctggaccagtccgtcgattttgatgtcttgccagcctttgatgccctggggcagctggttagcggcagcaggcctagctctcaagtatatgtcgacttgatacattcctacagcaacgctggcgaatactcgacgtgctttacggaactccagagggatttcatcatttcacggcctactaaattgaaaagcctgatacgactggtcaaacattggtaccagcagtgcactaagatctcaaaggggcgtggcagcttaccaccgcagcatggcctggaacttctaaccgtttacgcttgggaacaggggggaaaggactctcagttcaacatggcagaaggttttcgcacagtactggaactggtaacccagtatcgtcaactctgtatttactggacaatcaactataatgcgaaggacaagactgtgggcgactttttaaagcagcagctgcagaaaccgcgacccatcatcttggaccccgctgaccccacagggaacctcgggcacaatgcccgttgggatctgctcgcaaaagaagctgcagcctgtacatccgctctctgttgcatgggtagaaatggaattcctatccaaccttggccagtgaaggccgcagtttag

SEQ ID NO: 162614 - DNA, 3264 bp, Artificial Sequence
  derived and/or modified sequence
atggacctgtacagcacccccgccgccgccctggacagattcgtggccagaagactgcagcccagaaaggagttcgtggagaaggccagaagagccctgggcgccctggccgccgccctgagagagagaggcggcagactgggcgccgccgcccccagagtgctgaagaccgtgaagggcggcagcagcggcagaggcaccgccctgaagggcggctgcgacagcgagctggtgatcttcctggactgcttcaagagctacgtggaccagagagccagaagagccgagatcctgagcgagatgagagccagcctggagagctggtggcagaaccccgtgcccggcctgagactgaccttccccgagcagagcgtgcccggcgccctgcagttcagactgaccagcgtggacctggaggactggatggacgtgagcctggtgcccgccttcaacgtgctgggccaggccggcagcggcgtgaagcccaagccccaggtgtacagcaccctgctgaacagcggctgccagggcggcgagcacgccgcctgcttcaccgagctgagaagaaacttcgtgaacatcagacccgccaagctgaagaacctgatcctgctggtgaagcactggtaccaccaggtgtgcctgcagggcctgtggaaggagaccctgccccccgtgtacgccctggagctgctgaccatcttcgcctgggagcagggctgcaagaaggacgccttcagcctggccgagggcctgagaaccgtgctgggcctgatccagcagcaccagcacctgtgcgtgttctggaccgtgaactacggcttcgaggaccccgccgtgggccagttcctgcagagacagctgaagagacccagacccgtgatcctggaccccgccgaccccacctgggacctgggcaacggcgccgcctggcactgggacctgctggcccaggaggccgccagctgctacgaccacccctgcttcctgagaggcatgggcgaccccgtgcagagctggaagggccccggcctgcccagagccggctgcagcggcctgggccaccccatccagctggaccccaaccagaagacccccgagaacagcaagagcctgaacgccgtgtaccccagagccggcagcaagccccccagctgccccgcccccggccccaccggcgccgccagcatcgtgcccagcgtgcccggcatggccctggacctgagccagatccccaccaaggagctggacagattcatccaggaccacctgaagcccagcccccagttccaggagcaggtgaagaaggccatcgacatcatcctgagatgcctgcacgagaactgcgtgcacaaggccagcagagtgagcaagggcggcagcttcggcagaggcaccgacctgagagacggctgcgacgtggagctgatcatcttcctgaactgcttcaccgactacaaggaccagggccccagaagagccgagatcctggacgagatgagagcccagctggagagctggtggcaggaccaggtgcccagcctgagcctgcagttccccgagcagaacgtgcccgaggccctgcagttccagctggtgagcaccgccctgaagagctggaccgacgtgagcctgctgcccgccttcgacgccgtgggccagctgagcagcggcaccaagcccaacccccaggtgtacagcagactgctgaccagcggctgccaggagggcgagcacaaggcctgcttcgccgagctgagaagaaacttcatgaacatcagacccgtgaagctgaagaacctgatcctgctggtgaagcactggtacagacaggtggccgcccagaacaagggcaagggccccgcccccgccagcctgccccccgcctacgccctggagctgctgaccatcttcgcctgggagcagggctgcagacaggactgcttcaacatggcccagggcttcagaaccgtgctgggcctggtgcagcagcaccagcagctgtgcgtgtactggaccgtgaactacagcaccgaggaccccgccatgagaatgcacctgctgggccagctgagaaagcccagacccctggtgctggaccccgccgaccccacctggaacgtgggccacggcagctgggagctgctggcccaggaggccgccgccctgggcatgcaggcctgcttcctgagcagagacggcaccagcgtgcagccctgggacgtgatgcccgccctgctgtaccagacccccgccggcgacctggacaagttcatcagcgagttcctgcagcccaacagacagttcctggcccaggtgaacaaggccgtggacaccatctgcagcttcctgaaggagaactgcttcagaaacagccccatcaaggtgatcaaggtggtgaagggcggcagcagcgccaagggcaccgccctgagaggcagaagcgacgccgacctggtggtgttcctgagctgcttcagccagttcaccgagcagggcaacaagagagccgagatcatcagcgagatcagagcccagctggaggcctgccagcaggagagacagttcgaggtgaagttcgaggtgagcaagtgggagaaccccagagtgctgagcttcagcctgaccagccagaccatgctggaccagagcgtggacttcgacgtgctgcccgccttcgacgccctgggccagctggtgagcggcagcagacccagcagccaggtgtacgtggacctgatccacagctacagcaacgccggcgagtacagcacctgcttcaccgagctgcagagagacttcatcatcagcagacccaccaagctgaagagcctgatcagactggtgaagcactggtaccagcagtgcaccaagatcagcaagggcagaggcagcctgcccccccagcacggcctggagctgctgaccgtgtacgcctgggagcagggcggcaaggacagccagttcaacatggccgagggcttcagaaccgtgctggagctggtgacccagtacagacagctgtgcatctactggaccatcaactacaacgccaaggacaagaccgtgggcgacttcctgaagcagcagctgcagaagcccagacccatcatcctggaccccgccgaccccaccggcaacctgggccacaacgccagatgggacctgctggccaaggaggccgccgcctgcaccagcgccctgtgctgcatgggcagaaacggcatccccatccagccctggcccgtgaaggccgccgtgtag

SEQ ID NO: 162615 - DNA, 3261 bp, Artificial Sequence
  derived and/or modified sequence
atggacctgtactccacccccgctgccgcattagaccgatttgttgcccgtagactccagccccgcaaagaatttgtggagaaggcaaggagagctctcggggccttagccgctgctctaagagaacgtggcggcagactaggagctgcagccccccgtgtcctcaagaccgtgaagggtggctcctctgggcgaggaacggccctgaaaggcggctgtgatagcgagcttgtgatctttctggactgtttcaaatcatatgttgaccagagggctaggagggcggagatcctcagcgagatgagggcatccctggaaagctggtggcagaaccctgtgccaggtctgcgacttacttttccggaacagtccgtccccggcgccctacagtttcgactcacgagcgttgacctcgaggactggatggatgtttcgctggtccctgccttcaacgtgttagggcaggctggatccggcgtgaaacctaagccccaagtgtacagtacactgcttaactctggatgccaagggggggaacacgctgcctgcttcacagagttaagacggaattttgtcaacatccgccctgcaaagctcaagaacctgattctgctggtgaagcattggtaccaccaggtgtgcctgcaagggttatggaaagaaactctccctcctgtgtatgcgttagaactcctcacaatcttcgcttgggaacagggatgtaagaaagatgccttctccttagcggaaggattgcgcaccgtcctaggattgatccagcagcaccagcatctttgcgtcttttggaccgtaaattacggattcgaggacccagctgtgggacagttcctgcagcggcaactcaagagaccacgcccagtcatccttgatcccgccgacccaacgtgggacctgggcaatggcgcagcctggcattgggacctgctagctcaggaagcagcctcatgctacgatcatccttgttttcttcggggaatgggtgaccccgtccagagctggaagggaccaggcctgccacgcgcaggctgctcgggattggggcatcccattcagctggatccaaatcagaagactccggagaattccaaatctttaaacgccgtatatccacgggcaggttccaagccccccagctgtccggctccagggccgactgggcagccggcgagttcttcagttccggggatggcactggatctgtcccagattcctaccaaggagctcgacaggtttatccaggatcatctgaaaccatcgccccagtttcaggagcaggtaaagaaagctattgacattattctcaggtgcctacatgaaaattgtgtgcataaggcctctagagtgtccaaaggagggtcttttggtagaggtactgacctccgggatggatgcgatgttgagctgatcatcttcctgaattgctttaccgattataaggatcaagggccgagacgcgccgagatccttgacgagatgcgtgctcagttggagtcatggtggcaagatcaggtgccgtcactgtcactgcaatttcctgagcaaaatgtgcctgaggccttgcaatttcagctggtatctacagccctgaaaagttggacagatgtctcccttctgcctgccttcgatgctgtaggccagttgtcctctgggacgaagccaaacccacaagtctattcccgacttttgacctccggttgccaggagggtgagcacaaggcctgtttcgcggagttacgtagaaactttatgaacatccgtcctgtaaaactgaagaatctcattctgcttgttaagcactggtatcggcaggtggccgctcagaataagggaaaaggaccggcccccgcatcattgccgcccgcctatgccttggaactgctgaccatctttgcctgggagcagggttgccggcaggattgttttaacatggcccaaggattccgcaccgtgctgggtcttgtgcagcaacatcagcaactgtgcgtatactggactgtgaattattcaaccgaggatcctgctatgcggatgcaccttttgggccagctcaggaaacccagacccctggtgctggaccccgcagatcccacctggaatgtcggccacggctcgtgggagttactggcacaggaagctgccgccctgggcatgcaggcatgttttctatctagggacggaacgagcgtccaaccctgggatgtcatgccagccctgttgtaccagacccctgcgggcgatttagataaattcatctccgagttcctccagcccaatagacaattcttagcacaggtgaataaagccgttgatactatatgtagttttctgaaggaaaattgcttcagaaattcgcccatcaaggtaattaaagtggttaaaggcggaagcagcgcaaaaggcaccgccctgcgggggcggtcggacgctgacttggttgtcttccttagctgtttttctcagtttaccgaacagggaaataagagagccgaaatcatctctgagatccgtgctcaattggaagcctgccagcaagagcgacagttcgaggtgaagtttgaggtatcgaaatgggagaatccgcgcgtcctgtcattcagcctcacatcacagacaatgcttgatcagagtgtagatttcgatgtgctgcccgcgttcgacgccttaggacagctggtgtccggaagccgcccgtcctcccaagtgtatgtcgatctgatccattcttactctaatgcaggggagtacagtacctgctttactgagctgcagagggatttcatcataagccggcctacgaagttgaagtcactgattcggctcgtgaagcattggtaccagcagtgtactaagattagcaagggaagaggaagtctgcctccccagcacggattagagttattgacagtctacgcgtgggaacagggggggaaagactcccagtttaacatggcagaggggttccgaactgtcttagagctggtcactcagtaccggcaactctgtatttactggaccatcaattacaatgccaaagacaaaacagtgggtgattttcttaaacaacaactgcagaaaccccggcccatcatactggaccctgcggatccgacgggaaatctgggtcacaacgctcgttgggatctactcgctaaggaagccgccgcctgtactagtgctttgtgctgtatggggagaaatgggatccctatccagccttggcctgttaaggcagccgtatag

SEQ ID NO: 162616 - DNA, 3261 bp, Artificial Sequence
  derived and/or modified sequence
atggacctgtacagcaccccagctgctgccctggacagatttgtggcccggcggctgcagcccaggaaggagtttgtggagaaggcccggcgggccctgggcgccctggccgccgccctgcgggagcggggcggccgcctgggcgccgccgccccccgggtgctgaagacagtgaagggcggcagcagcggccggggcacagccctgaagggcggctgtgacagcgagctggtgatcttcctggactgcttcaagagctatgtggaccagagggccaggagagctgagatcctgtctgagatgagggccagcctggagagctggtggcagaaccctgtgcccggcctgcggctgaccttccctgagcagagcgtgcctggggccctgcagttccggctgacctctgtggacctggaggactggatggatgtgtccctggtgcctgccttcaacgtgctgggccaggccggcagcggcgtgaagcccaagccccaggtgtacagcaccctgctgaacagcggctgccagggcggggagcacgccgcctgcttcacagagctgcggaggaactttgtgaacatccggcctgccaagctgaagaacctgatcctgctggtgaagcactggtaccaccaggtgtgcctgcagggcctgtggaaggagaccctgccccctgtgtatgccctggagctgctgaccatctttgcctgggagcagggctgcaagaaggatgccttcagcctggccgagggcctgaggacagtgctgggcctcatccagcagcaccagcacctgtgtgtgttctggacagtgaactacggctttgaggaccctgctgtgggccagttcctgcagaggcagctgaagaggcccaggcctgtgatcctggaccctgctgaccccacctgggacctgggcaatggagctgcctggcactgggacctgctggcccaggaggccgccagctgctatgaccacccctgcttcctgcggggcatgggagaccctgtgcagagctggaagggccctggcctgccccgggccggctgcagcggcctgggccaccccatccagctggaccccaaccagaagaccccagagaacagcaagagcctgaatgctgtgtaccccagggctggcagcaagccacccagctgcccagcccctggccccaccggccagcctgccagcagctctgtgcccggcatggccctggacctgagccagatccccaccaaggagctggaccgcttcatccaggaccacctgaagcccagcccccagttccaggagcaggtgaagaaggccatcgacatcatcctgcgctgcctgcacgagaactgtgtgcacaaggccagccgggtgtccaaaggaggcagctttggccggggcacagacctgagagatggctgtgatgtggagctgatcatcttcctgaactgcttcacagactacaaggaccagggccccaggagagctgagatcctggatgagatgagggcccagctggagagctggtggcaggaccaggtgcccagcctgagcctgcagtttcctgagcagaatgtgcctgaggccctgcagttccagctggtgtccacagccctgaagtcctggacagatgtgtccctgctgcctgcctttgatgctgtgggccagctgagcagcggcaccaagcccaacccccaggtgtacagccggctgctgaccagcggctgccaggagggggagcacaaggcctgctttgctgagctgcggaggaacttcatgaacatccggcctgtgaagctgaagaacctgatcctgctggtgaagcactggtaccggcaggtggccgcccagaacaagggcaagggccctgccccagccagcctgcccccagcctatgccctggagctgctgaccatctttgcctgggagcagggctgccggcaggactgcttcaacatggcccagggcttcagaacagtgctgggcctggtgcagcagcaccagcagctgtgtgtgtactggacagtgaactacagcacagaggaccctgccatgaggatgcacctgctgggccagctgaggaagccccggcccctggtgctggaccctgctgaccccacctggaatgtgggccacggctcctgggagctgctggcccaggaggccgccgccctgggcatgcaggcctgcttcctgagcagagatggcacctctgtgcagccctgggatgtgatgcctgccctgctgtaccagaccccagctggggacctggacaagttcatcagcgagttcctgcagcccaaccggcagttcctggcccaggtgaacaaggctgtggacaccatctgcagcttcctgaaggagaactgcttcaggaacagccccatcaaggtgatcaaggtggtgaagggcggcagcagcgccaagggcacagccctgcggggccgcagtgatgctgacctggtggtgttcctgagctgcttcagccagttcacagagcagggcaacaagagagctgagatcatcagcgagatccgggcccagctggaggcctgccagcaggagcggcagtttgaggtgaagtttgaggtgtccaagtgggagaacccccgggtgctgtccttcagcctgaccagccagaccatgctggaccagagcgtggactttgatgtgctgcctgcctttgatgccctgggccagctggtgtctggcagccggcccagcagccaggtgtatgtggacctgatccacagctacagcaatgctggggagtacagcacctgcttcacagagctgcagagggacttcatcatcagccggcccaccaagctgaagagcctcatccggctggtgaagcactggtaccagcagtgcaccaagatcagcaagggccggggcagcctgcccccccagcacggcctggagctgctgactgtgtatgcctgggagcagggcggcaaggacagccagttcaacatggccgagggcttcagaacagtgctggagctggtgacccagtaccggcagctgtgcatctactggaccatcaactacaatgccaaggacaagacagtgggggacttcctgaagcagcagctgcagaagccccggcccatcatcctggaccctgctgaccccaccggcaacctgggccacaatgcccgctgggacctgctggccaaggaggccgccgcctgcaccagcgccctgtgctgcatgggcagaaatggcatccccatccagccctggcctgtgaaggctgctgtgtag

SEQ ID NO: 162617 - DNA, 3261 bp, Artificial Sequence
  derived and/or modified sequence
atggacctgtacagcacccccgccgccgccctggaccggttcgtggccagaagactacagccccgcaaagagtttgttgaaaaggccaggcgggcgctgggcgctctggcagccgctctgcgggaaaggggaggtcgactgggggccgccgctccacgcgtgctcaagaccgtaaagggcggcagttcgggtcgcggcaccgcactgaagggggggtgcgatagcgagctcgtaattttcctggattgcttcaaatcatacgttgatcagagagcaaggcgagctgagatcctttccgagatgcgggcgtctctggaatcatggtggcagaaccctgtgccgggcctcagactgacttttcctgagcagagcgttcctggagctctccagtttagattaacatccgtcgatctggaggattggatggatgtgtcattagtcccagcctttaacgtactcgggcaagctgggtcgggggtgaaaccaaagccacaggtgtattctaccctgttgaactcagggtgccaaggcggcgaacacgctgcgtgctttactgagcttcgtagaaacttcgtgaacattcgccccgcgaagcttaagaacctgatcttactggttaagcattggtatcaccaagtgtgcttacagggcttatggaaggagactttaccccccgtatatgccctggaacttctgaccatcttcgcttgggagcagggatgcaagaaggacgcatttagcttagccgagggcctccgtaccgtgctgggtttgattcagcagcatcagcacctatgtgtgttctggaccgtaaattacggtttcgaagaccctgccgtaggtcagttcctgcaaagacagctgaagcgaccaagaccagttatacttgacccagcagaccctacttgggacctaggcaacggcgctgcatggcactgggacctgttggcccaagaggctgcctcatgctacgatcacccctgttttttacgcgggatgggcgatcccgtgcaatcatggaaggggccggggctcccacgagccgggtgttccggcttgggccatcctatccagctggacccgaatcagaagacacctgaaaactctaaaagtctaaacgccgtctatccacgggcaggttccaaaccacccagttgtcccgcaccaggccctactggccagcctgcttctagttctgtgcctggtatggcactggaccttagccagatccccacgaaggagctggaccgcttcatccaggatcatctcaaaccctctccacagtttcaggagcaggttaagaaagctatcgatataattttaaggtgtcttcatgagaattgcgttcacaaggccagccgagtcagcaaaggtggttcctttggccggggcactgatctgcgggatgggtgtgatgtggagttaataattttcttaaattgctttaccgattataaagaccagggtccacgtcgggcggagattctggatgagatgagagcccaactggagtcctggtggcaggatcaggttcctagcctgtcactgcagttcccagagcaaaacgtgcctgaggcccttcagtttcagttggtgagcactgcgctcaagagttggaccgacgtgagcctgctccctgctttcgacgctgtagggcagctaagcagtggcaccaagccgaaccctcaggtgtacagccgtttgctcacttctggctgccaggagggtgaacacaaggcatgctttgccgagctgcgccggaacttcatgaacatccgtcccgttaaattgaaaaacctgattttgttagtgaagcattggtatcggcaggtggctgctcagaacaaaggtaagggtcccgcccccgcatctcttcctcccgcttatgccctggaattgctgaccatcttcgcttgggaacagggttgccggcaggattgtttcaatatggcccagggatttcggactgtgctggggctggtccaacagcatcagcagctctgtgtgtattggactgtgaattatagcacagaggatccggcgatgcgcatgcacttactgggccagctgagaaaaccccgacctctggtgttagaccccgctgaccctacttggaatgtgggccatgggtcttgggaactcttggcccaggaagccgcagctttagggatgcaggcatgctttctgtcacgcgatggcacgtctgtccagccatgggacgtgatgccagcgctgctctatcagacgcctgctggtgacctggataagtttatctcagaattcctgcaacctaaccggcaatttttagcccaagttaacaaggcggtagacactatctgttcttttctgaaggaaaattgttttcgcaactctccaatcaaggtgatcaaggtggtgaaaggtggaagtagtgccaagggtacggcactgcgcggaaggtccgatgccgacttagtcgttttcctgtcatgcttcagtcaattcactgaacagggcaataagcgcgctgagattatttccgaaattcgcgctcagctcgaagcctgtcaacaggagcgtcagttcgaggtgaaattcgaggtttccaagtgggaaaatcccagggtattatcattcagcttgacgtcccagacaatgctggaccagagcgtcgatttcgatgtattaccggccttcgacgccctggggcaattggttagcgggtcaaggccatcaagccaagtgtatgtcgacctgatccactcctactcaaacgcaggagaatactctacttgctttaccgagctgcagcgggacttcatcatctcacgccctactaagcttaagtccctcattagacttgtaaaacattggtaccagcagtgtacaaagatctctaagggccgcggcagtctccctccgcaacatggcctggagcttctaacagtttatgcctgggagcaggggggaaaggactcacaatttaacatggcagagggcttcagaacagtcttagaattggtgacacagtatcgtcagctgtgtatctactggaccatcaactataacgctaaggacaagaccgtgggggacttcctaaaacaacagctgcaaaaaccccggccaattattctggaccctgccgatcctactgggaatttgggccacaatgccaggtgggatcttctggcaaaagaagccgccgcttgcacctctgctctgtgttgcatggggaggaatggtatcccaatacagccctggcccgttaaggcggcagtttag

SEQ ID NO: 162618 - DNA, 3261 bp, Artificial Sequence
  derived and/or modified sequence
atggatttgtacagtacgcctgcagcagcactcgacaggtttgtggctaggaggctgcagcccagaaaagagttcgtcgagaaagcacgtcgtgccctcggcgctctggccgcagcactgcgtgaacgcggaggcaggttaggcgctgctgcccctcgcgtgctaaaaactgtcaaaggcggatcttccgggagaggtacggcgctcaaggggggatgtgactccgaacttgtaatttttttggattgttttaaaagctacgtagatcagcgcgctcgacgcgcagagatactgtccgagatgcgagccagtctggaatcctggtggcagaatccggtgcctgggctccgccttacatttcccgagcaatctgtccccggtgccctgcagttccgcctgacatccgtggacttggaggattggatggacgtgtccctggtgccggcttttaatgttctgggtcaagctggcagtggtgtaaagccaaagccccaagtatactccactctgcttaattccggatgtcagggcggagaacatgcagcctgcttcactgaactgagacggaattttgtcaatattcgccctgccaagctgaagaatctaatcctattggtgaaacattggtatcaccaggtgtgcctgcagggcctgtggaaggaaacacttcctccggtgtacgccttggagctgcttaccatctttgcctgggagcagggttgcaagaaggacgctttcagcttagccgagggactgcggactgttcttggtctgattcagcagcatcagcatttgtgtgttttctggactgtgaactatggctttgaggaccccgcagtgggccagtttctgcagagacagttaaaacgccctagaccagtgattctggaccccgcagaccctacatgggacctcggcaatggtgccgcttggcattgggacctgctcgcgcaggaggccgcaagctgttacgatcacccatgtttcttgagaggtatgggtgacccggtgcagtcttggaagggacctggcctgccccgtgctggctgttctggccttggtcaccccatacagctggacccaaaccagaagactccagaaaactccaaatctctgaatgccgtgtaccccagagccggtagcaagccaccatcttgcccggcacctgggccaacgggccaacctgcctcgagcagtgttccgggtatggccttagacctgagccagattcccaccaaggagttggatcggttcatacaggatcaccttaagccctctccccaattccaggaacaggtgaagaaggcgatagacatcatcctccggtgtcttcatgaaaattgcgtgcataaagcctcacgggtgtccaaggggggttcctttggccgagggactgacctgcgagacggttgtgacgtggagctcattatatttctgaactgcttcaccgattataaggaccagggtccaagacgagcagaaatcctggacgagatgcgagcccaactcgaatcgtggtggcaggaccaagtgccctctctttccctccagttcccagagcagaacgtgcctgaggccctgcaatttcagctggtgtccactgcccttaaatcatggaccgacgtatctctgctccctgcttttgatgcggtgggacagctgtcaagcggaactaaacccaacccacaggtgtactcccgcctgctgaccagcggttgtcaggagggggagcacaaggcctgtttcgccgaacttagacgaaactttatgaacattaggcccgtgaagctaaaaaatttgatcttactagtcaagcactggtataggcaggtcgcagcccagaataagggaaaaggtccagccccagcgagccttcctccagcctacgccctagagttgctgactatattcgcctgggagcagggctgtcgccaggactgttttaatatggcccagggattccggacagtgttaggcctcgtccagcagcatcagcagttatgtgtgtactggaccgtaaactacagcacggaggatcctgcgatgcgtatgcatttactcggccagctgaggaagcctcgacctcttgtattggatcctgctgaccctacgtggaacgtgggtcacggttcatgggagctgctggctcaagaagccgctgccctcggcatgcaagcctgcttcctgtcacgggacggaactagcgtccagccctgggacgtcatgccagccctgctgtaccagacacctgctggcgatctcgacaagttcatttctgagtttctgcagcctaataggcagttcctggcacaggtgaataaggcggtggacacaatctgcagcttcctgaaagaaaactgttttcgtaattcgcctattaaggtgatcaaggtagttaagggaggcagctccgcaaaaggcactgcgctcagaggacggtcagacgccgatttggttgttttcctgagttgcttttcacagtttacggagcagggtaataagcgcgcagaaattattagcgaaattcgagcccagttagaggcgtgtcagcaggagcgacagtttgaggttaagttcgaagtgtctaagtgggaaaatcctagagtcttatcattcagtctaacctctcagacaatgttggatcaatccgtcgattttgacgtactccccgctttcgacgcgctgggtcagttggtttccggttcaagaccgagctcccaggtttacgtggatttgattcattcctattccaatgcgggagaatactctacttgcttcaccgaacttcagagagattttatcatctcacgaccaacaaagctgaaaagcctgatcaggctggtgaagcactggtaccaacaatgtacaaaaatttctaagggcaggggctcgctacctccacagcatggtctcgagctgcttaccgtttatgcttgggagcaaggaggaaaggactcacagtttaacatggccgaaggcttccggactgttctggagttagttacgcagtatcgacagctctgtatctactggactattaattataacgcaaaagataagaccgtcggggattttctgaagcagcaactgcagaaacctcgtcctatcattctggatcccgctgatccaaccgggaatctgggccataatgcgcgatgggatttgctggctaaggaggctgccgcttgcacatcagctctgtgctgtatgggtcgaaatggaatccccatccagccctggcccgtcaaagccgctgtgtag

SEQ ID NO: 162619 - DNA, 6719 bp, Artificial Sequence
  derived and/or modified sequence
cccaagtttggggaagacaggaactgcagcgcccctccccgtttcacgccacgcgcgggaccgaggacctaggacctggccagctgggcgtggttcggagagccgggcgggaaaacgaaaccagaaatccgaaggccgcgccagagccctgcttccccttgcacctgcgccgggcggccatggacttgtacagcaccccggccgctgcgctggacaggttcgtggccagaaggctgcagccgcggaaggagttcgtagagaaggcgcggcgcgctctgggcgccctggccgctgccctgagggagcgcgggggccgcctcggtgctgctgccccgcgggtgctgaaaactgtcaagggaggctcctcgggccggggcacagctctcaagggtggctgtgattctgaacttgtcatcttcctcgactgcttcaagagctatgtggaccagagggcccgccgtgcagagatcctcagtgagatgcgggcatcgctggaatcctggtggcagaacccagtccctggtctgagactcacgtttcctgagcagagcgtgcctggggccctgcagttccgcctgacatccgtagatcttgaggactggatggatgttagcctggtgcctgccttcaatgtcctgggtcaggccggctccggcgtcaaacccaagccacaagtctactctaccctcctcaacagtggctgccaagggggcgagcatgcggcctgcttcacagagctgcggaggaactttgtgaacattcgcccagccaagttgaagaacctaatcttgctggtgaagcactggtaccaccaggtgtgcctacaggggttgtggaaggagacgctgcccccggtctatgccctggaattgctgaccatcttcgcctgggagcagggctgtaagaaggatgctttcagcctagccgaaggcctccgaactgtcctgggcctgatccaacagcatcagcacctgtgtgttttctggactgtcaactatggcttcgaggaccctgcagttgggcagttcttgcagcggcagcttaagagacccaggcctgtgatcctggacccagctgaccccacatgggacctggggaatggggcagcctggcactgggatttgctagcccaggaggcagcatcctgctatgaccacccatgctttctgagggggatgggggacccagtgcagtcttggaaggggccgggccttccacgtgctggatgctcaggtttgggccaccccatccagctagaccctaaccagaagacccctgaaaacagcaagagcctcaatgctgtgtacccaagagcagggagcaaacctccctcatgcccagctcctggccccactggggcagccagcatcgtcccctctgtgccgggaatggccttggacctgtctcagatccccaccaaggagctggaccgcttcatccaggaccacctgaagccgagcccccagttccaggagcaggtgaaaaaggccattgacatcatcttgcgctgcctccatgagaactgtgttcacaaggcctcaagagtcagtaaagggggctcatttggccggggcacagacctaagggatggctgtgatgttgaactcatcatcttcctcaactgcttcacggactacaaggaccaggggccccgccgcgcagagatccttgatgagatgcgagcgcagctagaatcctggtggcaggaccaggtgcccagcctgagccttcagtttcctgagcagaatgtgcctgaggctctgcagttccagctggtgtccacagccctgaagagctggacggatgttagcctgctgcctgccttcgatgctgtggggcagctcagttctggcaccaaaccaaatccccaggtctactcgaggctcctcaccagtggctgccaggagggcgagcataaggcctgcttcgcagagctgcggaggaacttcatgaacattcgccctgtcaagctgaagaacctgattctgctggtgaagcactggtaccgccaggttgcggctcagaacaaaggaaaaggaccagcccctgcctctctgcccccagcctatgccctggagctcctcaccatctttgcctgggagcagggctgcaggcaggattgtttcaacatggcccaaggcttccggacggtgctggggctcgtgcaacagcatcagcagctctgtgtctactggacggtcaactatagcactgaggacccagccatgagaatgcaccttcttggccagcttcgaaaacccagacccctggtcctggaccccgctgatcccacctggaacgtgggccacggtagctgggagctgttggcccaggaagcagcagcgctggggatgcaggcctgctttctgagtagagacgggacatctgtgcagccctgggatgtgatgccagccctcctttaccaaaccccagctggggaccttgacaagttcatcagtgaatttctccagcccaaccgccagttcctggcccaggtgaacaaggccgttgataccatctgttcatttttgaaggaaaactgcttccggaattctcccatcaaagtgatcaaggtggtcaagggtggctcttcagccaaaggcacagctctgcgaggccgctcagatgccgacctcgtggtgttcctcagctgcttcagccagttcactgagcagggcaacaagcgggccgagatcatctccgagatccgagcccagctggaggcatgtcaacaggagcggcagttcgaggtcaagtttgaagtctccaaatgggagaatccccgcgtgctgagcttctcactgacatcccagacgatgctggaccagagtgtggactttgatgtgctgccagcctttgacgccctaggccagctggtctctggctccaggcccagctctcaagtctacgtcgacctcatccacagctacagcaatgcgggcgagtactccacctgcttcacagagctacaacgggacttcatcatctctcgccctaccaagctgaagagcctgatccggctggtgaagcactggtaccagcagtgtaccaagatctccaaggggagaggctccctacccccacagcacgggctggaactcctgactgtgtatgcctgggagcagggcgggaaggactcccagttcaacatggctgagggcttccgcacggtcctggagctggtcacccagtaccgccagctctgtatctactggaccatcaactacaacgccaaggacaagactgttggagacttcctgaaacagcagcttcagaagcccaggcctatcatcctggatccggctgacccgacaggcaacctgggccacaatgcccgctgggacctgctggccaaggaagctgcagcctgcacatctgccctgtgctgcatgggacggaatggcatccccatccagccatggccagtgaaggctgctgtgtgaagttgagaaaatcagcggtcctactggatgaagagaagatggacaccagccctcagcatgaggaaattcagggtcccctaccagatgagagagattgtgtacatgtgtgtgtgagcacatgtgtgcatgtgtgtgcacacgtgtgcatgtgtgtgttttagtgaatctgctctcccagctcacacactcccctgcctcccatggcttacacactaggatccagactccatggtttgacaccagcctgcgtttgcagcttctctgtcacttccatgactctatcctcataccaccactgctgcttcccacccagctgagaatgccccctcctccctgactcctctctgcccatgcaaattagctcacatctttcctcctgctgcaatccatcccttcctcccattggcctctccttgccaaatctaaatagtttatatagggatggcagagagttcccatctcatctgtcagccacagtcatttggtactggctacctggagccttatcttctgaagggttttaaagaatggccaattagctgagaagaattatctaatcaattagtgatgtctgccatggatgcagtagaggaaagtggtggtacaagtgccatgattgattagcaatgtctgcactggatacggaaaaaagaaggtgcttgcaggtttacagtgtatatgtgggctattgaagagccctctgagctcggttgctagcaggagagcatgcccatattggcttactttgtctgccacagacacagacagagggagttgggacatgcatgctatggggaccctcttgttggacacctaattggatgcctcttcatgagaggcctccttttcttcaccttttatgctgcactcctcccctagtttacacatcttgatgctgtggctcagtttgccttcctgaatttttattgggtccctgttttctctcctaacatgctgagattctgcatccccacagcctaaactgagccagtggccaaacaaccgtgctcagcctgtttctctctgccctctagagcaaggcccaccaggtccatccaggaggctctcctgacctcaagtccaacaacagtgtccacactagtcaaggttcagcccagaaaacagaaagcactctaggaatcttaggcagaaagggattttatctaaatcactggaaaggctggaggagcagaaggcagaggccaccactggactattggtttcaatattagaccactgtagccgaatcagaggccagagagcagccactgctactgctaatgccaccactacccctgccatcactgccccacatggacaaaactggagtcgagacctaggttagattcctgcaaccacaaacatccatcagggatggccagctgccagagctgcgggaagacggatcccacctccctttcttagcagaatctaaattacagccagacctctggctgcagaggagtctgagacatgtatgattgaatgggtgccaagtgccagggggcggagtccccagcagatgcatcctggccatctgttgcgtggatgagggagtgggtctatctcagaggaaggaacaggaaacaaagaaaggaagccactgaacatcccttctctgctccacaggagtgccttagacagcctgactctccacaaaccactgttaaaacttacctgctaggaatgctagattgaatgggatgggaagagccttccctcattattgtcattcttggagagaggtgagcaaccaagggaagctcctctgattcacctagaacctgttctctgccgtctttggctcagcctacagagactagagtaggtgaagggacagaggacagggcttctaatacctgtgccatattgacagcctccatccctgtcccccatcttggtgctgaaccaacgctaagggcaccttcttagactcacctcatcgatactgcctggtaatccaaagctagaactctcaggaccccaaactccacctcttggattggccctggctgctgccacacacatatccaagagctcagggccagttctggtgggcagcagagacctgctctgccaagttgtccagcagcagagtggccctggcctgggcatcacaagccagtgatgctcctgggaagaccaggtggcaggtcgcagttgggtaccttccattcccaccacacagactctgggcctccccgcaaaatggctccagaattagagtaattatgagatggtgggaaccagagcaactcaggtgcatgatacaaggagaggttgtcatctgggtagggcagagaggagggcttgctcatctgaacaggggtgtatttcattccaggccctcagtctttggcaatggccaccctggtgttggcatattggccccactgtaacttttgggggcttcccggtctagccacaccctcggatggaaagacttgactgcataaagatgtcagttctccctgagttgattgataggcttaatggtcaccctaaaaacacccacatatgcttttcgatggaaccaggtaagttgacgctaaagttcttatggaaaaatacacacgcaatagctaggaaaacacagggaaagaagagttctgagcagggcctagtcttagccaatattaaaacatactatgaagcctctgatacttaaacagcatggcgctggtacgtaaatagaccaatgcagttaggtggctctttccaagactctggggaaaaaagtagtaaaaagctaaatgcaatcaatcagcaattgaaagctaagtgagagagccagagggcctccttggtggtaaaagagggttgcatttcttgcagccagaaggcagagaaagtgaagaccaagtccagaactgaatcctaagaaatgcaggactgcaaagaaattggtgtgtgtgtgtgtgtgtgtgtgtgtgtgtgtgtttaatttttaaaaagtttttattgagatacaagtcaataccataaagctctcacccttctaaagtgtacaattcagtggtgtgagtatattcataagatttatacttggtgtctattcataagacttatatccagcatattcataactagagccatatcacagatgcattcatcataataattccagacattttcatcaccctaaaaggaaaccctgaaacccattagcagtcattccccattcctccaacccattctctccctaatccctagaaaccaccaatctgctgtgtatttcatctattgccaacatttcatataaatggcatcatacaa

SEQ ID NO: 162620 - DNA, 6262 bp, Artificial Sequence
  derived and/or modified sequence
gccctgcttccccttgcacctgcgccgggcggccatggacttgtacagcaccccggccgctgcgctggacaggttcgtggccagaaggctgcagccgcggaaggagttcgtagagaaggcgcggcgcgctctgggcgccctggccgctgccctgagggagcgcgggggccgcctcggtgctgctgccccgcgggtgctgaaaactgtcaagggaggctcctcgggccggggcacagctctcaagggtggctgtgattctgaacttgtcatcttcctcgactgcttcaagagctatgtggaccagagggcccgccgtgcagagatcctcagtgagatgcgggcatcgctggaatcctggtggcagaacccagtccctggtctgagactcacgtttcctgagcagagcgtgcctggggccctgcagttccgcctgacatccgtagatcttgaggactggatggatgttagcctggtgcctgccttcaatgtcctgggtcaggccggctccggcgtcaaacccaagccacaagtctactctaccctcctcaacagtggctgccaagggggcgagcatgcggcctgcttcacagagctgcggaggaactttgtgaacattcgcccagccaagttgaagaacctaatcttgctggtgaagcactggtaccaccaggtgtgcctacaggggttgtggaaggagacgctgcccccggtctatgccctggaattgctgaccatcttcgcctgggagcagggctgtaagaaggatgctttcagcctagccgaaggcctccgaactgtcctgggcctgatccaacagcatcagcacctgtgtgttttctggactgtcaactatggcttcgaggaccctgcagttgggcagttcttgcagcggcagcttaagagacccaggcctgtgatcctggacccagctgaccccacatgggacctggggaatggggcagcctggcactgggatttgctagcccaggaggcagcatcctgctatgaccacccatgctttctgagggggatgggggacccagtgcagtcttggaaggggccgggccttccacgtgctggatgctcaggtttgggccaccccatccagctagaccctaaccagaagacccctgaaaacagcaagagcctcaatgctgtgtacccaagagcagggagcaaacctccctcatgcccagctcctggccccactgggcagccagcatcgtcctctgtgccgggaatggccttggacctgtctcagatccccaccaaggagctggaccgcttcatccaggaccacctgaagccgagcccccagttccaggagcaggtgaaaaaggccattgacatcatcttgcgctgcctccatgagaactgtgttcacaaggcctcaagagtcagtaaagggggctcatttggccggggcacagacctaagggatggctgtgatgttgaactcatcatcttcctcaactgcttcacggactacaaggaccaggggccccgccgcgcagagatccttgatgagatgcgagcgcagctagaatcctggtggcaggaccaggtgcccagcctgagccttcagtttcctgagcagaatgtgcctgaggctctgcagttccagctggtgtccacagccctgaagagctggacggatgttagcctgctgcctgccttcgatgctgtggggcagctcagttctggcaccaaaccaaatccccaggtctactcgaggctcctcaccagtggctgccaggagggcgagcataaggcctgcttcgcagagctgcggaggaacttcatgaacattcgccctgtcaagctgaagaacctgattctgctggtgaagcactggtaccgccaggttgcggctcagaacaaaggaaaaggaccagcccctgcctctctgcccccagcctatgccctggagctcctcaccatctttgcctgggagcagggctgcaggcaggattgtttcaacatggcccaaggcttccggacggtgctggggctcgtgcaacagcatcagcagctctgtgtctactggacggtcaactatagcactgaggacccagccatgagaatgcaccttcttggccagcttcgaaaacccagacccctggtcctggaccccgctgatcccacctggaacgtgggccacggtagctgggagctgttggcccaggaagcagcagcgctggggatgcaggcctgctttctgagtagagacgggacatctgtgcagccctgggatgtgatgccagccctcctttaccaaaccccagctggggaccttgacaagttcatcagtgaatttctccagcccaaccgccagttcctggcccaggtgaacaaggccgttgataccatctgttcatttttgaaggaaaactgcttccggaattctcccatcaaagtgatcaaggtggtcaagggtggctcttcagccaaaggcacagctctgcgaggccgctcagatgccgacctcgtggtgttcctcagctgcttcagccagttcactgagcagggcaacaagcgggccgagatcatctccgagatccgagcccagctggaggcatgtcaacaggagcggcagttcgaggtcaagtttgaagtctccaaatgggagaatccccgcgtgctgagcttctcactgacatcccagacgatgctggaccagagtgtggactttgatgtgctgccagcctttgacgccctaggccagctggtctctggctccaggcccagctctcaagtctacgtcgacctcatccacagctacagcaatgcgggcgagtactccacctgcttcacagagctacaacgggacttcatcatctctcgccctaccaagctgaagagcctgatccggctggtgaagcactggtaccagcagtgtaccaagatctccaaggggagaggctccctacccccacagcacgggctggaactcctgactgtgtatgcctgggagcagggcgggaaggactcccagttcaacatggctgagggcttccgcacggtcctggagctggtcacccagtaccgccagctctgtatctactggaccatcaactacaacgccaaggacaagactgttggagacttcctgaaacagcagcttcagaagcccaggcctatcatcctggatccggctgacccgacaggcaacctgggccacaatgcccgctgggacctgctggccaaggaagctgcagcctgcacatctgccctgtgctgcatgggacggaatggcatccccatccagccatggccagtgaaggctgctgtgtgaagttgagaaaatcagcggtcctactggatgaagagaagatggacaccagccctcagcatgaggaaattcagggtcccctaccagatgagagagattgtgtacatgtgtgtgtgagcacatgtgtgcatgtgtgtgcacacgtgtgcatgtgtgtgttttagtgaatctgctctcccagctcacacactcccctgcctcccatggcttacacactaggatccagactccatggtttgacaccagcctgcgtttgcagcttctctgtcacttccatgactctatcctcataccaccactgctgcttcccacccagctgagaatgccccctcctccctgactcctctctgcccatgcaaattagctcacatctttcctcctgctgcaatccatcccttcctcccattggcctctccttgccaaatctaaatagtttatatagggatggcagagagttcccatctcatctgtcagccacagtcatttggtactggctacctggagccttatcttctgaagggttttaaagaatggccaattagctgagaagaattatctaatcaattagtgatgtctgccatggatgcagtagaggaaagtggtggtacaagtgccatgattgattagcaatgtctgcactggatacggaaaaaagaaggtgcttgcaggtttacagtgtatatgtgggctattgaagagccctctgagctcggttgctagcaggagagcatgcccatattggcttactttgtctgccacagacacagacagagggagttgggacatgcatgctatggggaccctcttgttggacacctaattggatgcctcttcatgagaggcctccttttcttcaccttttatgctgcactcctcccctagtttacacatcttgatgctgtggctcagtttgccttcctgaatttttattgggtccctgttttctctcctaacatgctgagattctgcatccccacagcctaaactgagccagtggccaaacaaccgtgctcagcctgtttctctctgccctctagagcaaggcccaccaggtccatccaggaggctctcctgacctcaagtccaacaacagtgtccacactagtcaaggttcagcccagaaaacagaaagcactctaggaatcttaggcagaaagggattttatctaaatcactggaaaggctggaggagcagaaggcagaggccaccactggactattggtttcaatattagaccactgtagccgaatcagaggccagagagcagccactgctactgctaatgccaccactacccctgccatcactgccccacatggacaaaactggagtcgagacctaggttagattcctgcaaccacaaacatccatcagggatggccagctgccagagctgcgggaagacggatcccacctccctttcttagcagaatctaaattacagccagacctctggctgcagaggagtctgagacatgtatgattgaatgggtgccaagtgccagggggcggagtccccagcagatgcatcctggccatctgttgcgtggatgagggagtgggtctatctcagaggaaggaacaggaaacaaagaaaggaagccactgaacatcccttctctgctccacaggagtgccttagacagcctgactctccacaaaccactgttaaaacttacctgctaggaatgctagattgaatgggatgggaagagccttccctcattattgtcattcttggagagaggtgagcaaccaagggaagctcctctgattcacctagaacctgttctctgccgtctttggctcagcctacagagactagagtaggtgaagggacagaggacagggcttctaatacctgtgccatattgacagcctccatccctgtcccccatcttggtgctgaaccaacgctaagggcaccttcttagactcacctcatcgatactgcctggtaatccaaagctagaactctcaggaccccaaactccacctcttggattggccctggctgctgccacacacatatccaagagctcagggccagttctggtgggcagcagagacctgctctgccaagttgtccagcagcagagtggccctggcctgggcatcacaagccagtgatgctcctgggaagaccaggtggcaggtcgcagttgggtaccttccattcccaccacacagactctgggcctccccgcaaaatggctccagaattagagtaattatgagatggtgggaaccagagcaactcaggtgcatgatacaaggagaggttgtcatctgggtagggcagagaggagggcttgctcatctgaacaggggtgtatttcattccaggccctcagtctttggcaatggccaccctggtgttggcatattggccccactgtaacttttgggggcttcccggtctagccacaccctcggatggaaagacttgactgcataaagatgtcagttctccctgagttgattgataggcttaatggtcaccctaaaaacacccacatatgcttttcgatggaaccaggtaagttgacgctaaagttcttatggaaaaatacacacgcaatagctaggaaaacacagggaaagaagagttctgagcagggcctagtcttagccaatattaaaacatactatgaagcctctgatacttaaacagcatggcgctggtacgtaaatagaccaatgcagttaggtggctctttccaagactctggggaaaaaagtagtaaaaagctaaatgcaatcaatcagcaattgaaagctaagtgagagagccagagggcctccttggtggtaaaagagggttgcatttcttgcagccagaaggcagagaaagtgaagaccaagtccagaactgaatcctaagaaatgcaggactgcaaagaaattggtgtgtgtgtgtgtgtgtgtgtgtgtgtgtgtgtttaatttttaaaaagtttttattgaga

SEQ ID NO: 162621 - DNA, 3261 bp, Artificial Sequence
  derived and/or modified sequence
atggacctgtacagcacccccgccgccgccctggacagattcgtggccagaagactgcagcccagaaaggagttcgtggagaaggccagaagagccctgggcgccctggccgccgccctgagagagagaggcggcagactgggcgccgccgcccccagagtgctgaagaccgtgaagggcggcagcagcggcagaggcaccgccctgaagggcggctgcgacagcgagctggtgatcttcctggactgcttcaagagctacgtggaccagagagccagaagagccgagatcctgagcgagatgagagccagcctggagagctggtggcagaaccccgtgcccggcctgagactgaccttccccgagcagagcgtgcccggcgccctgcagttcagactgaccagcgtggacctggaggactggatggacgtgagcctggtgcccgccttcaacgtgctgggccaggccggcagcggcgtgaagcccaagccccaggtgtacagcaccctgctgaacagcggctgccagggcggcgagcacgccgcctgcttcaccgagctgagaagaaacttcgtgaacatcagacccgccaagctgaagaacctgatcctgctggtgaagcactggtaccaccaggtgtgcctgcagggcctgtggaaggagaccctgccccccgtgtacgccctggagctgctgaccatcttcgcctgggagcagggctgcaagaaggacgccttcagcctggccgagggcctgagaaccgtgctgggcctgatccagcagcaccagcacctgtgcgtgttctggaccgtgaactacggcttcgaggaccccgccgtgggccagttcctgcagagacagctgaagagacccagacccgtgatcctggaccccgccgaccccacctgggacctgggcaacggcgccgcctggcactgggacctgctggcccaggaggccgccagctgctacgaccacccctgcttcctgagaggcatgggcgaccccgtgcagagctggaagggccccggcctgcccagagccggctgcagcggcctgggccaccccatccagctggaccccaaccagaagacccccgagaacagcaagagcctgaacgccgtgtaccccagagccggcagcaagccccccagctgccccgcccccggccccaccggccagcccgccagcagcagcgtgcccggcatggccctggacctgagccagatccccaccaaggagctggacagattcatccaggaccacctgaagcccagcccccagttccaggagcaggtgaagaaggccatcgacatcatcctgagatgcctgcacgagaactgcgtgcacaaggccagcagagtgagcaagggcggcagcttcggcagaggcaccgacctgagagacggctgcgacgtggagctgatcatcttcctgaactgcttcaccgactacaaggaccagggccccagaagagccgagatcctggacgagatgagagcccagctggagagctggtggcaggaccaggtgcccagcctgagcctgcagttccccgagcagaacgtgcccgaggccctgcagttccagctggtgagcaccgccctgaagagctggaccgacgtgagcctgctgcccgccttcgacgccgtgggccagctgagcagcggcaccaagcccaacccccaggtgtacagcagactgctgaccagcggctgccaggagggcgagcacaaggcctgcttcgccgagctgagaagaaacttcatgaacatcagacccgtgaagctgaagaacctgatcctgctggtgaagcactggtacagacaggtggccgcccagaacaagggcaagggccccgcccccgccagcctgccccccgcctacgccctggagctgctgaccatcttcgcctgggagcagggctgcagacaggactgcttcaacatggcccagggcttcagaaccgtgctgggcctggtgcagcagcaccagcagctgtgcgtgtactggaccgtgaactacagcaccgaggaccccgccatgagaatgcacctgctgggccagctgagaaagcccagacccctggtgctggaccccgccgaccccacctggaacgtgggccacggcagctgggagctgctggcccaggaggccgccgccctgggcatgcaggcctgcttcctgagcagagacggcaccagcgtgcagccctgggacgtgatgcccgccctgctgtaccagacccccgccggcgacctggacaagttcatcagcgagttcctgcagcccaacagacagttcctggcccaggtgaacaaggccgtggacaccatctgcagcttcctgaaggagaactgcttcagaaacagccccatcaaggtgatcaaggtggtgaagggcggcagcagcgccaagggcaccgccctgagaggcagaagcgacgccgacctggtggtgttcctgagctgcttcagccagttcaccgagcagggcaacaagagagccgagatcatcagcgagatcagagcccagctggaggcctgccagcaggagagacagttcgaggtgaagttcgaggtgagcaagtgggagaaccccagagtgctgagcttcagcctgaccagccagaccatgctggaccagagcgtggacttcgacgtgctgcccgccttcgacgccctgggccagctggtgagcggcagcagacccagcagccaggtgtacgtggacctgatccacagctacagcaacgccggcgagtacagcacctgcttcaccgagctgcagagagacttcatcatcagcagacccaccaagctgaagagcctgatcagactggtgaagcactggtaccagcagtgcaccaagatcagcaagggcagaggcagcctgcccccccagcacggcctggagctgctgaccgtgtacgcctgggagcagggcggcaaggacagccagttcaacatggccgagggcttcagaaccgtgctggagctggtgacccagtacagacagctgtgcatctactggaccatcaactacaacgccaaggacaagaccgtgggcgacttcctgaagcagcagctgcagaagcccagacccatcatcctggaccccgccgaccccaccggcaacctgggccacaacgccagatgggacctgctggccaaggaggccgccgcctgcaccagcgccctgtgctgcatgggcagaaacggcatccccatccagccctggcccgtgaaggccgccgtgtag

SEQ ID NO: 162622 - protein, 109 aa, Artificial Sequence
  derived and/or modified sequence
MSITDVLSADDIAAALQECQDPDTFEPQKFFQTSGLSKMSASQVKDVFRFIDNDQSGYLDEEELKFFLQKFESGARELTESETKSLMAAADNDGDGKIGAEEFQEMVHS

SEQ ID NO: 162623 - DNA, 330 bp, Artificial Sequence
  derived and/or modified sequence
atgagcatcaccgacgtgctgagcgccgacgacatcgccgccgccctgcaggagtgccaggaccccgacaccttcgagccccagaagttcttccagaccagcggcctgagcaagatgagcgccagccaggtgaaggacgtgttcagattcatcgacaacgaccagagcggctacctggacgaggaggagctgaagttcttcctgcagaagttcgagagcggcgccagagagctgaccgagagcgagaccaagagcctgatggccgccgccgacaacgacggcgacggcaagatcggcgccgaggagttccaggagatggtgcacagctag

SEQ ID NO: 162624 - DNA, 330 bp, Artificial Sequence
  derived and/or modified sequence
atgagcattaccgacgtcctctcagccgatgacatcgccgcagccctccaggaatgtcaggaccctgacacgtttgaacctcagaagttttttcagactagcgggctgtccaagatgtcagcctcccaagtgaaagacgtgttcagattcatagacaatgaccaaagcggctatttggatgaggaggagcttaagtttttcctgcaaaaatttgaaagtggggcccgcgagttaaccgagtctgagacgaaaagcctgatggccgctgctgataacgatggggacggaaaaattggcgcagaagagttccaggagatggtgcatagctag

SEQ ID NO: 162625 - DNA, 330 bp, Artificial Sequence
  derived and/or modified sequence
atgagcatcacagatgtgctgtctgcagatgacattgctgctgccctgcaggagtgccaggaccctgacacctttgagccccagaagttcttccagaccagcggcctgagcaagatgtctgccagccaggtgaaggatgtgttccgcttcatcgacaatgaccagagcggctacctggatgaggaggagctgaagttcttcctgcagaagtttgaaagtggggcccgggagctgacagaaagtgagaccaagagcctgatggctgctgctgacaatgatggagatggcaagatcggggctgaggagttccaggagatggtgcacagctag

SEQ ID NO: 162626 - DNA, 330 bp, Artificial Sequence
  derived and/or modified sequence
atgagcatcaccgacgtgctgagcgccgacgacatcgccgccgccttacaggagtgccaggacccggatacgttcgagcctcaaaagttttttcagacctcgggcctcagtaaaatgtctgccagccaggttaaggatgtgttcaggtttatcgataacgatcaatcagggtacctggatgaggaagaattaaaattcttcctccaaaagtttgagtcgggagcccgagagctgaccgaatccgaaaccaaatctctcatggctgcggctgataatgatggcgacggcaaaatcggcgctgaggaattccaggagatggtacacagctag

SEQ ID NO: 162627 - DNA, 696 bp, Artificial Sequence
  derived and/or modified sequence
cagtgggcctgggaagatgtgtttcccctggatgtgcacgttcctgtttgtggcttatcgcctctcgtttattctgtgtgagtaggtagaaaatgagcatcacggacgtgctcagtgctgatgacattgcagcagcgctccaggaatgccaagacccagacacttttgaaccccaaaaattcttccagacgtcaggcctctccaagatgtcagccagtcaggtgaaggatgttttccggttcatagacaacgaccagagcgggtatctggatgaagaagagcttaagtttttcctccagaagtttgagagtggtgccagagaactgaccgagtcagaaaccaagtccttgatggctgcggcggataatgatggagatgggaaaattggagcagaggaattccaggaaatggtgcattcttaaaagccccagtctctggagaaaagagagaaagggataatcacctggaaggattccaaagccctgggaatggggaaccccacatcccatccctacctaatttgttaattttccctgaaaaccttctgcagtttgctcattgttttagcgaggtcacgagagagtcactcatgactttcttggtggtgggtatatgccctgacaacttctgtaagccccccttcccccaacaggcaatgcctctaaaaatcacccaataaagacaggcttctcaaca

SEQ ID NO: 162628 - DNA, 330 bp, Artificial Sequence
  derived and/or modified sequence
atgagtatcacagacgtgttatcagctgatgatatcgccgcagccctccaggaatgccaggacccggacacctttgaaccccagaaattctttcagacatctgggttgtcgaaaatgtccgcgtcgcaggtaaaggacgtgttcaggtttatcgataacgatcagagcggttacttagatgaggaagaactgaaattttttctacagaaatttgagagcggcgcaagagaattaacagagtccgaaacaaagagcctaatggctgctgccgacaacgatggagacgggaagatcggggctgaagaattccaggagatggtgcacagttag

SEQ ID NO: 162629 - protein, 163 aa, Artificial Sequence
  derived and/or modified sequence
MAEDRPQQPQLDMPLVLDQGLTRQMRLRVESLKQRGEKRQDGEKLLQPAESVYRLNFTQQQRLQFERWNVVLDKPGKVTITGTSQNWTPDLTNLMTRQLLDPTAIFWRKEDSDAIDWNEADALEFGERLSDLAKIRKVMYFLVTFGEGVEPANLKASVVFNQL

SEQ ID NO: 162630 - DNA, 95 bp, Artificial Sequence
  derived and/or modified sequence
tatcgaatggaatggaaaggagtggagtagactcgaatagaatggactggaatgaaatagattcgaatggaatggaatggaatgaagtggactcg

SEQ ID NO: 162631 - DNA, 492 bp, Artificial Sequence
  derived and/or modified sequence
atggccgaagatcggccacagcaaccgcagctagacatgccattggtgcttgatcagggcctcactcgccagatgcggctgcgcgtggaatcactgaagcagcgaggtgagaaacggcaagatggggagaagcttctgcaaccagccgagagtgtgtatcggctaaactttacccagcagcaaagattgcagtttgaacggtggaatgtggtcctggacaagcccggtaaggtgactataaccggaacgagccagaactggactcccgacttgaccaacttaatgacgagacagctcctggaccccacggctatattctggcgcaaggaggattccgacgctatagactggaacgaggctgacgctcttgaatttggggagaggctctcggatttagctaagattcggaaagttatgtattttcttgtcacttttggagaaggagttgaaccggccaaccttaaagcatctgttgttttcaaccagctgtag

SEQ ID NO: 162632 - DNA, 492 bp, Artificial Sequence
  derived and/or modified sequence
atggctgaagatcggccccagcagccccagctggacatgcccctggtgctggaccagggcctgacccggcagatgaggctgcgggtggagagcctgaagcagagaggagagaagaggcaggatggagagaagctgctgcagcctgctgagagcgtgtaccgcctgaacttcacccagcagcagaggctgcagtttgagcgctggaatgtggtgctggacaagccaggcaaggtgaccatcaccggcaccagccagaactggaccccagacctgaccaacctgatgacccggcagctgctggaccccacagccatcttctggaggaaggaggacagtgatgccatcgactggaatgaagcagatgccctggagtttggagagcggctgagtgacctggccaagatcaggaaggtgatgtacttcctggtgacctttggagagggcgtggagcccgccaacctgaaggcctctgtggtgttcaaccagctgtag

SEQ ID NO: 162633 - DNA, 492 bp, Artificial Sequence
  derived and/or modified sequence
atggccgaggaccggccccagcagccccagctggacatgcccctggtgctggatcagggcctgacaagacaaatgagattgagagttgaaagcttgaagcagcggggtgaaaaacggcaggacggggagaaattgctacagcccgcagagtcagtgtaccgcttgaatttcactcagcagcagcgactgcagttcgagaggtggaatgtggtgctggataagcccggaaaggtgaccattactgggacttcccaaaactggacccccgatctgacaaacctgatgacaaggcagctgcttgatcccactgccatcttctggagaaaggaagacagcgatgccatcgactggaatgaagcggatgctctggaatttggggaaaggctgtcagatctcgctaagattagaaaagtgatgtacttcctggtgactttcggtgaaggggtggaaccagctaacctgaaagctagcgtagtgttcaatcagctatag

SEQ ID NO: 162634 - DNA, 492 bp, Artificial Sequence
  derived and/or modified sequence
atggcggaggacaggccgcagcagccgcagctggacatgccgctggtcctggaccagggcctgaccaggcagatgcggctacgcgtggagagcctgaagcagcgcggggagaagcgccaggatggggagaagctgctgcagccagcggagtctgtgtaccgcctcaacttcacccagcagcagcggctacagttcgagcgctggaatgtcgtgctggacaagccgggcaaggtcaccatcacaggcacctcgcagaactggacgcctgacctcaccaacctcatgacacgccagctgctggaccccactgccatcttctggcgcaaggaggactcggatgccatagattggaatgaggccgacgccctggagtttggggagcgcctgtcggacctggccaagatccgcaaggtcatgtacttcctcgtcacctttggcgagggtgtggagcccgccaacctcaaggcctccgtggtttttaaccagctctga

SEQ ID NO: 162635 - DNA, 492 bp, Artificial Sequence
  derived and/or modified sequence
atggcggaggatcggccacagcaaccccagctggacatgccgttggtgttggaccagggcctcacacgtcagatgaggttgcgggtggagagccttaagcagcgcggagagaagaggcaggacggcgaaaagcttttacagcctgctgagagcgtataccgactgaatttcacacaacaacagagactacagtttgaaaggtggaacgtggtccttgataagccagggaaagtgaccatcactggtacatcacagaattggactccggatctgaccaacttgatgacacgacagctgctggaccctactgcaatattctggcgaaaagaggatagcgacgccattgattggaatgaagcggacgcgctcgagttcggggaaaggctgagtgacctggcaaaaatcaggaaagttatgtactttctggtgacattcggagagggcgtggagcctgccaatcttaaggcatccgtggtgttcaaccagctctag

SEQ ID NO: 162636 - DNA, 492 bp, Artificial Sequence
  derived and/or modified sequence
atggccgaggacagaccccagcagccccagctggacatgcccctggtgctggaccagggcctgaccagacagatgagactgagagtggagagcctgaagcagagaggcgagaagagacaggacggcgagaagctgctgcagcccgccgagagcgtgtacagactgaacttcacccagcagcagagactgcagttcgagagatggaacgtggtgctggacaagcccggcaaggtgaccatcaccggcaccagccagaactggacccccgacctgaccaacctgatgaccagacagctgctggaccccaccgccatcttctggagaaaggaggacagcgacgccatcgactggaacgaggccgacgccctggagttcggcgagagactgagcgacctggccaagatcagaaaggtgatgtacttcctggtgaccttcggcgagggcgtggagcccgccaacctgaaggccagcgtggtgttcaaccagctgtag

SEQ ID NO: 162637 - protein, 577 aa, Artificial Sequence
  derived and/or modified sequence
MSKPELKEDKMLEVHFVGDDDVLNHILDREGGAKLKKERAQLLVNPKKIIKKPEYDLEEDDQEVLKDQNYVEIMGRDVQESLKNGSATGGGNKVYSFQNRKHSEKMAKLASELAKTPQKSVSFSLKNDPEITINVPQSSKGHSASDKVQPKNNDKSEFLSTAPRSLRKRLIVPRSHSDSESEYSASNSEDDEGVAQEHEEDTNAVIFSQKIQAQNRVVSAPVGKETPSKRMKRDKTSDLVEEYFEAHSSSKVLTSDRTLQKLKRAKLDQQTLRNLLSKVSPSFSAELKQLNQQYEKLFHKWMLQLHLGFNIVLYGLGSKRDLLERFRTTMLQDSIHVVINGFFPGISVKSVLNSITEEVLDHMGTFRSILDQLDWIVNKFKEDSSLELFLLIHNLDSQMLRGEKSQQIIGQLSSLHNIYLIASIDHLNAPLMWDHAKQSLFNWLWYETTTYSPYTEETSYENSLLVKQSGSLPLSSLTHVLRSLTPNARGIFRLLIKYQLDNQDNPSYIGLSFQDFYQQCREAFLVNSDLTLRAQLTEFRDHKLIRTKKGTDGVEYLLIPVDNGTLTDFLEKEEEEA

SEQ ID NO: 162638 - protein, 109 aa, Artificial Sequence
  derived and/or modified sequence
MSKPELKEDKMLEVHFVGDDDVLNHILDREGGAKLKKERAQLLVNPKKIIKKPEYDLEEDDQEVLKDQNYVEIMGRDVQESLKNGSATGGGNKVYSFQNRKHSEKMAKL

SEQ ID NO: 162639 - DNA, 1734 bp, Artificial Sequence
  derived and/or modified sequence
atgtccaagcccgaactgaaggaggacaagatgctcgaggtgcatttcgtgggagacgacgatgttctgaatcacatcctcgacagggagggcggggctaagctgaagaaggaaagagcacagctgctggtcaatccaaagaaaataattaaaaaacccgaatacgatctggaggaggatgaccaagaggtgctgaaagaccagaactacgtggaaattatgggacgggatgtccaggagagtctgaagaatgggagtgccacagggggaggaaataaagtgtattcctttcagaaccgcaaacatagcgagaaaatggccaaattagcctcggaactcgcaaaaacaccacaaaagtcagtctcgttcagtctgaaaaatgaccccgaaattaccattaacgttccgcagagtagcaaaggacacagtgcaagtgacaaggtacagcctaagaataacgataaaagcgagtttctaagtacagcgccccgaagcctgcgaaaacgtctgatcgtgccaagaagccactctgactcggaatcggaatattcagctagcaattcagaagacgacgaaggggttgcccaggagcacgaagaagacaccaatgccgtgatatttagtcagaagatccaagcccaaaaccgggtggtgtctgcccctgtcggaaaggagacaccatcaaagagaatgaagcgagataaaacgtccgacttagtagaagaatacttcgaagctcacagttcctccaaagtgctgacaagcgatcgtaccctccaaaaattgaaacgtgcgaaacttgatcagcagacactgcggaatttattgtcaaaagtgagtccctctttctcagccgaactgaaacagctcaaccaacaatacgagaaactctttcacaagtggatgctccagctgcatttgggatttaatatagtgctatacggtctgggcagcaagcgcgatctgctcgaacgatttcgaactactatgcttcaggattctattcatgtcgtgatcaacgggttctttccgggaatcagcgtgaaatccgtgcttaacagcattactgaggaggtcttagatcacatgggaacgttccgttcaatcctcgatcagctcgattggatcgtcaataaattcaaggaggatagctcgcttgagctcttcctactcatccacaatttagatagtcagatgctccgtggggaaaaatctcagcagatcattgggcaactgtctagtttgcacaatatctatctaattgcctcaatcgaccatttaaacgctcccctaatgtgggaccacgcaaagcagagcttgttcaactggctatggtatgagactactacttactccccctacaccgaggaaacttcttacgagaacagtctacttgtcaagcagagcggatccctgcctctctcctctttgacccatgtgctgaggtctttaacccctaatgctcggggaatattccgcctgctgatcaaataccaattagataaccaggacaatccatcttatatagggctttcttttcaggacttttatcaacagtgtcgcgaggcattcctcgtaaattccgacctgacattaagggcacagcttactgagtttcgagaccataaactcattcggacaaaaaaaggtactgatggggttgaatacctcctgatccccgtagataacggcaccctgaccgattttctcgaaaaagaggaagaagaagcgtag

SEQ ID NO: 162640 - DNA, 330 bp, Artificial Sequence
  derived and/or modified sequence
atgagcaagcccgaacttaaggaggacaaaatgctcgaagttcatttcgtcggcgatgatgacgttcttaaccatattctggatcgggaggggggcgcgaagctgaaaaaggaacgggctcagctgctggttaacccaaaaaaaatcataaaaaagcctgagtacgacctggaggaggacgaccaggaagtgctaaaggatcagaactatgtggaaataatggggagagacgtgcaagaatcactcaaaaacggatctgcgacgggcggaggcaataaggtgtactccttccaaaaccggaagcacagcgaaaagatggccaaactgtag

SEQ ID NO: 162641 - DNA, 219 bp, Artificial Sequence
  derived and/or modified sequence
atgagtaaacctgagcttaaggaagacaagatgcttgaggtacacttcgttggcgatgacgatgtattaaaccatatcctcgatagggagggcggcgctaaattgaagaaggagcgagcacagcttctggtgaatcccaagaaaatcattaagaagccagagtatgatctggaggaagacgatcaggaggttctgaaagatcagaactatgttgagtag

SEQ ID NO: 162642 - DNA, 1734 bp, Artificial Sequence
  derived and/or modified sequence
atgagcaagccagagctgaaggaggacaagatgctggaggtgcactttgtgggagatgatgatgtgctgaaccacatcctggaccgggagggcggggccaagctgaagaaggagcgggcccagctgctggtgaaccccaagaagatcatcaagaagccagaatatgacctggaggaggatgaccaggaggtgctgaaggaccagaactacgtggagatcatgggcagagatgtgcaggagagcctgaagaatggcagcgccaccggcggcggcaacaaggtgtacagcttccagaacaggaagcacagcgagaagatggccaagctggccagcgagctggccaagaccccccagaagtctgtgtccttcagcctgaagaatgaccctgagatcaccatcaacgtgccccagagcagcaagggccacagcgccagtgacaaggtgcagcccaagaacaatgacaagtctgagttcctgagcacagcccccaggagcctgaggaagaggctgattgtgcccaggagccacagcgacagcgagagcgagtacagcgccagcaacagtgaagatgatgaaggagtggcccaggagcacgaggaggacaccaatgctgtgatcttcagccagaagatccaggcccagaacagagtggtgtctgcccctgtgggcaaggagacccccagcaagaggatgaagagggacaagaccagtgacctggtggaggagtactttgaggcccacagcagcagcaaggtgctgaccagtgacaggaccctgcagaagctgaagagggccaagctggaccagcagaccctgaggaacctgctgagcaaggtgagccccagcttctctgctgagctgaagcagctgaaccagcagtatgagaagctgttccacaagtggatgctgcagctgcacctgggcttcaacatcgtgctgtatggcctgggcagcaagagggacctgctggagcgcttccgcaccaccatgctgcaggacagcatccacgtggtgatcaatggcttcttccctggcatctctgtgaagtctgtgctgaacagcatcacagaggaggtgctggaccacatgggcaccttccgcagcatcctggaccagctggactggatcgtgaacaagttcaaggaggacagcagcctggagctgttcctgctgatccacaacctggacagccagatgctgcggggggagaagagccagcagatcatcggccagctgagcagcctgcacaacatctacctgattgccagcattgaccacctgaatgcccccctgatgtgggaccacgccaagcagagcctcttcaactggctgtggtatgagaccaccacctacagcccctacacagaggagaccagctatgagaacagcctgctggtgaagcagagcggcagcctgcccctgagcagcctgacccacgtgctgcggagcctgaccccaaatgcccggggcatcttccggctgctgatcaagtaccagctggacaaccaggacaaccccagctacatcggcctgtccttccaggacttctaccagcagtgccgggaggccttcctggtgaacagcgacctgaccctgcgggcccagctgacagagttccgggaccacaagctgatccgcaccaagaagggcacagatggagtggagtacctgctgatccctgtggacaatggcaccctgacagacttcctggagaaggaggaggaggaggcctag

SEQ ID NO: 162643 - DNA, 330 bp, Artificial Sequence
  derived and/or modified sequence
atgagcaagccagagctgaaggaggacaagatgctggaggtgcactttgtgggagatgatgatgtgctgaaccacatcctggaccgggagggcggggccaagctgaagaaggagcgggcccagctgctggtgaaccccaagaagatcatcaagaagccagaatatgacctggaggaggatgaccaggaggtgctgaaggaccagaactacgtggagatcatgggcagagatgtgcaggagagcctgaagaatggcagcgccaccggcggcggcaacaaggtgtacagcttccagaacaggaagcacagcgagaagatggccaagctgtag

SEQ ID NO: 162644 - DNA, 219 bp, Artificial Sequence
  derived and/or modified sequence
atgagcaagccagagctgaaggaggacaagatgctggaggtgcactttgtgggagatgatgatgtgctgaaccacatcctggaccgggagggcggggccaagctgaagaaggagcgggcccagctgctggtgaaccccaagaagatcatcaagaagccagaatatgacctggaggaggatgaccaggaggtgctgaaggaccagaactacgtggagtag

SEQ ID NO: 162645 - DNA, 1734 bp, Artificial Sequence
  derived and/or modified sequence
atgagcaagcccgagctgaaggaggacaagatgctggaggtgcacttcgtgggggacgacgatgtcctaaatcacatcctcgacagagaggggggagccaaacttaagaaggagcgtgctcagctgctggtgaaccccaagaagatcattaaaaaacctgagtacgaccttgaagaagatgaccaagaggttttgaaggatcagaactatgtggaaattatggggcgcgatgttcaagaatcactgaagaacggtagcgccaccggcggtggcaataaggtgtatagcttccagaatcggaaacacagcgaaaagatggccaaactggcttctgaactggccaaaaccccacaaaagagcgtgtcatttagcttgaaaaacgaccctgagatcaccattaatgtcccacagagtagcaaagggcacagtgcctccgacaaggttcaaccgaagaataatgacaagtccgagttcctctctactgctcctcggtcattgcgtaagaggttgattgtgccccgaagccacagtgacagcgaaagcgagtacagcgcctccaacagcgaggacgatgagggtgttgcccaggaacatgaggaggataccaacgccgtaatcttctcacagaaaatccaggcacagaatagagtcgtaagcgccccagtagggaaggagactccatccaaaaggatgaagagagacaagacatccgatctggtggaggaatacttcgaagcccactcctccagtaaggttttgaccagtgacagaaccttgcagaagttaaagcgcgctaagttagatcaacaaaccttacggaatttactgtccaaagtttcgccatctttttcagctgagttaaagcagctaaatcaacaatacgaaaaactttttcataagtggatgctccaacttcatctgggattcaacatagtgttgtacgggcttggctcaaaaagagacctactcgaaagattccggaccactatgctacaggatagcatacacgtggtgatcaatgggttcttcccaggcataagtgtcaagtcagtgctgaacagcatcaccgaagaagtccttgatcatatgggcacttttcgcagcattctggatcaactggactggatcgtgaataaattcaaggaagatagctccttggagctgttcctgctgattcacaaccttgacagtcagatgttaagaggagagaagtcccagcaaataatagggcagttgtccagtttacataatatatatttaatcgcatcaattgaccatctaaacgcccccctcatgtgggatcatgcaaagcagtccctattcaactggttatggtacgaaacaaccacgtattccccatacaccgaggaaacatcttatgagaattccctgctggtgaagcagagtggcagtttgccactgtcttcgttaacccacgtcctccgatcgctgacgccgaatgcccggggcatcttccggttgctgatcaaataccagttggataaccaggacaatccttcgtatattgggttgagcttccaggatttctaccagcagtgtcgcgaagcgtttcttgttaattcagacctgacattacgggcgcaactcaccgagttcagagatcataagctgattaggaccaaaaaagggacggacggtgtagagtatctgctcattcctgtggataacgggaccctaacagactttctcgagaaagaggaagaggaagcctag

SEQ ID NO: 162646 - DNA, 330 bp, Artificial Sequence
  derived and/or modified sequence
atgagcaagcccgagctgaaggaggacaagatgctggaggtgcacttcgttggagacgacgatgtcctgaatcacattctcgacagggagggcggcgccaagttgaagaaggaaagagctcagttactcgttaatcctaagaaaatcattaagaaaccagagtacgatcttgaggaagacgaccaggaagtcctgaaggaccaaaattacgtggaaatcatgggtcgagacgtccaggaatcactcaaaaatggctcagcaacgggtggtggcaacaaagtatactcttttcagaacaggaaacatagtgaaaagatggctaaactctag

SEQ ID NO: 162647 - DNA, 219 bp, Artificial Sequence
  derived and/or modified sequence
atgagcaagcccgagctgaaggaggacaagatgctggaggtgcacttcgtgggtgacgacgatgtactgaatcatattctggacagagagggcggcgcaaaactaaagaaggagcgtgctcaactgctggtgaatccaaagaaaatcatcaaaaaacctgaatacgatctggaggaggacgaccaggaagtgttgaaagatcagaattatgtcgagtag

SEQ ID NO: 162648 - DNA, 4312 bp, Artificial Sequence
  derived and/or modified sequence
gtgccgcacgcaggcttcccatcccccagctggcctccggtgctccttacctccccggtggtcgggcgcgaattactggaaattggcttttcccgttggggccgaaggtaccttccctgcggcggcgactcagcggggtgtcgttcggccggcgtgacgcagccggatcggcgccagacggaaacctagcggtgactgtatctgaattttgcagctgcagaatgtgtagtaccttaaaaggttggcaacaatgagtaaaccagaattaaaggaagacaagatgctggaggttcactttgtgggagatgatgatgttcttaatcacattctagatagagaaggaggagctaaattgaagaaggagcgagcgcagcttttggtcaaccccaaaaaaataataaagaagccagaatatgatttggaggaagatgaccaggaggtcttaaaagatcagaactatgtggaaattatgggaagagatgttcaagaatcattgaaaaatggctctgctacaggtggtggaaataaagtttattcttttcagaatagaaaacactctgaaaagatggctaaattagcttcagaactagcaaaaacaccacaaaaaagtgtttcattcagtttgaagaatgatcctgagattacgataaacgttcctcaaagtagcaagggccattctgcttcagacaaggttcaaccgaagaacaatgacaaaagtgaatttctgtcaacagcacctcgtagtctaagaaaaagattaatagttccaaggtctcattctgacagtgaaagcgaatattctgcttccaactcagaggatgatgaaggggttgcacaggaacatgaagaggacactaatgcagtcatattcagccaaaagattcaagctcagaatagagtagtttcagctcctgttggcaaagaaacaccttctaagagaatgaaaagagataaaacaagtgacttagtagaagaatattttgaagctcacagcagttcaaaagttttaacctctgatagaacactgcagaagctaaagagagctaaactggatcagcaaactttgcgtaacttattgagcaaggtttccccttccttttctgccgaacttaaacaactaaatcaacagtatgaaaaattatttcataaatggatgctgcaattacaccttgggttcaacattgtgctttatggtttgggttctaagagagatttactagaaaggtttcgaaccactatgctgcaagattccattcacgttgtcatcaatggcttctttcctggaatcagtgtgaaatcagtcctgaattctataacagaagaagtcctcgatcatatgggtactttccgcagtatactggatcagctagactggatagtaaacaaatttaaagaagattcttctttagaactcttccttctcatccacaatttggatagccagatgttgagaggagagaagagccagcaaatcattggtcagttgtcatctttgcataacatttaccttatagcatccattgaccacctcaatgctcctctcatgtgggatcatgcaaagcagagtctttttaactggctctggtatgaaactactacatacagtccttatactgaagaaacctcctatgagaactctcttctggtaaagcagtctggatccctgccacttagctcccttactcatgtcttacgaagccttacccctaatgcaaggggaattttcaggctactaataaaataccagctggacaaccaggataacccttcttacattggcctttcttttcaagatttttaccagcagtgtcgggaggcattcctcgtcaatagtgatctgacactccgggcccagttaactgaatttagggaccacaagcttataagaacaaagaagggaactgatggagtagagtatttattaattcctgttgataatggaacattgactgatttcttggaaaaggaagaagaggaggcttgaagctttcctttattcttgaatctcccatggaagggttgtaccccagctgccactcctctagttgaaagtgttgtgtttacatctgacattaaattatttttccagcatacaagatttaaatttgggaagggggggatgtcctcaattagaactttttgatcagcctggctggtaccgtctagtactatgcagcggtcctcaagttggagaaaatgtgcctttcattcattacctctctggagacttcttgctggaatgaacagtgtgctcagggactatttggaactggatgtttttgaattattttatacttagagatattctgaattttttgagggccttttaacactccccgagctgattgtttgcaagtgtgtttgttccagagtgtggaagtataaagacatgggcatcacgtaaattggttttgtttgctattctgtgtgtcagaaccaacgagtgtaatggagagggcaggtcatctcttattgtttctaaaacaacttaaaaggtgtagattgggaagaggtgagtgatccagctttctccttttggattgaggctatgtacttggtgggggcaggggagggaatatattataatactattcagttgggataatgggaaaaacagagtatatagggtatctacccagcctagaaagcacaggaacaatacgtcatatatttggaacagttattgtctgtgccatgaccttcatgataccagtgagaagccaggctagagaaataaaatcctgaattacattttagtaattgttttcaagacaacaaaaaataaaacatttcattattcttgtatattgacatatttttcttttcttgaacaacatgcaggtgagtagcatattaatggctggctgtaaattaattttgattcctctgtcaagtagacctaaaactcactgtaagatatttcagttttttccttaaagtgatgatttcaaacctcctgaatatttgcgcgagacttttttcttaggaaagaaaaaaggctcaccttggctactgttgtcagcttacagtcatcacataccccctgaaatatttgacacttggaaatgaagttcttcctgaaaatatcactgcaataaaatacgtactacgtcagcatttctcactcatttcttatcttgtaaacctctttcatgaaaatatttccaaaaatccttggaatttttaaataatttttcttgtggcatataattaagtaattttggccaggcataatggcttatgcctgtaatcacaacactttgggaggccaaggcaggaggatctctggagcccaggagtttaagaacagcctgggcaacatagtgagaccttgtctctacaaaaaatttaaaaaatcatccgggcatggtggcccatgcctatagtcctagctgctgtggaggctgaggcaggaggatcgcttgagcccaggggttcaagattacagtgagctatgattgtgccactgcacttcagtctgggtgcagagcaagaccttgtctttttttttttttaaatcatttttttaaaaagtaattttatgttaagtccatgggcttagtctttttttttttttttttttttttagatggaattgcactgtcatccagtctagagtgcagtggcgtgatctaagcttacagcagcctccacctcctgggttcaagtgattcttgtgcctcagcctcctgagctgggactacaggcacacgccaccacgcctggctagtttttgaatttttagcagagatggggtttcaccatgttggccaggctggtctcgaattcctgacctcaagtgatcctgcctcggcctcccaaagtactgggatcaggggtgagccactatgcctggccaagggcttagtcttaaatataacctctagtcaaaatgtttaaacaaatttgtacataaatgtgatttaaaaaaatttttttaatagtaccaaaggatattcagtgaaagtgagtttcctgcccactccctgatccacccagttctttaggcaaccactgatagcattttcttaagtattcttccagatatcgtctatgcatatgtaaaagtatctgtctttctccttttaaaaacacaattggtaatatatcatacttgctggtttgcaccttgctttttttgcttaatatatctagtttataatgacctaatgtgcaaatttttgcatctgccctaaatatctactggtttatttttataatttttgtgtctatactatttgcaagcagtatgtgtcagtagactttattattaataaataaaaagccaatttggatagaatcactttataaa

SEQ ID NO: 162649 - DNA, 546 bp, Artificial Sequence
  derived and/or modified sequence
aagtcgcgcatctcaggactttccctcggcacttggggcatggtctttgcgcctcgctgccccccgcaggctgcccgggggctcgagaacccttactggtggagcgcagccaactggccagaggctggaggcgcaggccaaagtcctttaagacttgaggtgactgtatctgaattttgcagctgcagaatgtgtagtaccttaaaaggttggcaacaatgagtaaaccagaattaaaggaagacaagatgctggaggttcactttgtgggagatgatgatgttcttaatcacattctagatagagaaggaggagctaaattgaagaaggagcgagcgcagcttttggtcaaccccaaaaaaataataaagaagccagaatatgatttggaggaagatgaccaggaggtcttaaaagatcagaactatgtggaaattatgggaagagatgttcaagaatcattgaaaaatggctctgctacaggtggtggaaataaagtttattcttttcagaatagaaaacactctgaaaagatggctaaattag

SEQ ID NO: 162650 - DNA, 486 bp, Artificial Sequence
  derived and/or modified sequence
agaggctggaggcgcaggccaaagtcctttaagacttgaggtgagaggctcactctgggaggacctttcgttagtctgccccgcagttataggccttttgtgcaagggacgcctgatactaacctacctgattcccagcttacgaagccctctggttggaaaaggagaactgtgaagatgtgtaacgacagtggtaaagtgccctgtgaggtgactgtatctgaattttgcagctgcagaatgtgtagtaccttaaaaggttggcaacaatgagtaaaccagaattaaaggaagacaagatgctggaggttcactttgtgggagatgatgatgttcttaatcacattctagatagagaaggaggagctaaattgaagaaggagcgagcgcagcttttggtcaaccccaaaaaaataataaagaagccagaatatgatttggaggaagatgaccaggaggtcttaaaagatcagaactatgtggaaa

SEQ ID NO: 162651 - DNA, 1734 bp, Artificial Sequence
  derived and/or modified sequence
atgagtaaacctgagctgaaagaagataaaatgctcgaagtacatttcgtaggtgatgatgacgtgctcaatcacatactcgaccgcgaagggggagcaaaactcaagaaagagagagctcaactgctcgtcaaccccaagaagatcattaagaagcccgagtatgatctagaggaggacgatcaggaagttttgaaggatcagaattacgttgaaatcatgggtcgggacgtccaggagagtctgaagaacggctcggcaacaggaggcggaaataaagtgtactcatttcaaaacaggaagcatagcgagaagatggccaagctcgccagcgagctggcaaagaccccgcagaaatcagtgtcgtttagcttgaagaatgatccagagatcaccatcaacgtgccacagtcgtccaagggacacagcgcttcagataaagtccagccaaaaaacaacgataaatccgagtttctttccaccgctccaagatccctgaggaagcgacttatcgtgcctcgaagtcactccgactccgaatcagagtactcagccagtaattcagaggatgacgaaggggtcgcgcaggaacacgaagaggacaccaacgcagtgatcttttctcagaaaattcaagctcagaatcgggtggtctctgcccctgtgggcaaggaaactccatcaaagagaatgaagagggacaaaactagcgacctggtcgaggaatacttcgaagcacattcatcatcaaaggtgctgaccagtgatcggacattgcaaaagctcaagcgagcgaagttggatcagcaaactctgcgcaatctgctgtccaaggtgagcccttcattttctgccgaacttaaacagctgaatcaacagtatgaaaagctgtttcataaatggatgttgcagctccacctggggttcaacattgtgctatacggtctcggaagcaaaagggacctgctagaacggttcagaaccaccatgttacaagactctatccacgtcgtaattaacggattctttccaggcatttcagtaaagagtgtcctgaacagtatcaccgaagaggtcctagaccatatgggtaccttccggagcatactggaccagctggactggatcgtgaacaagtttaaggaagactcgtcacttgaattgttcttgttaatccataacttagactcacagatgctaagaggagagaagagccagcaaatcattgggcagctatcttctcttcacaatatttacctgatcgcctcaatagaccacttaaatgcacctcttatgtgggaccacgcaaagcagtcactcttcaattggctgtggtacgaaactaccacatacagcccctacactgaggagacttcctacgaaaattctctcctcgtgaaacaaagcggatctttgcccctgtcttctctgacccatgtgttgaggtccctcacacccaatgctagaggtattttcaggttgctgattaagtaccagttggacaaccaggataacccctcttatatcggcttgtccttccaggacttctaccaacagtgcagggaggcctttctggtgaattcagacctgaccttaagagcccagctgacagagtttagagatcacaagctcattaggacaaagaaagggacggatggagtggaatatctattgatccccgtagataacgggactctaactgactttctggaaaaggaagaagaggaagcatag

SEQ ID NO: 162652 - DNA, 330 bp, Artificial Sequence
  derived and/or modified sequence
atgtctaaaccagagctgaaagaggacaaaatgttagaggtgcacttcgtcggcgatgacgacgtccttaatcatattttagacagggaaggcggagccaaactgaaaaaggaacgtgcccagctattggtgaaccccaaaaagatcatcaagaagccagaatacgacttggaagaggacgaccaggaagttctgaaagatcaaaactacgtggagatcatggggagagacgtgcaggagtctctgaaaaacgggtctgctacagggggaggcaacaaagtttattctttccaaaacagaaagcattctgagaagatggccaagctctag

SEQ ID NO: 162653 - DNA, 219 bp, Artificial Sequence
  derived and/or modified sequence
atgtccaagcctgagttgaaggaggataaaatgctggaggtgcattttgtgggcgacgacgacgtcctgaatcatattctcgaccgagaaggtggtgccaaattgaagaaagagagagcacagttgctcgtaaatccaaaaaaaattataaagaaacctgagtacgatctggaagaagacgatcaggaggttttaaaagatcagaattatgtcgaatag

SEQ ID NO: 162654 - DNA, 1734 bp, Artificial Sequence
  derived and/or modified sequence
atgagcaagcccgagctgaaggaggacaagatgctggaggtgcacttcgtgggcgacgacgacgtgctgaaccacatcctggacagagagggcggcgccaagctgaagaaggagagagcccagctgctggtgaaccccaagaagatcatcaagaagcccgagtacgacctggaggaggacgaccaggaggtgctgaaggaccagaactacgtggagatcatgggcagagacgtgcaggagagcctgaagaacggcagcgccaccggcggcggcaacaaggtgtacagcttccagaacagaaagcacagcgagaagatggccaagctggccagcgagctggccaagaccccccagaagagcgtgagcttcagcctgaagaacgaccccgagatcaccatcaacgtgccccagagcagcaagggccacagcgccagcgacaaggtgcagcccaagaacaacgacaagagcgagttcctgagcaccgcccccagaagcctgagaaagagactgatcgtgcccagaagccacagcgacagcgagagcgagtacagcgccagcaacagcgaggacgacgagggcgtggcccaggagcacgaggaggacaccaacgccgtgatcttcagccagaagatccaggcccagaacagagtggtgagcgcccccgtgggcaaggagacccccagcaagagaatgaagagagacaagaccagcgacctggtggaggagtacttcgaggcccacagcagcagcaaggtgctgaccagcgacagaaccctgcagaagctgaagagagccaagctggaccagcagaccctgagaaacctgctgagcaaggtgagccccagcttcagcgccgagctgaagcagctgaaccagcagtacgagaagctgttccacaagtggatgctgcagctgcacctgggcttcaacatcgtgctgtacggcctgggcagcaagagagacctgctggagagattcagaaccaccatgctgcaggacagcatccacgtggtgatcaacggcttcttccccggcatcagcgtgaagagcgtgctgaacagcatcaccgaggaggtgctggaccacatgggcaccttcagaagcatcctggaccagctggactggatcgtgaacaagttcaaggaggacagcagcctggagctgttcctgctgatccacaacctggacagccagatgctgagaggcgagaagagccagcagatcatcggccagctgagcagcctgcacaacatctacctgatcgccagcatcgaccacctgaacgcccccctgatgtgggaccacgccaagcagagcctgttcaactggctgtggtacgagaccaccacctacagcccctacaccgaggagaccagctacgagaacagcctgctggtgaagcagagcggcagcctgcccctgagcagcctgacccacgtgctgagaagcctgacccccaacgccagaggcatcttcagactgctgatcaagtaccagctggacaaccaggacaaccccagctacatcggcctgagcttccaggacttctaccagcagtgcagagaggccttcctggtgaacagcgacctgaccctgagagcccagctgaccgagttcagagaccacaagctgatcagaaccaagaagggcaccgacggcgtggagtacctgctgatccccgtggacaacggcaccctgaccgacttcctggagaaggaggaggaggaggcctag

SEQ ID NO: 162655 - DNA, 330 bp, Artificial Sequence
  derived and/or modified sequence
atgagcaagcccgagctgaaggaggacaagatgctggaggtgcacttcgtgggcgacgacgacgtgctgaaccacatcctggacagagagggcggcgccaagctgaagaaggagagagcccagctgctggtgaaccccaagaagatcatcaagaagcccgagtacgacctggaggaggacgaccaggaggtgctgaaggaccagaactacgtggagatcatgggcagagacgtgcaggagagcctgaagaacggcagcgccaccggcggcggcaacaaggtgtacagcttccagaacagaaagcacagcgagaagatggccaagctgtag

SEQ ID NO: 162656 - DNA, 219 bp, Artificial Sequence
  derived and/or modified sequence
atgagcaagcccgagctgaaggaggacaagatgctggaggtgcacttcgtgggcgacgacgacgtgctgaaccacatcctggacagagagggcggcgccaagctgaagaaggagagagcccagctgctggtgaaccccaagaagatcatcaagaagcccgagtacgacctggaggaggacgaccaggaggtgctgaaggaccagaactacgtggagtag

SEQ ID NO: 162657 - protein, 394 aa, Artificial Sequence
  derived and/or modified sequence
MSGEDEQQEQTIAEDLVVTKYKMGGDIANRVLRSLVEASSSGVSVLSLCEKGDAMIMEETGKIFKKEKEMKKGIAFPTSISVNNCVCHFSPLKSDQDYILKEGDLVKIDLGVHVDGFIANVAHTFVVDVAQGTQVTGRKADVIKAAHLCAEAALRLVKPGNQNTQVTEAWNKVAHSFNCTPIEGMLSHQLKQHVIDGEKTIIQNPTDQQKKDHEKAEFEVHEVYAVDVLVSSGEGKAKDAGQRTTIYKRDPSKQYGLKMKTSRAFFSEVERRFDAMPFTLRAFEDEKKARMGVVECAKHELLQPFNVLYEKEGEFVAQFKFTVLLMPNGPMRITSGPFEPDLYKSEMEVQDAELKALLQSSASRKTQKKKKKKASKTAENATSGETLEENEAGD

SEQ ID NO: 162658 - protein, 405 aa, Artificial Sequence
  derived and/or modified sequence
ACPAPQPARSQLLALACLPAPLLARAFARPLLEDRGDSDHSPEDLVVTKYKMGGDIANRVLRSLVEASSSGVSVLSLCEKGDAMIMEETGKIFKKEKEMKKGIAFPTSISVNNCVCHFSPLKSDQDYILKEGDLVKIDLGVHVDGFIANVAHTFVVDVAQGTQVTGRKADVIKAAHLCAEAALRLVKPGNQNTQVTEAWNKVAHSFNCTPIEGMLSHQLKQHVIDGEKTIIQNPTDQQKKDHEKAEFEVHEVYAVDVLVSSGEGKAKDAGQRTTIYKRDPSKQYGLKMKTSRAFFSEVERRFDAMPFTLRAFEDEKKARMGVVECAKHELLQPFNVLYEKEGEFVAQFKFTVLLMPNGPMRITSGPFEPDLYKSEMEVQDAELKALLQSSASRKTQKKKKKKKKK

SEQ ID NO: 162659 - DNA, 1185 bp, Artificial Sequence
  derived and/or modified sequence
atgtccggagaggatgaacagcaggagcaaactattgctgaggatctagtcgtgactaaatataagatggggggcgatatcgctaacagggttttgcggagcctggtggaggcctcatcaagcggagttagcgtgctgagtctttgtgaaaagggggacgctatgattatggaggaaactggaaagatttttaaaaaagaaaaggagatgaagaagggtatcgcttttcccaccagcatttcagtcaataactgtgtttgccatttctcacccctgaaatctgatcaggattatatcttgaaagaaggagacttagtcaaaattgatctcggcgtccatgtggacgggttcatagccaatgtggcgcatactttcgtggtggacgtcgctcaaggtacacaggtgaccgggcggaaagccgatgtgattaaagccgcccacttgtgtgccgaggccgcactgcgcctggtgaaaccgggtaaccagaatactcaagtgactgaggcatggaataaggtggcacactccttcaactgtacaccaattgaagggatgttgagccatcaactgaaacagcacgtcatcgatggagagaaaactattattcagaaccccaccgaccaacagaaaaaggaccacgaaaaggctgagttcgaagtgcacgaggtgtacgccgtcgatgtcctggtgagttcaggcgaaggaaaagctaaagacgctggccaacggaccacaatctacaaaagagacccctcaaaacaatacggtctcaaaatgaaaacaagtcgagctttcttctcagaagtagagaggagattcgacgccatgccatttacgttaagggcctttgaagacgaaaagaaggcaaggatgggagtcgtagagtgcgcgaagcacgagctgctgcagccgtttaatgtgttatacgaaaaagaaggggaatttgtcgcacagtttaagttcactgtcctgctcatgcctaatggacctatgcgaataaccagcggaccattcgaaccggatttgtataaaagtgagatggaagttcaggacgctgagctcaaggctctgttacaatcaagcgcatcacgtaagacacagaaaaagaagaaaaaaaaagcttctaagacagccgaaaacgccacttccggcgagactctggaagagaacgaagcaggcgactag

SEQ ID NO: 162660 - DNA, 1218 bp, Artificial Sequence
  derived and/or modified sequence
gcatgccctgcaccacaacccgctagatcgcaactgctggctttagcctgtctgcccgctcccctgctggccagagctttcgccagacctctgctcgaggaccggggcgactccgatcacagccccgaagacctggtggtgactaagtacaaaatgggaggcgatatagctaatcgcgtgctccggtccttggtagaagccagcagttccggggtcagtgtgctgagtctttgtgagaagggggacgctatgatcatggaagagacaggaaaaatttttaaaaaagaaaaggagatgaaaaaaggcatcgcttttcccacatcaataagcgtgaacaactgcgtatgccacttttcccctctcaagagcgaccaggattatatactgaaagagggggacttggttaagatcgaccttggagttcacgtcgacggcttcatcgctaacgtggcccatacattcgttgtggatgttgcccaaggaacacaggtcacaggacgcaaggcagatgtgattaaggctgctcatttgtgcgccgaagcagctctccgtctcgtgaagccaggtaatcaaaacacccaggttacggaggcttggaataaagtagctcacagtttcaactgcactcctattgagggaatgctgtctcaccaactcaagcagcacgtcatcgacggtgagaagaccataatccaaaaccctaccgaccagcaaaagaaggatcatgagaaagccgaattcgaggttcacgaagtgtacgcagtggacgtgcttgttagtagtggtgaaggcaaagccaaagatgctggacagcgcactactatatataagcgcgacccttcgaagcagtatggtctcaaaatgaagacgtcccgcgctttcttctccgaagtggaacgcagatttgacgcaatgccgttcaccctcagggcatttgaggatgaaaagaaagctaggatgggggtggtggaatgtgctaagcatgaactgctgcagccgtttaatgtattgtatgagaaggaaggagagttcgtggcccaatttaagtttaccgttctgctgatgcctaacggacccatgagaattacctctgggcccttcgagccagacctgtacaagtccgagatggaagtgcaggatgctgagttgaaggcccttttgcagtcaagcgccagtagaaagacccaaaagaaaaagaagaagaagaagaaaaagtag

SEQ ID NO: 162661 - DNA, 1185 bp, Artificial Sequence
  derived and/or modified sequence
atgtctggagaagatgagcagcaggagcagaccatcgccgaggacctggtggtgaccaagtacaagatgggcggggacatcgccaacagagtgctgcggagcctggtggaggccagcagcagtggagtgtctgtgctgagcctgtgtgagaagggagatgccatgatcatggaggagaccgggaagatcttcaagaaggagaaggagatgaagaagggcatcgccttccccaccagcatctctgtgaacaactgtgtgtgccacttcagccccctgaagagtgaccaggactacatcctgaaggagggggacctggtgaagattgacctgggcgtgcacgtggatggcttcatcgccaacgtggcccacacctttgtggtggatgtggcccagggcacccaggtgacaggcaggaaggcagatgtgatcaaggccgcccacctgtgtgccgaggccgccctgcggctggtgaagccaggcaaccagaacacccaggtgacagaggcctggaacaaggtggcccacagcttcaactgcacccccatcgagggcatgctgagccaccagctgaagcagcacgtgattgatggagagaagaccatcatccagaaccccacagaccagcagaagaaggaccacgagaaggccgagtttgaggtgcatgaggtgtatgctgtggatgtgctggtgagcagcggggagggcaaggccaaggatgctggccagaggaccaccatctacaagagggaccccagcaagcagtatggcctgaagatgaagaccagccgggccttcttcagcgaggtggagaggagatttgatgccatgcccttcaccctgcgggcctttgaagatgagaagaaggccaggatgggcgtggtggagtgtgccaagcatgagctgctgcagcccttcaacgtgctgtatgagaaggagggggagtttgtggcccagttcaagttcaccgtgctgctgatgcccaacggccccatgaggatcaccagcggcccctttgagccagacctgtacaagtctgagatggaggtgcaggatgctgagctgaaggccctgctgcagagcagcgccagcaggaagacccagaagaagaagaagaagaaggccagcaagacagcagaaaatgccaccagcggggagaccctggaggagaatgaggccggggactag

SEQ ID NO: 162662 - DNA, 1218 bp, Artificial Sequence
  derived and/or modified sequence
gcctgcccagccccccagcctgcccggagccagctgctggccctggcctgcctgcctgcccccctgctggcccgggcctttgcccggcccctgctggaggacagaggagacagcgaccacagccctgaggacctggtggtgaccaagtacaagatgggcggggacatcgccaacagagtgctgcggagcctggtggaggccagcagcagcggcgtgtctgtgctgagcctgtgtgagaagggagatgccatgatcatggaggagaccgggaagatcttcaagaaggagaaggagatgaagaagggcatcgccttccccaccagcatctctgtgaacaactgtgtgtgccacttcagccccctgaagagtgaccaggactacatcctgaaggagggggacctggtgaagattgacctgggcgtgcacgtggatggcttcatcgccaacgtggcccacacctttgtggtggatgtggcccagggcacccaggtgactggaaggaaggcagatgtgatcaaggccgcccacctgtgtgccgaggccgccctgcggctggtgaagccaggcaaccagaacacccaggtgacagaggcctggaacaaggtggcccacagcttcaactgcacccccatcgagggcatgctgagccaccagctgaagcagcacgtgattgatggagagaagaccatcatccagaaccccacagaccagcagaagaaggaccacgagaaggccgagtttgaggtgcatgaggtgtatgctgtggatgtgctggtgtcctctggagagggcaaggccaaggatgctggccagaggaccaccatctacaagagggaccccagcaagcagtatggcctgaagatgaagaccagccgggccttcttcagcgaggtggagaggagatttgatgccatgcccttcaccctgcgggcctttgaagatgagaagaaggccaggatgggcgtggtggagtgtgccaagcatgagctgctgcagcccttcaacgtgctgtatgagaaggagggggagtttgtggcccagttcaagttcaccgtgctgctgatgcccaacggccccatgaggatcaccagcggcccctttgagccagacctgtacaagtctgagatggaggtgcaggatgctgagctgaaggccctgctgcagagcagcgccagcaggaagacccagaagaagaagaagaagaagaagaagaagtag

SEQ ID NO: 162663 - DNA, 1185 bp, Artificial Sequence
  derived and/or modified sequence
atgagcggcgaggacgagcagcaggagcagaccatcgccgaggacctcgtcgttactaagtacaagatggggggagatattgccaatagagtgttgaggagcttagttgaagccagttcctctggtgtatccgtgctttccctgtgtgaaaagggagacgccatgattatggaggagaccgggaagattttcaaaaaagagaaggagatgaaaaagggaattgcatttccgacttctatctcagtcaataattgcgtctgccacttttcaccgctcaaatcagaccaggattatatccttaaagagggcgatttagtcaagatcgacctcggggtccacgtggacggatttatcgctaacgtggcccacacattcgttgtggatgtagctcaggggacacaggtgacaggacgtaaagccgacgtgatcaaggcggcacacttgtgcgctgaagctgctttgaggttagtgaagcccggaaatcagaacacacaggtaactgaggcatggaacaaggtggcccattcctttaattgtacccccatcgaaggtatgctgagccatcagctcaaacagcacgttatcgatggggagaaaacaatcatccagaaccccacagatcagcagaagaaagaccatgagaaagcggagtttgaggtgcatgaggtctacgccgtggatgtgttggtgtcaagtggtgagggcaaagccaaggatgctggccagcgcacaaccatttacaagcgggatccctctaagcaatacgggctcaagatgaaaacatctcgtgcatttttttcggaagtagagaggaggttcgatgcgatgccctttacactcagagcatttgaagacgagaagaaggctcggatgggggtggtggagtgtgcaaaacatgagttactgcagccgtttaacgttctctacgagaaggaaggcgaattcgtggctcaattcaagttcacagtcttgctcatgccaaatgggcccatgcggattacctccggtcctttcgagccggacctgtataagtctgagatggaggtgcaagacgccgaactcaaagcccttctgcagtcttcagcttcccgcaagacacagaaaaagaaaaagaagaaggcgagcaaaacagccgagaacgctacctccggggagacactagaagagaacgaagccggcgattag

SEQ ID NO: 162664 - DNA, 1218 bp, Artificial Sequence
  derived and/or modified sequence
gcctgccccgccccccagcccgcccggagccagctgctggccctggcctgtcttccagcaccactgctagctcgcgcctttgcccggcccctgctcgaagatagaggcgatagcgaccacagtcctgaagatctagtggtcactaaatacaaaatgggaggcgatattgcgaaccgggtgctgaggagcttggtcgaggcttcctcttcgggagttagcgtgctgtctctgtgtgaaaagggtgacgcaatgatcatggaggaaactggaaagatcttcaaaaaagagaaagaaatgaaaaaaggaattgcctttcccacaagtatcagcgtgaataactgcgtttgtcacttctccccactgaagtcagaccaggactacatcctgaaagagggagatttggtgaaaattgacctcggtgtgcatgtagacggattcatagcgaacgtggcccacactttcgtggtggacgtcgctcaagggacacaggtgacaggaaggaaggcggatgtgattaaggcggcgcatctgtgcgcagaggccgccctgcggctggtcaaacctggtaatcagaacactcaggttacagaggcatggaataaagtggcccatagttttaattgtactccaatcgaggggatgctttcccatcagcttaagcagcatgtaatcgatggcgagaagaccatcatccagaaccccacagaccagcagaaaaaagaccacgagaaagctgagttcgaagtccatgaagtatacgccgtagacgtgctcgtctccagcggtgaggggaaggccaaggacgccggtcagcgcactactatttacaagagggacccctcaaagcagtacggactgaaaatgaaaacgtcccgggcttttttcagcgaggttgaacggagatttgatgccatgcctttcacactaagagccttcgaggatgagaagaaagctagaatgggggtggtggagtgtgcaaaacatgagcttctacagccttttaatgtgctttacgaaaaggaaggcgagttcgtggcccagttcaagttcactgtgctcctcatgcctaacgggcccatgagaatcacaagtggaccatttgagcctgacctttacaaaagcgagatggaggtgcaggatgctgaattgaaagcgctgctacagagcagcgccagccgaaagacccaaaagaagaagaagaaaaaaaagaaaaaatag

SEQ ID NO: 162665 - DNA, 1185 bp, Artificial Sequence
  derived and/or modified sequence
atgtctggcgaagatgaacagcaggaacagaccattgccgaagacctcgtggtcaccaaatataaaatgggcggtgatatcgccaaccgggttctaagaagtctagttgaggcctctagttccggcgtctcagttctgagtctttgcgaaaaaggcgatgcgatgataatggaagagacgggaaaaattttcaagaaagaaaaagaaatgaagaagggcatcgctttcccaacctcaatttctgtgaataactgcgtgtgtcatttttctcctctgaaaagtgatcaggattacatactcaaagagggcgacttggtgaagatcgatctgggagtacatgtcgacggattcattgcgaacgtggcccatactttcgtcgttgacgtcgcacagggaacccaggtgacagggagaaaggccgatgtcataaaggctgcccatctgtgcgccgaggccgcacttcggctggtgaagcccggtaaccagaacacccaggtgacggaagcttggaacaaagtcgctcacagtttcaactgcactccaatcgaggggatgctgtcccaccagcttaaacagcatgtgatcgacggggaaaaaaccattattcaaaaccctaccgaccagcagaagaaggatcacgagaaagctgagttcgaggtacacgaggtctatgccgttgacgtcctggtgtcttcaggtgaaggcaaggcaaaggacgcaggccagcggaccaccatctataaaagagacccatctaaacaatatggacttaaaatgaaaaccagtagagccttcttctcagaggtcgagcgcaggttcgacgctatgccatttacgctgcgcgcttttgaggatgaaaagaaagctcgcatgggggttgttgagtgtgctaagcacgagctcctgcagcccttcaacgtgctctatgaaaaggaaggtgagttcgtggcccagtttaaatttaccgtcctgctgatgccaaacggccctatgcgcattaccagtggccctttcgagccagacctttataagtccgagatggaggttcaggatgcggagctgaaggcactccttcagtcttccgcctcaaggaagacgcaaaaaaagaagaagaagaaggcatccaaaaccgcagaaaacgccaccagtggggagactctcgaagagaacgaagccggtgattag

SEQ ID NO: 162666 - DNA, 1218 bp, Artificial Sequence
  derived and/or modified sequence
gcatgtcctgcgcctcagcccgctcgctcccagctgctagccctggcgtgtctgccagcgccattgctagcccgagccttcgcccgacctctgctggaagaccggggagactcagaccacagtccagaggatctagtggtcacaaaatacaaaatgggcggtgatattgccaatcgagttctccggagtcttgtagaagcttctagcagcggagtcagtgtcttatcgctatgtgagaaaggggacgcaatgatcatggaagaaacagggaaaatattcaagaaggagaaggagatgaagaaaggaatcgcattccctacatccatatctgttaacaactgtgtgtgtcatttcagtcccctgaaaagtgaccaggattacatcctgaaggagggggacctcgttaagatcgatctgggcgttcatgtagacggattcatcgccaatgtcgcccatacattcgtcgtggacgttgcacaaggaactcaagtgacgggcaggaaggcagatgttataaaggccgctcacctgtgcgccgaggccgcactccggctagtaaaaccgggaaatcagaacacccaggtaacggaagcctggaataaagttgcgcactccttcaactgcaccccaatcgagggaatgctttcccaccagcttaagcagcacgtgatcgacggcgaaaagaccattatccagaaccccactgatcaacagaagaaggaccatgaaaaagccgagttcgaagtccatgaagtctacgctgttgatgttttggtgtcctctggggaggggaaagccaaggatgcgggtcaaagaactaccatctataaaagagatccctctaagcagtacggtctgaaaatgaaaacaagtagggccttcttttccgaagttgaacgacggttcgacgctatgcctttcacgttacgcgctttcgaggacgagaaaaaggccagaatgggagtagtggagtgcgctaagcacgagctcctgcagcccttcaacgttctttatgagaaggagggcgagttcgttgcccagtttaaattcacagtccttttgatgcccaacgggccaatgagaatcacaagtgggccttttgaacccgacctgtataagtcggaaatggaggtccaagatgccgaactgaaagccctgctgcagagcagtgcctcgcggaagacacaaaaaaagaagaagaagaaaaagaaaaagtag

SEQ ID NO: 162667 - DNA, 2577 bp, Artificial Sequence
  derived and/or modified sequence
gtttttccgggagagaccacgcttcccctcaagctccccaacggctccgccttcccgccggagcctgacccttcccagagtgcccggcgattccggcgtgcgaggcccttggagggcaaggccccagggcctggcttaggagcgcgagaggcaggctgggaattgtagttcgaaggccctcgagagcggctagagtctggcggccgagaggactagttgtcccagcgtgccctgcgcctcagcccgcgcgctcgcagcttctcgctctcgcctgcctgcccgctcccttgcttgctcgcgctttcgctcgccctctcctcgaggatcgaggggactctgaccacagcctgtggctgggaagggagacagaggcggcggcggctcaggggaaacgaggctgcagtggtggtagtaggaagatgtcgggcgaggacgagcaacaggagcaaactatcgctgaggacctggtcgtgaccaagtataagatggggggcgacatcgccaacagggtacttcggtccttggtggaagcatctagctcaggtgtgtcggtactgagcctgtgtgagaaaggtgatgccatgattatggaagaaacagggaaaatcttcaagaaagaaaaggaaatgaagaaaggtattgcttttcccaccagcatttcggtaaataactgtgtatgtcacttctcccctttgaagagcgaccaggattatattctcaaggaaggtgacttggtaaaaattgaccttggggtccatgtggatggcttcatcgctaatgtagctcacacttttgtggttgatgtagctcaggggacccaagtaacagggaggaaagcagatgttattaaggcagctcacctttgtgctgaagctgccctacgcctggtcaaacctggaaatcagaacacacaagtgacagaagcctggaacaaagttgcccactcatttaactgcacgccaatagaaggtatgctgtcacaccagttgaagcagcatgtcatcgatggagaaaaaaccattatccagaatcccacagaccagcagaagaaggaccatgaaaaagctgaatttgaggtacatgaagtatatgctgtggatgttctcgtcagctcaggagagggcaaggccaaggatgcaggacagagaaccactatttacaaacgagacccctctaaacagtatggactgaaaatgaaaacttcacgtgccttcttcagtgaggtggaaaggcgttttgatgccatgccgtttactttaagagcatttgaagatgagaagaaggctcggatgggtgtggtggagtgcgccaaacatgaactgctgcaaccatttaatgttctctatgagaaggagggtgaatttgttgcccagtttaaatttacagttctgctcatgcccaatggccccatgcggataaccagtggtcccttcgagcctgacctctacaagtctgagatggaggtccaggatgcagagctaaaggccctcctccagagttctgcaagtcgaaaaacccagaaaaagaaaaaaaagaaggcctccaagactgcagagaatgccaccagtggggaaacattagaagaaaatgaagctggggactgaggtgggtcccatctccccagcttgctgctcctgcctcatccccttcccaccaaaccccagactctgtgaagtgcagttcttctccacctaggaccgccagcagagcggggggatctccctgcccccaccccagttccccaacccactcccttccaacaacaaccagctccaactgactctggtcttgggaggtgaggcttcccaaccacggaagactactttaaatgaaaaaaagaaattgaataataaaatcaggagtcaaaattcatcgtcttcaagcccctctttctagccttttctactactctctgcttggtcaaggtttgtgccccactacagaacagggctaaattagccaccaccactgaaaactcagccgaatttttttataccactctgatgtcagcattttttccatctgtttggggctttttcctcttttttccattctccccaaatattttatctggcttcaaaattaagaggattatttttcagattgtttttattcagtgtggccgattcctcatctgattcaggctgtccagtcaggcccctcccattttaggagctggagccttcatttatgaagagattctcatctatgaaatggatcctcatttgtaaatcttttttcttccattttcacaaagctgtaaagaaataatccatctcaaccttaccctttttctctggagtcagtggggtctttcctcgctccatcttacacagacctgagctggaagctcaactggttttgttccctgtttgaaatattgtgatctccctcccatgaaagaaaaaccaagaaccagaggcgtagactgactgaagacacaactcctggctttctgaagctatggacttggattggattgctgggggtttgtagagaaaggtgacaaatttcagtacctctggcatgctgtcccaggaaactagggctcccactaacttatgaggtttttaaaca

SEQ ID NO: 162668 - DNA, 1215 bp, Artificial Sequence
  derived and/or modified sequence
gcgtgccctgcgcctcagcccgcgcgctcgcagcttctcgctctcgcctgcctgcccgctcccttgcttgctcgcgctttcgctcgccctctcctcgaggatcgaggggactctgaccacagccctgaggacctggtcgtgaccaagtataagatggggggcgacatcgccaacagggtacttcggtccttggtggaagcatctagctcaggtgtgtcggtactgagcctgtgtgagaaaggtgatgccatgattatggaagaaacagggaaaatcttcaagaaagaaaaggaaatgaagaaaggtattgcttttcccaccagcatttcggtaaataactgtgtatgtcacttctcccctttgaagagcgaccaggattatattctcaaggaaggtgacttggtaaaaattgaccttggggtccatgtggatggcttcatcgctaatgtagctcacacttttgtggttgatgtagctcaggggacccaagtaacagggaggaaagcagatgttattaaggcagctcacctttgtgctgaagctgccctacgcctggtcaaacctggaaatcagaacacacaagtgacagaagcctggaacaaagttgcccactcatttaactgcacgccaatagaaggtatgctgtcacaccagttgaagcagcatgtcatcgatggagaaaaaaccattatccagaatcccacagaccagcagaagaaggaccatgaaaaagctgaatttgaggtacatgaagtatatgctgtggatgttctcgtcagctcaggagagggcaaggccaaggatgcaggacagagaaccactatttacaaacgagacccctctaaacagtatggactgaaaatgaaaacttcacgtgccttcttcagtgaggtggaaaggcgttttgatgccatgccgtttactttaagagcatttgaagatgagaagaaggctcggatgggtgtggtggagtgcgccaaacatgaactgctgcaaccatttaatgttctctatgagaaggagggtgaatttgttgcccagtttaaatttacagttctgctcatgcccaatggccccatgcggataaccagtggtcccttcgagcctgacctctacaagtctgagatggaggtccaggatgcagagctaaaggccctcctccagagttctgcaagtcgaaaaacccagaaaaagaaaaaaaagaagaagaaaaaa

SEQ ID NO: 162669 - DNA, 1185 bp, Artificial Sequence
  derived and/or modified sequence
atgagcggcgaggacgagcagcaggagcagaccatcgccgaggacctggtggtgaccaagtacaagatgggcggcgacatcgccaacagagtgctgagaagcctggtggaggccagcagcagcggcgtgagcgtgctgagcctgtgcgagaagggcgacgccatgatcatggaggagaccggcaagatcttcaagaaggagaaggagatgaagaagggcatcgccttccccaccagcatcagcgtgaacaactgcgtgtgccacttcagccccctgaagagcgaccaggactacatcctgaaggagggcgacctggtgaagatcgacctgggcgtgcacgtggacggcttcatcgccaacgtggcccacaccttcgtggtggacgtggcccagggcacccaggtgaccggcagaaaggccgacgtgatcaaggccgcccacctgtgcgccgaggccgccctgagactggtgaagcccggcaaccagaacacccaggtgaccgaggcctggaacaaggtggcccacagcttcaactgcacccccatcgagggcatgctgagccaccagctgaagcagcacgtgatcgacggcgagaagaccatcatccagaaccccaccgaccagcagaagaaggaccacgagaaggccgagttcgaggtgcacgaggtgtacgccgtggacgtgctggtgagcagcggcgagggcaaggccaaggacgccggccagagaaccaccatctacaagagagaccccagcaagcagtacggcctgaagatgaagaccagcagagccttcttcagcgaggtggagagaagattcgacgccatgcccttcaccctgagagccttcgaggacgagaagaaggccagaatgggcgtggtggagtgcgccaagcacgagctgctgcagcccttcaacgtgctgtacgagaaggagggcgagttcgtggcccagttcaagttcaccgtgctgctgatgcccaacggccccatgagaatcaccagcggccccttcgagcccgacctgtacaagagcgagatggaggtgcaggacgccgagctgaaggccctgctgcagagcagcgccagcagaaagacccagaagaagaagaagaagaaggccagcaagaccgccgagaacgccaccagcggcgagaccctggaggagaacgaggccggcgactag

SEQ ID NO: 162670 - DNA, 1218 bp, Artificial Sequence
  derived and/or modified sequence
gcctgccccgccccccagcccgccagaagccagctgctggccctggcctgcctgcccgcccccctgctggccagagccttcgccagacccctgctggaggacagaggcgacagcgaccacagccccgaggacctggtggtgaccaagtacaagatgggcggcgacatcgccaacagagtgctgagaagcctggtggaggccagcagcagcggcgtgagcgtgctgagcctgtgcgagaagggcgacgccatgatcatggaggagaccggcaagatcttcaagaaggagaaggagatgaagaagggcatcgccttccccaccagcatcagcgtgaacaactgcgtgtgccacttcagccccctgaagagcgaccaggactacatcctgaaggagggcgacctggtgaagatcgacctgggcgtgcacgtggacggcttcatcgccaacgtggcccacaccttcgtggtggacgtggcccagggcacccaggtgaccggcagaaaggccgacgtgatcaaggccgcccacctgtgcgccgaggccgccctgagactggtgaagcccggcaaccagaacacccaggtgaccgaggcctggaacaaggtggcccacagcttcaactgcacccccatcgagggcatgctgagccaccagctgaagcagcacgtgatcgacggcgagaagaccatcatccagaaccccaccgaccagcagaagaaggaccacgagaaggccgagttcgaggtgcacgaggtgtacgccgtggacgtgctggtgagcagcggcgagggcaaggccaaggacgccggccagagaaccaccatctacaagagagaccccagcaagcagtacggcctgaagatgaagaccagcagagccttcttcagcgaggtggagagaagattcgacgccatgcccttcaccctgagagccttcgaggacgagaagaaggccagaatgggcgtggtggagtgcgccaagcacgagctgctgcagcccttcaacgtgctgtacgagaaggagggcgagttcgtggcccagttcaagttcaccgtgctgctgatgcccaacggccccatgagaatcaccagcggccccttcgagcccgacctgtacaagagcgagatggaggtgcaggacgccgagctgaaggccctgctgcagagcagcgccagcagaaagacccagaagaagaagaagaagaagaagaagaagtag

SEQ ID NO: 162671 - protein, 534 aa, Artificial Sequence
  derived and/or modified sequence
MKFTLGLGSRAWRVSWEGAAAAAAGPGAGGSALRCRAQRVSSPRLGRRGSRLSGALPLCLSRGGGGAQALPDCAGPSPGHPGHPGARQLAGPLAMEQTYGEVNQLGGVFVNGRPLPNAIRLRIVELAQLGIRPCDISRQLRVSHGCVSKILARYNETGSILPGAIGGSKPRVTTPNVVKHIRDYKQGDPGIFAWEIRDRLLADGVCDKYNVPSVSSISRILRNKIGSLAQPGPYEASKQPPSQPTLPYNHIYQYPYPSPVSPTGAKMGSHPGVPGTAGHVSIPRSWPSAHSVSNILGIRTFMEQTGALAGSEGTAYSPKMEDWAGVNRTAFPATPAVNGLEKPALEADIKYTQSASTLSAVGGFLPACAYPASNQHGVYSAPGGGYLAPGPPWPPAQGPPLAPPGAGVAVHGGELAAAMTFKHPSREGSLPAPAARPRTPSVAYTDCPSRPRPPRGSSPRTRARRERQADPGAQVCAAAPAIGTGRIGGLAEEEASAGPRGARPASPQAQPCLWPDPPHFLYWSGFLGFSELGF

SEQ ID NO: 162672 - DNA, 2838 bp, Artificial Sequence
  derived and/or modified sequence
aaattgattcccgcacgctgcagcctcccggtcagacgaatttctcccaatcggatgaagttcaccctgggcctggggtcgcgggcgtggagagtgtcctgggagggggcagcagcggcggcggcaggccctggagcgggcggcagcgcgctccgctgccgcgcacagcgcgtctccagcccgcggctgggccgccgcggctctcggctctcgggcgccctccctctatgcctctcacgcggcggcggcggcgcccaagctctcccggactgcgccgggcccagccccggccaccccggccaccccggcgccaggcagctggccggcccgctcgctatggagcagacgtatggcgaggtgaaccagctgggcggtgtgttcgtcaacggccgccccctgcccaacgccatccgcttgcgcattgtggagctggcgcagctgggcatccgaccctgtgacatcagtcggcagctccgcgtatcccacggctgcgtgagcaagatcctggcgcgctacaacgagaccggctccattctgcccggggccatcggggggagcaagccccgcgtcaccactcccaacgtggtcaagcacatccgggactacaagcaaggagaccctggcatctttgcctgggagatccgcgaccggctgctggccgacggcgtctgtgacaagtacaatgtgccttcggtgagctccatcagccgcatcctgcgcaacaagatcggcagcctggcgcagcccggaccgtacgaggcaagtaagcagccgccgtcgcagcctacgctgccctacaaccacatctaccagtacccctaccccagtcccgtgtcgcccacgggcgccaagatgggcagccaccccggggtcccgggcacggcgggccacgtcagcatcccgcgctcatggccctcggcacactcggtcagcaacatcctgggcatccggacgtttatggagcaaacaggggccctggctgggagcgaaggcaccgcttactctcccaagatggaagactgggccggcgtgaaccgcacggccttccccgccacccccgcagtgaatgggctagagaaacctgccttagaggcagacattaaatacactcagtcggcctccaccctctctgccgtgggcggctttctccccgcctgcgcctacccggcctccaaccagcacggcgtgtacagcgccccgggcggcggctacctcgccccgggcccgccgtggccgcctgcgcaaggtcctcctctggcgccccccggggccggcgtagctgtgcatggcggggaactcgcggcagcaatgaccttcaagcatcccagccgagaaggaagcctcccagctccggcagcaaggccccggacgccctcagtagcttacacggactgcccatcccggcctcgacctcctaggggcagctctccccggacccgagcccggagggaacggcaggcggacccgggcgcacaggtctgcgcggcggccccggcaatcggcacgggcaggatcggaggactcgcggaggaggaagccagtgccggcccgcggggtgcacgcccagccagcccccaggcccagccctgcctctggccggacccaccacacttcctttattggtctgggtttttaggcttctctgaacttgggttttagactgccgtaccctcctcacaatccttgctctgacgtggcctccttcgctctgccagcttcaaatttcttttttgtcactcccttgtccgtctccgtctcgcctctctccctgtttccttcccccctctttctttctcactctccctcccttccctttctctttcccttcctccctaccttccaccccggctttccccgaccttccagggctccctctgcccttccactctcttttccttgctccgacctctgctccagtcccgcttcttcccccgtctcctctttctagtcctctatatgctatcagccctttttcctggtccatccctgtcgttccttctctctctgtctctggttctactgtcaagggccctagttccctttgttttactgcttccccaaccctccctcagtccctgagagccctagagccatctcggtgacagtcccttctctggcacctgggactttgtagccttcactcctctgagcccaccagccctaatggaggggggctcaaacctaggaagtggacagaaaagccacagcctttattttgtattttttttgtaataacaaaccctaaaaaaccctccatgaactgtcctctcccgtcgatccccgcagcatattgtctggaaatctgttttctttctcagagcccagtggccgccgggcttctcttcccttctgagatgatgtcaccccaaagaagactggggtaggagtagggagcacaggggttgttggtgttttcagtgcttagaaaactgggttgtcctgcaggtgtctcctcccacccctccactcgcaacacttgctagggaatccgaccagtggtaaacacatcagcactttttggtgttcaggggtcagcacatttgttaatttaaaccacagactgcttccaggtacaaaggttcatttggacttctggtttgcaagggatgagggttaaaaaaaacaaaacaaaacaaacaacaacaacaacaaaaacaacccagaaagtatcttctagagccagccgcaagagctgtgagctgcttccaagttaggcgagctggtggtggtaccctggacataatgcaattctgtagtcagagcaatatccctggcgagagcctgacatcgcctgttaaaggtggctgcctctgaataaaggaaagcgtctgaaaggtg

SEQ ID NO: 162673 - DNA, 1605 bp, Artificial Sequence
  derived and/or modified sequence
atgaagttcaccctgggccttgggtccagggcgtggagagtgtcatgggagggagccgcagccgccgctgctgggcctggcgccggcgggtcagctttaagatgtcgagcccagagggtaagcagccctaggctgggccgccggggcagtaggctgtctggggccctcccattatgcctgagccgtggaggtggtggcgctcaggcactccctgattgcgcaggccctagtccgggtcaccctggacaccctggggcacgccagctggcaggccctttggccatggaacaaacctatggtgaggttaaccagctgggtggagtgtttgttaacgggcgtccacttcccaacgcaattcgtctgcggattgtggagttagcacagctgggaatacgcccatgcgacatcagtaggcagctaagagtctcacatgggtgcgtcagtaagattcttgctcggtataatgaaaccgggagtatcctgccaggggctattggaggctctaaaccccgcgtcacaacacctaacgtagtcaagcatatacgggactacaaacagggcgatcccggcatttttgcctgggaaatccgcgacaggctgctggccgacggggtctgtgacaagtacaacgtgcctagcgtgagctctatctcaaggattttgcgcaataagattgggtctctggctcagcccggcccctacgaggctagtaagcagcccccttcgcagcccacacttccttacaatcacatctatcagtacccatatcccagtcccgtgagcccgactggagctaagatgggatcccaccccggagtaccaggtaccgccgggcatgtgtcaatacctcgtagctggccttctgctcacagtgtatccaatatcctcggaatccgcacattcatggaacaaacgggcgcactggctgggagcgagggcaccgcttactcccccaaaatggaggactgggcgggcgtgaatcgtacagccttccctgccacacccgccgtaaatggccttgaaaaaccggcccttgaggctgacataaaatacacacaatcagctagtaccctgagcgcagtgggcggcttcctgccagcctgtgcatatcctgcttcaaatcagcatggagtttattccgcacctgggggcggctacctcgctcctggcccgccatggcctccagcccagggccctcctcttgctccccctggagcaggggttgcggtccacggcggcgaactcgcagcagcaatgacattcaagcacccctccagggagggaagtttgccagctcccgctgcacgacctcgaactccctctgtcgcctatacagactgtcctagccgtccccgcccgcccaggggaagtagccctcggacgcgggcgcgaagagagagacaggcggaccccggcgcccaagtgtgcgctgctgcccctgccatagggacaggaaggatcggaggattggcagaggaggaagcctcggccgggccgcggggtgcccgcccggcttctccccaggcccagccctgtctgtggcccgatccccctcactttttgtattggtcaggatttttggggttctcagagttgggattttag

SEQ ID NO: 162674 - DNA, 1605 bp, Artificial Sequence
  derived and/or modified sequence
atgaagttcaccctgggcctgggcagccgggcctggagggtgtcctgggagggcgctgctgctgctgctgctggccctggggccggcggcagcgccctgcgctgccgggcccagagggtgagcagcccccggctgggcagaagaggcagccggctgagcggggccctgcccctgtgcctgagcagaggaggcggcggggcccaggccctgcctgactgtgccggccccagccctggccaccctggccaccctggggcccggcagctggccggccccctggccatggagcagacctatggagaggtgaaccagctgggcggcgtgtttgtgaatggccggcccctgcccaatgccatccggctgagaattgtggagctggcccagctgggcatccggccctgtgacatcagccggcagctgcgggtgagccacggctgtgtgtccaagatcctggcccgctacaatgaaacaggcagcatcctgcccggggccatcggcggcagcaagccccgggtgaccacccccaacgtggtgaagcacatccgggactacaagcagggcgaccccggcatctttgcctgggagatccgggaccggctgctggctgatggagtgtgtgacaagtacaacgtgcccagcgtgagcagcatcagccgcatcctgaggaacaagattggcagcctggcccagcccggcccctatgaggccagcaagcagccccccagccagcccaccctgccctacaaccacatctaccagtacccctaccccagccctgtgagccccactggagccaagatgggcagccaccctggggtgcccggcacagctggccacgtgtccatccccaggtcctggcccagcgcccacagcgtgagcaacatcctgggcatccgcaccttcatggagcagacaggagccctggccggcagcgagggcacagcctacagccccaagatggaggactgggccggcgtgaacagaacagccttccctgccaccccagctgtgaatggcctggagaagccagccctggaggccgacatcaagtacacccagagcgccagcaccctgtctgctgtgggcggcttcctgcctgcctgtgcctacccagccagcaaccagcacggcgtgtacagcgcccctgggggcggctacctggcccctggccccccctggcccccagcccagggcccccccctggcccctcctggggccggcgtggccgtgcatggaggagagctggccgccgccatgaccttcaagcaccccagccgggagggcagcctgcctgccccagctgcccggcccaggaccccatctgtggcctacacagactgccccagccggcccaggcctccccggggcagcagccccaggacccgggcccggcgggagcggcaggccgaccccggggcccaggtgtgtgccgccgccccagccatcggcaccggcagaattggaggcctggccgaggaggaggccagcgctggccccaggggggcccggcctgccagcccccaggcccagccctgcctgtggccagaccccccccacttcctgtactggagcggcttcctgggcttcagcgagctgggcttctag

SEQ ID NO: 162675 - DNA, 1605 bp, Artificial Sequence
  derived and/or modified sequence
atgaagttcaccctgggcctgggcagccgggcctggcgggtgagctgggagggagcggctgccgcggctgcgggacccggtgcaggaggcagcgccctgagatgccgcgcacagcgggtgtctagcccgcgcctgggaaggcgtgggtcccgactgagtggcgcattgcccctttgcctaagcaggggcggagggggcgcacaggcattgcctgattgcgcaggtccctcccccggacatcctggccacccaggcgcacggcagctggccgggcctctggccatggaacaaacgtacggggaggtcaatcagttgggcggtgtgttcgtcaacggccgtcccttgcctaatgcaattcggctgcggatcgtggagttggcccagttgggaatccggccatgcgacatctctcggcagttaagggtgagccacgggtgtgtgtcaaaaatactggcacgctataacgagactgggtccatcctgccgggcgcgattggcggctctaaaccccgcgtcaccactccgaatgtcgtgaagcatataagggattataagcaaggcgaccctggcatatttgcttgggaaatccgagaccggttgttggcggacggcgtctgcgataagtacaacgtcccttccgtgtcctccatatccaggattctccgaaacaaaattgggtcccttgctcagccaggaccttatgaggcaagcaaacaaccgccaagccagccgaccctcccatataaccacatctaccagtacccctatccaagcccggtctcaccaaccggggcaaaaatggggagccatcctggcgttcccggcaccgctggtcatgttagcattcctaggtcttggccaagcgcccattctgtatcaaatatcttagggatacgaacatttatggagcagacaggtgccttggctggtagtgaaggtaccgcttactctccaaaaatggaggactgggccggggtgaacaggactgcgtttcctgccacacctgctgtcaacgggcttgagaagcctgctctggaggcagacatcaagtatacgcaaagcgcctcaaccctctccgcagtgggggggtttctgccggcctgcgcctaccccgcttctaaccaacatggtgtgtactctgctcctggggggggctacctcgcgccgggccctccatggcctcccgcccaaggcccaccgctcgccccacctggcgctggcgtggccgtgcatggcggagagcttgccgcagcaatgacctttaagcatcctagtcgagagggttccttaccagcaccggcggcaagacctaggactccgagcgtagcttacaccgactgcccaagcagacctaggccgcctcgggggagcagcccacgcacccgcgccagaagagaacgccaggctgatccgggggctcaggtgtgtgctgcagcgcccgccataggcaccggcagaattggcggactggccgaggaggaagctagcgcaggacccaggggggcccgtcctgccagccctcaggctcaaccttgcttgtggcctgatcctccccatttcctctactggtccggcttcctaggctttagtgagcttggtttttag

SEQ ID NO: 162676 - DNA, 1605 bp, Artificial Sequence
  derived and/or modified sequence
atgaagtttacactgggcctcgggtcccgggcttggcgggtgagttgggagggggcagccgcagccgcagcgggacctggggctggaggaagcgctctacgatgcagggctcagcgcgtgagtagccccagactcggccgaagaggatcccgcctgagtggcgctctcccactatgcttatctcggggagggggaggcgctcaagcacttccagattgtgctggacccagtccaggacaccctgggcaccctggagctaggcagttggctggacctttagccatggagcagacgtatggcgaagtgaatcagcttggcggtgtttttgtgaacgggcgtccactacctaacgcaattaggctgaggatcgtggagcttgcgcagctgggcatccggccatgcgatatctcccgccagctacgagtcagccacgggtgcgtgtctaagatacttgctcgatataacgaaactggaagtatcctgcctggtgcaattgggggttcaaagccacgggttacaactccaaacgttgtgaaacatattagagattacaaacagggcgaccccggaatctttgcttgggagattcgggatagactgttggccgatggagtgtgtgacaagtacaacgtgcctagtgtttcttcaatcagtcggatactgagaaataaaattggctccctggcccagcccggtccttacgaggcttctaagcaaccacctagccagcccaccctgccttacaaccacatctaccaatacccttacccttctccggtttctcccaccggagccaaaatggggtctcatcctggagtcccaggtacagccggacacgtttcaattccaagatcatggcccagtgcacacagtgtttcaaacatcctgggcatccgaacattcatggagcaaacaggggctcttgccggttccgagggcacggcatattcccccaagatggaggactgggcgggagttaatagaactgcctttccagcgaccccggctgtcaatggccttgagaagccagcattggaggccgatattaagtacactcagtctgcgtcaacattaagcgccgtcggcggttttttaccagcatgcgcctatcccgcaagtaaccaacacggcgtatactcagcacccggtggtgggtaccttgcgccaggtccaccctggcccccagcccaggggccacctctggctcctccaggcgctggcgttgccgtgcacggtggcgaattagctgcagctatgacatttaagcaccccagcagggaaggttccctgcctgctccagccgcaagaccccgaactccaagcgtagcctataccgattgtccttcacgcccacggccaccaaggggatcctctccacgtactagggccagaagagagcggcaggcagaccccggtgcccaggtttgtgccgcagctcccgctatagggaccggtagaattggaggcctggctgaggaagaggcaagtgcgggaccccgtggcgctcggcctgcctctccccaggcgcagccctgcctctggccagatccgccacatttcctctactggagtggcttcctcggcttttccgagctggggttctag

SEQ ID NO: 162677 - DNA, 1605 bp, Artificial Sequence
  derived and/or modified sequence
atgaagttcaccctgggcctgggcagcagagcctggagagtgagctgggagggcgccgccgccgccgccgccggccccggcgccggcggcagcgccctgagatgcagagcccagagagtgagcagccccagactgggcagaagaggcagcagactgagcggcgccctgcccctgtgcctgagcagaggcggcggcggcgcccaggccctgcccgactgcgccggccccagccccggccaccccggccaccccggcgccagacagctggccggccccctggccatggagcagacctacggcgaggtgaaccagctgggcggcgtgttcgtgaacggcagacccctgcccaacgccatcagactgagaatcgtggagctggcccagctgggcatcagaccctgcgacatcagcagacagctgagagtgagccacggctgcgtgagcaagatcctggccagatacaacgagaccggcagcatcctgcccggcgccatcggcggcagcaagcccagagtgaccacccccaacgtggtgaagcacatcagagactacaagcagggcgaccccggcatcttcgcctgggagatcagagacagactgctggccgacggcgtgtgcgacaagtacaacgtgcccagcgtgagcagcatcagcagaatcctgagaaacaagatcggcagcctggcccagcccggcccctacgaggccagcaagcagccccccagccagcccaccctgccctacaaccacatctaccagtacccctaccccagccccgtgagccccaccggcgccaagatgggcagccaccccggcgtgcccggcaccgccggccacgtgagcatccccagaagctggcccagcgcccacagcgtgagcaacatcctgggcatcagaaccttcatggagcagaccggcgccctggccggcagcgagggcaccgcctacagccccaagatggaggactgggccggcgtgaacagaaccgccttccccgccacccccgccgtgaacggcctggagaagcccgccctggaggccgacatcaagtacacccagagcgccagcaccctgagcgccgtgggcggcttcctgcccgcctgcgcctaccccgccagcaaccagcacggcgtgtacagcgcccccggcggcggctacctggcccccggccccccctggccccccgcccagggcccccccctggccccccccggcgccggcgtggccgtgcacggcggcgagctggccgccgccatgaccttcaagcaccccagcagagagggcagcctgcccgcccccgccgccagacccagaacccccagcgtggcctacaccgactgccccagcagacccagaccccccagaggcagcagccccagaaccagagccagaagagagagacaggccgaccccggcgcccaggtgtgcgccgccgcccccgccatcggcaccggcagaatcggcggcctggccgaggaggaggccagcgccggccccagaggcgccagacccgccagcccccaggcccagccctgcctgtggcccgaccccccccacttcctgtactggagcggcttcctgggcttcagcgagctgggcttctag

SEQ ID NO: 162678 - protein, 343 aa, Artificial Sequence
  derived and/or modified sequence
MNQLGGLFVNGRPLPLDTRQQIVRLAVSGMRPCDISRILKVSNGCVSKILGRYYRTGVLEPKGIGGSKPRLATPPVVARIAQLKGECPALFAWEIQRQLCAEGLCTQDKTPSVSSINRVLRALQEDQGLPCTRLRSPAVLAPAVLTPHSGSETPRGTHPGTGHRNRTIFSPSQAEALEKEFQRGQYPDSVARGKLATATSLPEDTVRVWFSNRRAKWRRQEKLKWEMQLPGASQGLTVPRVAPGIISAQQSPGSVPTAALPALEPLGPSCYQLCWATAPERCLSDTPPKACLKPCWGHLPPQPNSLDSGLLCLPCPSSHCHLASLSGSQALLWPGCPLLYGLE

SEQ ID NO: 162679 - DNA, 510 bp, Artificial Sequence
  derived and/or modified sequence
atgctgcccagcaccatgttcctggtgcacctgcccctgagcaccaatcgtctgcattgtctgaggaacaccagccttgagagttacctttgctcgttcgtacatctgaaccacccgcttcacatttccgatcgggtgattctgataagccttcacgaggccgtccgcttctccttcgctttttccttcccacgtggaactctcagcattgcctactgcctcatgtccagcgtgtctacttcgtccgaagccatcatgtctacagaactgttggcaaactactgccactccagcttacatgtgtgcatctgcatttcttctttccccaatgaaactggcaaccacgattccttccccggagccgtagtgagcatcagcgatcagcctacagaccagtgcaagctggcggcaaaggagctgcccctgcggaacctgttggaatgccgcttcttcgattgcatgggtgaggaggatctgattaatctgggggtcatcgggacagagaggtag

SEQ ID NO: 162680 - DNA, 1032 bp, Artificial Sequence
  derived and/or modified sequence
atgaaccaacttggcgggctgtttgtaaatggccggcccctgcctctggacaccaggcaacagatagttagactggcagtctctgggatgcggccttgcgatatctctcggatactgaaggtgagcaatggatgcgtaagtaagatcctgggccgttactacagaacaggcgtccttgaaccaaaagggattggcggctccaaaccacgcttggccacacccccagtggttgcccgaattgctcaactgaaaggagagtgcccggctttattcgcgtgggaaattcagcgccagctttgtgctgagggcctctgcacacaggataaaacacccagtgtatcttctatcaatagggttttgagagccctgcaggaagaccaaggcctcccctgcacgcggttacgttctccagccgtactcgcacccgctgttctgaccccacactcagggtctgagaccccacgcggaacccaccccggcacaggtcacaggaatagaacgattttttcacccagccaagctgaagcgttagaaaaagaattccaaagaggtcagtatcccgattctgttgcacgcggtaagctagcaacagcaacttcactgcccgaggacacagtgcgcgtatggttttctaatcgaagagcaaaatggcgacggcaggaaaaactcaaatgggaaatgcagcttcctggggcatctcagggcctcacggtgccgagggtggcacccgggatcatctccgcccagcagtctccaggctcagtgcctacagctgcattacccgcactggaacctctagggccaagctgttatcagctgtgttgggccaccgcacccgaacggtgtctgtcggacactccccccaaggcatgtctcaaaccatgttggggtcatctgccccctcagccaaacagcttagatagcggccttctatgcctcccatgtcccagcagccactgccatcttgctagcctcagtggcagtcaggcacttctatggcctggctgccccctgctgtacgggctagaatag

SEQ ID NO: 162681 - DNA, 1032 bp, Artificial Sequence
  derived and/or modified sequence
atgaaccagctgggcggcctgtttgtgaatggccggcccctgcccctggacacccggcagcagatcgtgcggctggccgtgtctggcatgaggccctgtgacatcagccgcatcctgaaggtgtccaatggctgtgtgtccaagatcctgggccgctactacagaactggagtgctggagcccaagggcatcggcggcagcaagccccggctggccaccccacctgtggtggcccgcatcgcccagctgaagggggagtgcccagccctgtttgcctgggagatccagaggcagctgtgtgccgagggcctgtgcacccaggacaagacccccagcgtgagcagcatcaacagagtgctgcgggccctgcaggaggaccagggcctgccctgcacccggctgcggagccctgctgtgctggccccagctgtgctgaccccccacagcggcagcgagaccccccggggcacccaccctggcaccggccacaggaacagaaccatcttcagccccagccaggccgaggccctggagaaggagttccagaggggccagtacccagattctgtggcccggggcaagctggccacagccaccagcctgcctgaagatactgtgcgggtgtggttcagcaacagaagagccaagtggaggcggcaggagaagctgaagtgggagatgcagctgcccggggccagccagggcctgactgtgccccgggtggcccctggcatcatcagcgcccagcagagccctggctctgtgcccacagctgccctgcctgccctggagcccctgggccccagctgctaccagctgtgctgggccacagcccctgagcgctgcctgagtgacaccccacccaaggcctgcctgaagccctgctggggccacctgcccccccagcccaacagcctggacagcggcctgctgtgcctgccctgccccagcagccactgccacctggccagcctgagcggcagccaggccctgctgtggccaggctgccccctgctgtatggcctggagtag

SEQ ID NO: 162682 - DNA, 1032 bp, Artificial Sequence
  derived and/or modified sequence
atgaaccagctgggcggcctgttcgtgaacggccggcccctgccccttgatacaagacagcagatcgtcagacttgccgtgtctggcatgcggccatgtgacattagtcgtattcttaaagtgtctaatggatgcgtctctaagattttgggccgctactatcgcactggagttctggagcccaaagggataggcggatctaagccaagactggccactccacccgtggtggcgcggattgcgcaactgaagggagagtgcccagccctattcgcctgggagatacagcgacaactctgcgccgaaggcctgtgtacccaggacaaaaccccttctgtgtccagtatcaacagggttctgcgcgccttacaggaggatcaaggcttgccctgcacccggctacgcagccccgctgttcttgcaccagcagtcctgactccccatagcggaagtgagactcctaggggaacccatccggggacaggtcacaggaatcgaaccatttttagtccatctcaagcagaagccctcgaaaaagagttccagcgggggcagtaccctgacagcgtggctcggggcaaactggctacagccactagtctgcccgaggataccgtaagggtgtggttttcaaacagacgggctaaatggaggcgacaggagaagctgaaatgggaaatgcagcttcccggagcatctcaaggactgacggtgccgagggtcgcaccgggaattatttccgcacagcagagtcctgggtcagtgcctacagcggcattgcccgcactcgagcctctcggacccagttgctaccaactgtgttgggctaccgcccctgagaggtgtctatctgacacacctcctaaagcatgtctcaagccctgctggggccacctgcctccgcagcccaactcactggacagcggcttgttgtgcttgccatgcccttcctcccactgtcacctcgccagtctgagcggcagtcaagcattgttgtggcccggctgcccactcctgtatggcctcgaatag

SEQ ID NO: 162683 - DNA, 1032 bp, Artificial Sequence
  derived and/or modified sequence
atgaaccagttgggcggactgttcgtaaacggtcgacccctcccgttagacactaggcagcagatcgtgaggcttgccgtgtctggcatgagaccgtgcgatattagcaggatcttgaaagtctctaatggctgcgtgtccaagatactcggccgttactatcgtaccggggtcctcgaacctaagggcataggaggatctaaaccaagactggcaaccccgcctgtggtggcaagaatcgcgcagttgaagggggagtgccctgccctcttcgcatgggagatacagagacagctctgcgcagaggggctctgcacacaggataaaactcctagcgtaagctctatcaaccgggtgctgcgagctctccaggaggatcaaggacttccctgtactcgcctgagatcccctgcagttttagcgccagctgtgctgaccccacattctggctctgagacgcctagaggcacacaccccggtacaggtcaccgtaaccggaccattttctcaccatcccaagctgaggctctggaaaaagaatttcagcgtggacagtatcccgattcagttgcaagaggaaaactggctactgctacaagcctgcccgaagatacagtgcgcgtgtggttctctaatcgacgggctaagtggcggaggcaggaaaagctaaagtgggaaatgcaactgccaggagctagccaaggtctgactgtacccagagtcgcccctggtatcatcagtgctcaacaatcccccggatccgtgccgactgctgctctccctgccctggaacccctcggaccatcctgttaccagctgtgttgggccactgctcccgagagatgcctctctgatacccccccaaaagcgtgcctgaagccttgttgggggcatctgccgccacagcccaatagtctggattccgggcttttgtgcctgccttgtccatcatctcactgccacctcgcaagtctgtctggatcccaggccctactgtggccaggctgtcctcttttgtatggcctggagtag

SEQ ID NO: 162684 - DNA, 1032 bp, Artificial Sequence
  derived and/or modified sequence
atgaaccagctgggcggcctgttcgtgaacggcagacccctgcccctggacaccagacagcagatcgtgagactggccgtgagcggcatgagaccctgcgacatcagcagaatcctgaaggtgagcaacggctgcgtgagcaagatcctgggcagatactacagaaccggcgtgctggagcccaagggcatcggcggcagcaagcccagactggccaccccccccgtggtggccagaatcgcccagctgaagggcgagtgccccgccctgttcgcctgggagatccagagacagctgtgcgccgagggcctgtgcacccaggacaagacccccagcgtgagcagcatcaacagagtgctgagagccctgcaggaggaccagggcctgccctgcaccagactgagaagccccgccgtgctggcccccgccgtgctgaccccccacagcggcagcgagacccccagaggcacccaccccggcaccggccacagaaacagaaccatcttcagccccagccaggccgaggccctggagaaggagttccagagaggccagtaccccgacagcgtggccagaggcaagctggccaccgccaccagcctgcccgaggacaccgtgagagtgtggttcagcaacagaagagccaagtggagaagacaggagaagctgaagtgggagatgcagctgcccggcgccagccagggcctgaccgtgcccagagtggcccccggcatcatcagcgcccagcagagccccggcagcgtgcccaccgccgccctgcccgccctggagcccctgggccccagctgctaccagctgtgctgggccaccgcccccgagagatgcctgagcgacaccccccccaaggcctgcctgaagccctgctggggccacctgcccccccagcccaacagcctggacagcggcctgctgtgcctgccctgccccagcagccactgccacctggccagcctgagcggcagccaggccctgctgtggcccggctgccccctgctgtacggcctggagtag

SEQ ID NO: 162685 - protein, 341 aa, Artificial Sequence
  derived and/or modified sequence
MEPAFGEVNQLGGVFVNGRPLPNAIRLRIVELAQLGIRPCDISRQLRVSHGCVSKILARYNETGSILPGAIGGSKPRVTTPTVVKHIRTYKQRDPGIFAWEIRDRLLADGVCDKYNVPSVSSISRILRNKIGNLAQQGHYDSYKQHQPTPQPALPYNHIYSYPSPITAAAAKVPTPPGVPAIPGSVAMPRTWPSSHSVTDILGIRSITDQVSDSSPYHSPKVEEWSSLGRNNFPAAAPHAVNGLEKGALEQEAKYGQAPNGLPAVGSFVSASSMAPYPTPAQVSPYMTYSAAPSGYVAGHGWQHAGGTSLSPHNCDIPASLAFKGMQAAREGSHSVTASAL

SEQ ID NO: 162686 - protein, 60 aa, Artificial Sequence
  derived and/or modified sequence
SDSSPYHSPKVEEWSSLGRNNFPAAAPHAVNGLEKGALEQEAKYGQIQNFFLLMISRLKF

SEQ ID NO: 162687 - DNA, 3122 bp, Artificial Sequence
  derived and/or modified sequence
ccctcccctgctctcgcaaggagaaagcgggcgacgagcgctcgcagcccgtggggctgatcccacctcccgcagggctccggtcgtgtcgctgtcggaccgcagaacgccgggacgcatttccgagctcgggcccgacccaacccgctgccattctagctacctagtggagccgcggagagactcttgaaccgtgaggctccttgatgagaaggtggagaggctgccgggctattctccgagcatcttccggccgagctctgctcctctccgtgcgcttgcggcttctccttgggctagcgcgtccgcagtccctccaagtccaggccgcagtcacccaggtggggagctagcctgaaagagacagcggaaggagtttcctggactgcgctgtcgctcaccgacccgcaccaatcaccatgcagcttgccctcggacccgccccttttagggcgtgtccccagtgagtgatagacggagccgccctgccctgctcagcccagcccacgttgctgcttagattgaaatgcagaactcaagcctctttcatcggggcacagacttccttttacttcttccttttgccctctcgcctcctcctcctgggaagaagcggaggcgccggcggtcggccgggatagcaacaggccgggccactgaggcggtgcggaaagtttctgtctgggagtgcggaactggggccgggttggtgtactgctcggagcaatggagccagccttcggggaggtgaaccagctgggaggagtgttcgtgaacgggaggccgctgcccaacgccatccggcttcgcatcgtggaactggcccaactgggcatccgaccgtgtgacatcagccgccagctacgggtctcgcacggctgcgtcagcaagatcctggcgcgatacaacgagacgggctcgatcttgccaggagccatcgggggcagcaagccccgggtcactacccccaccgtggtgaaacacatccggacctacaagcagagagaccccggcatcttcgcctgggagatccgggaccgcctgctggcggacggcgtgtgcgacaagtacaatgtgccctccgtgagctccatcagccgcattctgcgcaacaagatcggcaacttggcccagcagggtcattacgactcatacaagcagcaccagccgacgccgcagccagcgctgccctacaaccacatctactcgtaccccagccctatcacggcggcggccgccaaggtgcccacgccacccggggtgcctgccatccccggttcggtggccatgccgcgcacctggccctcctcgcactccgtcaccgacatcctgggcatccgctccatcaccgaccaagtgagcgacagctccccctaccacagccccaaggtggaggagtggagcagcctgggccgcaacaacttccccgccgccgccccgcacgcggtgaacgggttggagaagggagccctggagcaggaagccaagtacggtcaggcaccaaatggtctcccagctgtgggcagttttgtgtcagcatccagcatggctccttaccctaccccagcccaagtgtcgccttacatgacctacagtgctgctccttctggttatgttgctggacatgggtggcaacatgctgggggcacctcattgtctccccacaactgtgacattccggcatcgctggcgttcaagggaatgcaggcagccagagaaggtagtcattctgtcacggcttccgcgctctgatgggaaattccgtctccagcagcttcacccgggtctccctgtctcagcacctcctcccccaattcccaggtctcacatcccacccctcctgccctccaacccttctgccttgaaagctggctgtacggactcacatcctttgtgctaatgacacttacatatttcttgccataacttttctcttgcagaaaaactgacatgactttaggatttaaaaacaagagcaacaataagcattgaatgagacatttgtgttgcccacatactgtcttaacataacaaagaaacctacacccctcaaagggtttaaggaactttacaaactagtctttggtaaaaccacatgtgtatatttattctaaatcaacctgaacttttgaaatgtgcaattgttgagattttgcaaaatcaataaaggaaaatacttatagaaaaaattatgctacaccctctaatcaaatatggtaaccaagtaagctttaattcatcattaggaaacaaatcaataagtgacttgtttgagtgatcctttgtttaagacatgacctattttgttgaaaaatatatgtagaacccaagcaatatctgaatctagctctccctggtgttttgacttggttccaaatacaataatgtttatattttctattagtttgtaaatacggactctggatggtgcatttgtgtcttcattccataagatattcccctcccctcagccccaccccctctctatttttttctttcttttttgcaaaggtgactttctggcaacgtctttgtctctgtttggtggtgggctgctcgggctcctggacctggacttgcccccaaattttgtgtatgcagtgaaggcttcaacatctcatgaaggacactttatttctacagcagaggacacgaaaaacagataaaacaagccagtctcccattttgtacctaatcaaacaacacacatgctaagcatataaagacaagagggtggaaaatatctgaacaagaaggctctaaaggaagtcacttagaaacttaagtttaatgtgaaatgttttgcaaagatgcttaaaatgaactttgtgttaagaaaaccactgtgaaactaaattgtcctattattgttggcttacctgtgtgttcagcaatctcagccccaaataatgttgtaatttaaagaaaatggaaaattctgctctaatgaatgtaacaatggcttgctgtgaagtttacattgttgtacagaagcatgtttcgcatgtaggtaaactggtggtggtactagaaatacaatgttatttaattttaacaaattccctttattcatttctgaaattacaggacacagtttaactcataaaaaaaaaaaaaaaaaa

SEQ ID NO: 162688 - DNA, 1026 bp, Artificial Sequence
  derived and/or modified sequence
atggagcctgcattcggggaagtgaatcaattggggggagtattcgtgaacggcagacccctgcctaacgcaatcagactgagaatagtggaactggcgcagctgggaattaggccgtgtgacatcagtcggcagctgagagtgagccacggatgcgtatcaaagatcttggcacgctataatgagactggctccatcctgcccggagccattggcggttccaaaccacgagtgacaactcctactgtcgtcaagcatattaggacttataagcagagagacccaggaatctttgcttgggagatcagagaccgactcctggctgatggggtgtgcgacaaatacaacgtgccgtctgtgagtagcattagcaggatcttacgcaataaaattggcaacctcgcccaacaggggcattatgactcctacaaacaacatcaacctaccccccagcctgcattgccttacaaccacatctatagttatccttcacccataaccgctgccgcagccaaggtgcccacccccccgggggtgccagcgatacctgggtctgtggcaatgccacgaacatggcctagctcccattcagtaactgacattctcggcattcgttccattactgaccaggtgagcgactcttctccgtaccactctcccaaagtcgaagaatggtcttcccttgggcggaacaattttccggcagctgctccacacgccgtcaatggactggagaagggagcactggagcaggaagccaagtacggacaagcacccaatggcctcccggcagtgggcagctttgttagtgcctcctctatggctccatatcctacacctgctcaggtgagtccctacatgacgtactcagctgctccctctggctacgtggcaggccacggttggcagcatgcaggaggcacttcgctgagtccgcataattgcgacatcccggctagcctggcctttaaaggaatgcaggcggctagagagggatcacatagtgttacagcttccgcactctag

SEQ ID NO: 162689 - DNA, 1026 bp, Artificial Sequence
  derived and/or modified sequence
atggagcctgcgtttggtgaggtgaatcagctgggaggtgtctttgtcaacggcagaccactcccaaacgctattcggttgcgaattgtcgaattggcccagctaggtatcagaccctgcgatatttcccggcagctcagagtaagccacggctgtgtttccaaaatcctggctcggtacaacgaaacagggtccatcttacctggagctattggcggatctaagccaagggttacgactcctaccgtagtgaagcacattcggacgtacaagcagagggaccccgggatttttgcttgggaaattagggacagactgctcgctgacggtgtttgcgacaaatacaatgtgcctagcgtctctagcatctctcggatcctgagaaacaaaattggaaacctggctcagcagggacattacgactcttataagcagcatcaacctactcctcagcctgccctcccttataaccacatctacagctacccttccccaattacagccgcagcagccaaggtgcccaccccgcctggagtcccggccatccccgggagcgtcgccatgccgagaacatggccttccagtcatagcgtgacggatatcctgggaataagatcaattaccgaccaggtgtctgatagctctccgtatcacagtccgaaagttgaagaatggtcatcgctgggtcggaacaattttcctgctgccgcaccccacgcagtcaacggtctagagaaaggggccctcgagcaagaagctaagtatggacaggcgccgaacggactccccgccgtcggctcatttgtgagcgcctccagtatggcaccctaccccactccagcccaggtgtccccctacatgacgtacagcgctgcgccgtcgggatatgttgctggacacgggtggcaacacgccgggggcacctctctctcacctcacaactgcgacatcccggcaagcctggcatttaaagggatgcaggctgcacgggaaggctcgcactccgtcacagcaagcgctctgtag

SEQ ID NO: 162690 - DNA, 183 bp, Artificial Sequence
  derived and/or modified sequence
agcgattccagcccttaccactccccgaaggtggaagagtggtcttctttggggcgcaataacttccctgctgctgcgcctcatgcggttaacggcttggaaaagggtgccttggagcaggaggctaagtatgggcaaatccaaaacttcttcctcctgatgatttccagactgaagttctag

SEQ ID NO: 162691 - DNA, 1026 bp, Artificial Sequence
  derived and/or modified sequence
atggagcccgcctttggagaggtgaaccagctgggcggcgtgtttgtgaatggccggcccctgcccaatgccatccggctgagaattgtggagctggcccagctgggcatccggccctgtgacatcagccggcagctgcgggtgagccacggctgtgtgtccaagatcctggcccgctacaatgaaacaggcagcatcctgcccggggccatcggcggcagcaagccccgggtgaccacccccaccgtggtgaagcacatccgcacctacaagcagagggaccccggcatctttgcctgggagatccgggaccggctgctggctgatggagtgtgtgacaagtacaacgtgcccagcgtgagcagcatcagccgcatcctgaggaacaagattggcaacctggcccagcagggccactatgacagctacaagcagcaccagcccaccccccagcctgccctgccctacaaccacatctacagctaccccagccccatcacagctgctgctgccaaggtgcccaccccacctggggtgcctgccatccctggctctgtggccatgcccaggacctggcccagcagccacagcgtgacagacatcctgggcatccgcagcatcacagaccaggtgtctgacagcagcccctaccacagccccaaggtggaggagtggagcagcctgggcaggaacaacttccctgctgctgcccctcatgctgtgaatggcctggagaagggggccctggagcaggaggccaagtatggccaggcccccaacggcctgcctgctgtgggcagctttgtgtctgccagctccatggccccctaccccaccccagcccaggtgagcccctacatgacctacagcgctgcccccagcggctacgtggccggccacggctggcagcacgccggcggcaccagcctgagcccccacaactgtgacatcccagccagcctggccttcaagggcatgcaggccgcccgggagggcagccacagcgtgacagccagcgccctgtag

SEQ ID NO: 162692 - DNA, 183 bp, Artificial Sequence
  derived and/or modified sequence
agtgacagcagcccctaccacagccccaaggtggaggagtggagcagcctgggcaggaacaacttccctgctgctgcccctcatgctgtgaatggcctggagaagggggccctggagcaggaggccaagtatggccagatccagaacttcttcctgctgatgatcagccggctgaagttctag

SEQ ID NO: 162693 - DNA, 1026 bp, Artificial Sequence
  derived and/or modified sequence
atggagcccgccttcggcgaggtgaaccagctgggcggcgtgttcgtaaatggccgccctcttcccaacgctattcgccttagaatcgttgagctggctcaactgggcattcgcccctgtgatattagtcgccaactgagagtgtcacacggatgtgtaagtaaaatcctcgcccggtacaatgagactggatccatccttcctggggctatcggcgggtccaagcctcgagtgaccaccccaactgtcgtaaagcacatccggacatacaaacagcgggacccaggaattttcgcctgggaaattagggatagacttctcgctgacggcgtgtgcgacaaatacaatgtgccttccgttagtagtatttccaggattctgcgcaacaagatcggcaacctggcacaacaaggccattacgattcctacaaacaacaccagcccaccccgcagccagccttgccttataatcacatttacagctacccatcgcccatcaccgccgctgcagcaaaagtacccacacctcctggggtgcctgcaattccagggtccgtcgccatgccacgaacttggccatcgagtcacagcgtgacggacatcctggggattcgctctatcactgatcaagtaagcgacagctccccttaccactcgccaaaagtggaggaatggagcagcctgggacgcaacaactttcccgcggcagctccacatgcggtgaatggcctcgagaagggagccctagaacaagaggccaaatacggccaggcccccaacggcctccccgcggtgggctcctttgtatctgctagttccatggctccatacccaacccctgcccaggtttcgccttacatgacctattccgctgcaccttctggttatgtcgctgggcacggatggcagcatgcaggcggcacaagtctctcaccgcacaattgtgatataccagcttccctggcctttaagggaatgcaagcagcccgcgaaggtagtcacagtgtgaccgcatctgctctttag

SEQ ID NO: 162694 - DNA, 1026 bp, Artificial Sequence
  derived and/or modified sequence
atggagcccgccttcggcgaggtgaaccagctgggcggcgtgttcgtgaacggcagacctttgccaaacgccatccggctccgaatagtcgagctagctcagctgggcatccggccatgcgatatcagcagacaactaagggtatcgcacggttgcgtgtccaaaatccttgctcggtacaatgaaaccggctcaattttgcccggcgcgattggaggtagcaaaccccgcgtgactacgccaaccgtggttaaacatatccgcacctacaagcagcgagatcccggcatctttgcctgggaaataagagacagattactcgccgacggagtgtgcgataagtataatgttccaagcgtgtcttctatatccagaattttgcgcaataagattggcaacctggctcagcaggggcactacgattcttacaagcagcaccaaccgacaccccaaccggctttgccatataatcacatctactcttacccttcccccattacggccgccgcagcgaaggtccccacccctcctggcgtgcccgcaatccctggaagtgttgcaatgcccagaacctggcctagttcccactctgtgactgacattctgggcatcagaagcataaccgaccaagtttcagacagctctccgtatcactctcccaaggtggaggagtggtcatctcttggccgcaataactttcctgcagctgcaccacacgctgtgaatggcctcgagaagggcgcgctcgagcaagaggctaaatatggccaagccccgaatggcctgcctgcagttggcagtttcgtctcggcgagctccatggctccgtatcccacgcctgctcaagtgtccccctacatgacctatagtgcggccccatctgggtatgttgcagggcacggctggcagcacgcaggaggaacgagtctctccccgcataactgcgacatacccgcctcgctggccttcaagggaatgcaggccgctcgggaagggagccactccgtgaccgcatctgcattgtag

SEQ ID NO: 162695 - DNA, 183 bp, Artificial Sequence
  derived and/or modified sequence
agcgacagcagcccctaccacagccccaaggtggaggagtggagctctctgggcagaaataacttccccgccgcggcaccccacgccgtgaatggacttgaaaagggcgcacttgagcaagaagccaaatatggacagatccaaaacttcttcctgctcatgatcagccggctgaagttctag

SEQ ID NO: 162696 - DNA, 4514 bp, Artificial Sequence
  derived and/or modified sequence
agcccacgttgctgcttagattgaaatgcagaactcaagcctctttcatcggggcacagacttccttttacttcttccttttgccctctcgcctcctcctcctgggaagaagcggaggcgccggcggtcggccgggatagcaacaggccgggccactgaggcggtgcggaaagtttctgtctgggagtgcggaactggggccgggttggtgtactgctcggagcaatggagccagccttcggggaggtgaaccagctgggaggagtgttcgtgaacgggaggccgctgcccaacgccatccggcttcgcatcgtggaactggcccaactgggcatccgaccgtgtgacatcagccgccagctacgggtctcgcacggctgcgtcagcaagatcctggcgcgatacaacgagacgggctcgatcttgccaggagccatcgggggcagcaagccccgggtcactacccccaccgtggtgaaacacatccggacctacaagcagagagaccccggcatcttcgcctgggagatccgggaccgcctgctggcggacggcgtgtgcgacaagtacaatgtgccctccgtgagctccatcagccgcattctgcgcaacaagatcggcaacttggcccagcagggtcattacgactcatacaagcagcaccagccgacgccgcagccagcgctgccctacaaccacatctactcgtaccccagccctatcacggcggcggccgccaaggtgcccacgccacccggggtgcctgccatccccggttcggtggccatgccgcgcacctggccctcctcgcactccgtcaccgacatcctgggcatccgctccatcaccgaccaagtgagcgacagctccccctaccacagccccaaggtggaggagtggagcagcctgggccgcaacaacttccccgccgccgccccgcacgcggtgaacgggttggagaagggagccctggagcaggaagccaagtacggtcaggcaccaaatggtctcccagctgtgggcagttttgtgtcagcatccagcatggctccttaccctaccccagcccaagtgtcgccttacatgacctacagtgctgctccttctggttatgttgctggacatgggtggcaacatgctgggggcacctcattgtctccccacaactgtgacattccggcatcgctggcgttcaagggaatgcaggcagccagagaaggtagtcattctgtcacggcttccgcgctctgatgggaaattccgtctccagcagcttcacccgggtctccctgtctcagcacctcctcccccaattcccaggtctcacatcccacccctcctgccctccaacccttctgccttgaaagctggctgtacggactcacatcctttgtgctaatgacacttacatatttcttgccataacttttctcttgcagaaaaactgacatgactttaggatttaaaaacaagagcaacaataagcattgaatgagacatttgtgttgcccacatactgtcttaacataacaaagaaacctacacccctcaaagggtttaaggaactttacaaactagtctttggtaaaaccacatgtgtatatttattctaaatcaacctgaacttttgaaatgtgcaattgttgagattttgcaaaatcaataaaggaaaatacttatagaaaaaattatgctacaccctctaatcaaatatggtaaccaagtaagctttaattcatcattaggaaacaaatcaataagtgacttgtttgagtgatcctttgtttaagacatgacctattttgttgaaaaatatatgtagaacccaagcaatatctgaatctagctctccctggtgttttgacttggttccaaatacaataatgtttatattttctattagtttgtaaatacggactctggatggtgcatttgtgtcttcattccataagatattcccctcccctcagccccaccccctctctatttttttctttcttttttgcaaaggtgactttctggcaacgtctttgtctctgtttggtggtgggctgctcgggctcctggacctggacttgcccccaaattttgtgtatgcagtgaaggcttcaacatctcatgaaggacactttatttctacagcagaggacacgaaaaacagataaaacaagccagtctcccattttgtacctaatcaaacaacacacatgctaagcatataaagacaagagggtggaaaatatctgaacaagaaggctctaaaggaagtcacttagaaacttaagtttaatgtgaaatgttttgcaaagatgcttaaaatgaactttgtgttaagaaaaccactgtgaaactaaattgtcctattattgttggcttacctgtgtgttcagcaatctcagccccaaataatgttgtaatttaaagaaaatggaaaattctgctctaatgaatgtaacaatggcttgctgtgaagtttacattgttgtacagaagcatgtttcgcatgtaggtaaactggtggtggtactagaaatacaatgttatttaattttaacaaattccctttattcatttctgaaattacaggacacagtttaactcataaacctttctagaccaatttatttttcactttaatgttaataacagttgtggagtatatgtgtgtgtgagcatgtgagtatgtgttgtattttaaaacaattgattttctggggcaaaattctacagtttttaatcccttctgtttaggaagttcttcctgtttggcaatataggcttaaaaatatgtttttaggacattggtacaattcagctgttggaaaattaatatattgagggttttttggtactaattctgtgcaataactaaaagagcacctcactggatatggatgttgaagatggattccctaggtgattttaatttcttccggtctgtgctgtgcacagtctacatggcaatgcggttccaccacatcggtttcgtggcttcgtttaaaactcagatggctagattagttaggttttcaaatcactaggatgtaaacagtaagcagatttctgacacacaaattatgttagagtgactgcttttttcagacagcagatatcttatagagagctttgaactgcatttatttctaaagcaaccgaaattcagtgctacaaatagaggattataacttcaggagaagaataagcagaaggagcagatgaactctcagggccatagtcttcctttgatcttgtaaaacttccattgacatctggagttcccagtctggtgagaaaatagactataaactgaatggaacaaagatccaatccaatattttggtggagacttctttaaaaccataccatacagggactctcctgtcatctgaaaaactgatgtaaggtacagaactattctttatcaaatgtttttaggtggctgttagggggctttaaaaaatattacttgcttgtgtggaaatgcaaataatgttattttctttatctaaattaagaaatctcttgttattgtgctatttataatttttttctggttcttgtattttaaaaaatctaatattaatggtattgaagtttccttttctccctctaggtcttaacagtgaattcacatggagtaatttttaaaagatatcagatacaatttgctattcaaagaaaattatgatttaaagccactttttaaaatacgagaaggaaaataggatggattaaagggttaacttttaaagattattattggttaatgttgacatatttcctctatctcatagatggtaaaagtgttgcttttaaactggcaaatgcactcttcagaaatccttttctatctgatccacatggagaggttaaaggttcaatttcatgacctctatgcaggcagcgctctcattggatgtaagaatattacctgcaaggatagaatgcagttgtgcaacagagacacattcttatttcttttttttcacaattttgttttgtttttaatgacccttttattgaatattggactgaaatataaattttaaaaaacacgttggaaaggatgtacaacagaaggctatgtatgtatatacagtatgtcaaaagccttttatttttatacttcaaatgctctaaattaataaaaagtaataattaccatgttatcttttactttttattttcaaaatgctttagtgaaatagccccgtagtagaaatagcccacggtagtaacttaggacaggtgtcatatggactttcagttattcttgttgactttactgaatcagcatcatctctggatgcagatataaaatcaagtttggttacatcaagaccaaggagatatttttgttgatacatgttagtatagtaatccttagaaatgctaagtgtatttctttttcagaacatttccccttcatcatacatattttaatactgcagacagctgacttcccacctgaagttgtcgtttaaaactaataacctgaaaatgcagttctgttc

SEQ ID NO: 162697 - DNA, 3102 bp, Artificial Sequence
  derived and/or modified sequence
ccctcccctgctctcgcaaggagaaagcgggcgacgagcgctcgcagcccgtggggctgatcccacctcccgcagggctccggtcgtgtcgctgtcggaccgcagaacgccgggacgcatttccgagctcgggcccgacccaacccgctgccattctagctacctagtggagccgcggagagactcttgaaccgtgaggctccttgatgagaaggtggagaggctgccgggctattctccgagcatcttccggccgagctctgctcctctccgtgcgcttgcggcttctccttgggctagcgcgtccgcagtccctccaagtccaggccgcagtcacccaggtggggagctagcctgaaagagacagcggaaggagtttcctggactgcgctgtcgctcaccgacccgcaccaatcaccatgcagcttgccctcggacccgccccttttagggcgtgtccccagtgagtgatagacggagccgccctgccctgctcagcccagcccacgttgctgcttagattgaaatgcagaactcaagcctctttcatcggggcacagacttccttttacttcttccttttgccctctcgcctcctcctcctgggaagaagcggaggcgccggcggtcggccgggatagcaacaggccgggccactgaggcggtgcggaaagtttctgtctgggagtgcggaactggggccgggttggtgtactgctcggagcaatggagccagccttcggggaggtgaaccagctgggaggagtgttcgtgaacgggaggccgctgcccaacgccatccggcttcgcatcgtggaactggcccaactgggcatccgaccgtgtgacatcagccgccagctacgggtctcgcacggctgcgtcagcaagatcctggcgcgatacaacgagacgggctcgatcttgccaggagccatcgggggcagcaagccccgggtcactacccccaccgtggtgaaacacatccggacctacaagcagagagaccccggcatcttcgcctgggagatccgggaccgcctgctggcggacggcgtgtgcgacaagtacaatgtgccctccgtgagctccatcagccgcattctgcgcaacaagatcggcaacttggcccagcagggtcattacgactcatacaagcagcaccagccgacgccgcagccagcgctgccctacaaccacatctactcgtaccccagccctatcacggcggcggccgccaaggtgcccacgccacccggggtgcctgccatccccggttcggtggccatgccgcgcacctggccctcctcgcactccgtcaccgacatcctgggcatccgctccatcaccgaccaagtgagcgacagctccccctaccacagccccaaggtggaggagtggagcagcctgggccgcaacaacttccccgccgccgccccgcacgcggtgaacgggttggagaagggagccctggagcaggaagccaagtacggtcaggcaccaaatggtctcccagctgtgggcagttttgtgtcagcatccagcatggctccttaccctaccccagcccaagtgtcgccttacatgacctacagtgctgctccttctggttatgttgctggacatgggtggcaacatgctgggggcacctcattgtctccccacaactgtgacattccggcatcgctggcgttcaagggaatgcaggcagccagagaaggtagtcattctgtcacggcttccgcgctctgatgggaaattccgtctccagcagcttcacccgggtctccctgtctcagcacctcctcccccaattcccaggtctcacatcccacccctcctgccctccaacccttctgccttgaaagctggctgtacggactcacatcctttgtgctaatgacacttacatatttcttgccataacttttctcttgcagaaaaactgacatgactttaggatttaaaaacaagagcaacaataagcattgaatgagacatttgtgttgcccacatactgtcttaacataacaaagaaacctacacccctcaaagggtttaaggaactttacaaactagtctttggtaaaaccacatgtgtatatttattctaaatcaacctgaacttttgaaatgtgcaattgttgagattttgcaaaatcaataaaggaaaatacttatagaaaaaattatgctacaccctctaatcaaatatggtaaccaagtaagctttaattcatcattaggaaacaaatcaataagtgacttgtttgagtgatcctttgtttaagacatgacctattttgttgaaaaatatatgtagaacccaagcaatatctgaatctagctctccctggtgttttgacttggttccaaatacaataatgtttatattttctattagtttgtaaatacggactctggatggtgcatttgtgtcttcattccataagatattcccctcccctcagccccaccccctctctatttttttctttcttttttgcaaaggtgactttctggcaacgtctttgtctctgtttggtggtgggctgctcgggctcctggacctggacttgcccccaaattttgtgtatgcagtgaaggcttcaacatctcatgaaggacactttatttctacagcagaggacacgaaaaacagataaaacaagccagtctcccattttgtacctaatcaaacaacacacatgctaagcatataaagacaagagggtggaaaatatctgaacaagaaggctctaaaggaagtcacttagaaacttaagtttaatgtgaaatgttttgcaaagatgcttaaaatgaactttgtgttaagaaaaccactgtgaaactaaattgtcctattattgttggcttacctgtgtgttcagcaatctcagccccaaataatgttgtaatttaaagaaaatggaaaattctgctctaatgaatgtaacaatggcttgctgtgaagtttacattgttgtacagaagcatgtttcgcatgtaggtaaactggtggtggtactagaaatacaatgttatttaattttaacaaattccctttattcatttctgaaattacaggacacagtttaactc

SEQ ID NO: 162698 - DNA, 987 bp, Artificial Sequence
  derived and/or modified sequence
agtgcaggcacccttagtgagcgacagctccccctaccacagccccaaggtggaggagtggagcagcctgggccgcaacaacttccccgccgccgccccgcacgcggtgaacgggttggagaagggagccctggagcaggaagccaagtacggtcagatccaaaactttttcttgcttatgatatcgaggttgaaattctaggtgaagcacatctctatttgtggctaaatctactttattataaagccaaggtagaagatagtttgctatagagagcacccttgcacagttctttcaggggaaagaattctcatgcctttcatggaagatccacatgagaaaggagttgatggattgaagtcttatttatggaatctttaggcaccaaatggtctcccagctgtgggcagttttgtgtcagcatccagcatggctccttaccctaccccagcccaagtgtcgccttacatgacctacagtgctgctccttctggttatgttgctggacatgggtggcaacatgctgggggcacctcattgtctccccacaactgtgacattccggcatcgctggcgttcaagggaatgcaggcagccagagaaggtagtcattctgtcacggcttccgcgctctgatgggaaattccgtctccagcagcttcacccgggtctccctgtctcagcacctcctcccccaattcccaggtctcacatcccacccctcctgccctccaacccttctgccttgaaagctggctgtacggactcacatcctttgtgctaatgacacttacatatttcttgccataacttttctcttgcagaaaaactgacatgactttaggatttaaaaacaagagcaacaataagcattgaatgagacatttgtgttgcccacatactgtcttaacataacaaagaaacctacacccctcaaagggtttaaggaactttacaaactagtctttggtaaaaccacatgtgta

SEQ ID NO: 162699 - DNA, 1026 bp, Artificial Sequence
  derived and/or modified sequence
atggagcctgctttcggtgaggttaatcagttgggtggcgtgtttgttaacgggcgaccactcccgaacgctatccggttacgaatcgtggaactggctcagttggggataaggccgtgcgatatcagtcgccagctgagagtgagccacggttgcgtttccaaaatactagcgagatacaatgaaactgggtcaattctgccgggtgcgattggaggatccaagcctagagtgaccacccccacagtggtcaagcacatccgaacttacaaacagagggacccaggcatcttcgcctgggaaattagagatcgtttgctagctgatggggtgtgcgataaatacaacgttcctagcgtatcgtcaataagccgaatattgcgcaataagatcggcaatctcgcccagcagggacactatgatagctataagcaacatcaacccactccacagccagctctcccctataaccacatttacagttacccctcacccattacagcagccgctgccaaagtcccaactccccctggcgtgcccgctatccctggctccgttgctatgccgaggacctggcctagctcccacagcgtgacagacattctgggcattcgctccataactgatcaggtctcagactccagcccttatcattccccgaaggttgaggagtggtcttctttggggcgaaacaacttccctgcagccgctcctcacgctgtgaacgggctggagaagggcgctcttgagcaggaggccaagtatggtcaggctcctaatggtttgccagcggtgggtagctttgtttctgccagtagcatggccccatatcctaccccagcacaggtgtctccttacatgacttatagcgccgcaccgagcggatatgtggcaggccacggttggcagcatgcgggtggtacctcccttagcccacacaactgtgatatcccagcttcactggccttcaaaggaatgcaggctgctcgcgaaggctctcattcagttactgcctcagccctctag

SEQ ID NO: 162700 - DNA, 1026 bp, Artificial Sequence
  derived and/or modified sequence
atggagccagccttcggagaggtgaaccagttgggaggagtgttcgtaaatggaagacctctgcccaatgctatccgcctgaggatcgtggaactggcccagcttggcatccgcccttgcgacatttctagacagttgagggtcagtcacggttgtgttagtaagatccttgctagatacaacgagacgggctccatattacccggtgcaattggtggaagcaagccaagagtgacaactccaacggtcgtcaagcatatcagaacatacaagcagcgcgaccccggaatatttgcttgggaaatccgggacaggctgttggctgacggcgtttgtgacaaatacaacgtgccatcagtatcaagcatcagccgcatcctaaggaataaaatcggtaacctggcacagcagggccactatgattcgtacaagcagcatcagccaacaccacagccagccctgccatacaaccatatatacagctacccttctcctattaccgctgccgcagcaaaggttccgacacccccaggagtccccgcaattccagggagcgtcgccatgccacggacttggccctcgtcccattccgttactgacattctgggcatccgctctatcaccgaccaggtgagtgattcttcaccttaccattcacctaaagtggaggaatggtcctcactgggtagaaataatttccccgctgccgcaccccatgctgtgaacggcttagaaaagggggctctcgagcaagaggccaaatacggccaagcccctaatggcctacccgctgttggttcgttcgtgtcagcatcttcaatggctccttaccctacacccgctcaggtttcaccctatatgacttattccgccgcacctagtgggtatgtggccggacacgggtggcagcatgctggagggacttctctctctcctcataactgcgacattccggcttccctagcattcaaagggatgcaggctgctcgtgagggtagccattcggtaacagcctccgcactgtag

SEQ ID NO: 162701 - DNA, 183 bp, Artificial Sequence
  derived and/or modified sequence
agcgattccagtccgtaccacagccccaaagtcgaagaatggtccagcctcgggagaaacaattttcctgcagccgctccacacgccgtgaatggcctagaaaagggcgctctggagcaggaggccaagtacggacagatccaaaacttctttttgctgatgatatctcgcctgaagttttag

SEQ ID NO: 162702 - DNA, 1026 bp, Artificial Sequence
  derived and/or modified sequence
atggagcccgccttcggcgaggtgaaccagctgggcggcgtgttcgtgaacggcagacccctgcccaacgccatcagactgagaatcgtggagctggcccagctgggcatcagaccctgcgacatcagcagacagctgagagtgagccacggctgcgtgagcaagatcctggccagatacaacgagaccggcagcatcctgcccggcgccatcggcggcagcaagcccagagtgaccacccccaccgtggtgaagcacatcagaacctacaagcagagagaccccggcatcttcgcctgggagatcagagacagactgctggccgacggcgtgtgcgacaagtacaacgtgcccagcgtgagcagcatcagcagaatcctgagaaacaagatcggcaacctggcccagcagggccactacgacagctacaagcagcaccagcccaccccccagcccgccctgccctacaaccacatctacagctaccccagccccatcaccgccgccgccgccaaggtgcccaccccccccggcgtgcccgccatccccggcagcgtggccatgcccagaacctggcccagcagccacagcgtgaccgacatcctgggcatcagaagcatcaccgaccaggtgagcgacagcagcccctaccacagccccaaggtggaggagtggagcagcctgggcagaaacaacttccccgccgccgccccccacgccgtgaacggcctggagaagggcgccctggagcaggaggccaagtacggccaggcccccaacggcctgcccgccgtgggcagcttcgtgagcgccagcagcatggccccctaccccacccccgcccaggtgagcccctacatgacctacagcgccgcccccagcggctacgtggccggccacggctggcagcacgccggcggcaccagcctgagcccccacaactgcgacatccccgccagcctggccttcaagggcatgcaggccgccagagagggcagccacagcgtgaccgccagcgccctgtag

SEQ ID NO: 162703 - DNA, 183 bp, Artificial Sequence
  derived and/or modified sequence
agcgacagcagcccctaccacagccccaaggtggaggagtggagcagcctgggcagaaacaacttccccgccgccgccccccacgccgtgaacggcctggagaagggcgccctggagcaggaggccaagtacggccagatccagaacttcttcctgctgatgatcagcagactgaagttctag

SEQ ID NO: 162704 - protein, 434 aa, Artificial Sequence
  derived and/or modified sequence
MDDQSRMLQTLAGVNLAGHSVQGGMALPPPPHGHEGADGDGRKQDIGDILHQIMTITDQSLDEAQAKKHALNCHRMKPALFSVLCEIKEKTGLSIRGAQEEDPPDPQLMRLDNMLLAEGVSGPEKGGGSAAAAAAAAASGGSSDNSIEHSDYRAKLTQIRQIYHTELEKYEQACNEFTTHVMNLLREQSRTRPISPKEIERMVGIIHRKFSSIQMQLKQSTCEAVMILRSRFLDARRKRRNFSKQATEILNEYFYSHLSNPYPSEEAKEELAKKCSITVSQVSNWFGNKRIRYKKNIGKFQEEANLYAAKTAVTAAHAVAAAVQNNQTNSPTTPNSGSSGSFNLPNSGDMFMNMQSLNGDSYQGSQVGANVQSQVDTLRHVINQTGGYSDGLGGNSLYSPHNLNANGGWQDATTPSSVTSPTEGPGSVHSDTSN

SEQ ID NO: 162705 - DNA, 1305 bp, Artificial Sequence
  derived and/or modified sequence
atggacgaccagtcccgaatgctgcagactctggcgggtgtaaatctcgccggtcatagtgttcagggaggcatggcgctgcctcctcccccccacggccacgagggagccgatggtgacggcaggaagcaggacatcggggatattctccaccagattatgaccatcactgaccaaagcctggacgaagctcaagccaagaaacacgctctcaattgccacagaatgaaacccgcactcttttcagtcctgtgcgagatcaaggagaagactggcctgtctattaggggggcgcaggaagaggatccacctgatccgcagttgatgcgattggacaatatgctcctggccgaaggcgttagcggccccgagaaagggggaggatccgctgctgcagctgctgccgccgctgccagtgggggaagcagtgataattcgatcgagcactctgattatcgagccaaactcacacagatacgtcagatctaccacacggagctggaaaaatatgagcaggcctgtaatgaatttacaacccatgttatgaatctcctgcgagagcagtctcggacacgacccatatcacctaaggagatcgagcgcatggttgggattattcatcgtaagttcagcagtattcaaatgcagttgaaacagtctacctgcgaagctgttatgatcctcaggtcacggttcctggacgcacgcagaaagcgacgcaacttcagtaaacaagccacagagatcctaaatgaatacttttacagccatttgagtaatccatacccctccgaggaggcaaaggaggagctcgccaagaagtgcagtatcacagtatctcaggtgtccaattggtttggcaataagagaatcaggtataaaaagaacatcggaaagtttcaggaagaggctaacctctacgcagccaaaacggccgtcaccgctgcccacgctgtagccgccgccgttcagaataaccagacgaattctcctactaccccaaatagtggcagttccgggagctttaaccttcccaacagtggtgatatgtttatgaacatgcagtccctcaatggcgactcctaccagggcagtcaggtgggcgcaaacgttcagtcccaggtcgatactctgaggcatgttattaaccagacaggcggctatagcgacggactggggggcaattccctctacagtccacacaatctgaacgctaatggcgggtggcaagacgcaacaactcccagctctgtgacctcccccacggaagggccaggatctgtgcacagtgatacttccaactag

SEQ ID NO: 162706 - DNA, 1305 bp, Artificial Sequence
  derived and/or modified sequence
atggatgaccagagcaggatgctgcagaccctggccggcgtgaacctggccggccacagcgtgcagggcggcatggccctgcccccaccaccccacggccacgagggcgcagatggagatggcaggaagcaggacatcggggacatcctgcaccagatcatgaccatcacagaccagagcctggatgaggcccaggccaagaagcacgccctgaactgccacaggatgaagccagccctcttctctgtgctgtgtgagatcaaggagaagacaggcctgagcatccggggggcccaggaggaggaccccccagacccccagctgatgaggctggacaacatgctgctggccgagggcgtgtctggccctgagaagggcggcggcagcgctgctgctgctgctgctgctgctgccagcggcggcagcagtgacaacagcattgagcacagcgactaccgggccaagctgacccagatccggcagatctaccacacagagctggagaagtatgagcaggcctgcaatgagttcaccacccacgtgatgaacctgctgcgggagcagagcaggacccggcccatcagccccaaggagattgaaagaatggtgggcatcatccacaggaagttcagcagcatccagatgcagctgaagcagagcacctgtgaggccgtgatgatcctgcggagccgcttcctggatgcccggaggaagagaagaaacttcagcaagcaggccacagagatcctgaatgagtacttctacagccacctgagcaacccctaccccagcgaggaggccaaggaggagctggccaagaagtgcagcatcaccgtgtcccaggtgagcaactggtttggaaacaagaggatccgctacaagaagaacatcggcaagttccaggaggaggccaacctgtatgctgccaagacagctgtgacagctgcccatgctgtggccgctgctgtgcagaacaaccagaccaacagccccaccacccccaacagcggcagcagcggcagcttcaacctgcccaacagcggggacatgttcatgaacatgcagagcctgaatggagacagctaccagggcagccaggtgggcgccaacgtgcagagccaggtggacaccctgcggcacgtgatcaaccagacaggaggctacagtgatggcctgggcggcaacagcctgtacagcccccacaacctgaatgccaacggcggctggcaggatgccaccacccccagctctgtgaccagccccacagagggccctggctctgtgcacagcgacaccagcaactag

SEQ ID NO: 162707 - DNA, 1305 bp, Artificial Sequence
  derived and/or modified sequence
atggacgaccagagccggatgctgcagaccctggccggcgtgaacctggccgggcactcagtgcagggcggcatggccttacccccccccccgcatggccacgaaggcgccgatggggatggccgaaagcaagacattggcgatattctacatcagatcatgactatcaccgatcagtctctagacgaggcgcaggctaaaaaacacgccctaaactgtcatcgtatgaaacctgccctgttcagcgttctctgcgagattaaggagaagactggcctgtcgatccgcggcgcccaggaagaagacccccccgatcctcaactgatgcggctggacaacatgctgttggccgagggagtgtcaggccctgagaaggggggcgggagtgccgctgcagccgcagcagcggcagccagtggaggatcttctgataacagtatagagcactccgactaccgggcaaaactgactcagattagacagatctaccacaccgaactcgaaaagtacgaacaagcctgcaatgagttcacaacacatgtcatgaacctgcttagagagcagtcgcgcacacgcccaatttctcccaaggaaatcgagagaatggttgggatcatccacagaaaattctccagcattcaaatgcagctgaaacagtctacctgtgaggcagtgatgattctcaggtccagattcctcgacgcccgccggaagcggcgcaacttctctaaacaagctacagagattctgaacgagtacttctattctcatctgtccaacccgtacccatcggaagaggccaaagaggagctagctaaaaaatgttcaatcacagtgtctcaggtgagcaactggtttggcaataagcgcattcgctataaaaagaatattgggaagttccaggaagaggcaaatctttatgctgcaaaaaccgctgtgacggctgcacacgccgtcgcagcagccgtgcagaataaccagaccaatagccctaccacccccaattccggatccagcgggagttttaatcttcccaactcaggtgatatgtttatgaatatgcagtcactgaatggcgactcctaccaggggtcccaggtgggcgctaatgttcagtcccaggtggatacactgcgtcacgtgattaaccaaacggggggatattctgatggactcggaggaaattcactgtactccccccataatcttaatgccaacggcggttggcaagacgcaactactccatcctcagtgactagcccgacggaagggcctggatccgtgcactcagacacaagcaactag

SEQ ID NO: 162708 - DNA, 2502 bp, Artificial Sequence
  derived and/or modified sequence
gcccgcgcgcggcgggatggacgatcaatccaggatgctgcagactctggccggggtgaacctggctggccactcggtgcaggggggcatggccctgccgcctcccccgcacggccacgaaggggcggacggcgacggcaggaagcaggacatcggcgacatcctccaccagatcatgaccatcaccgaccagagcttggacgaggcgcaagcaaagaaacatgccctgaactgtcacagaatgaaaccagcgctcttcagcgtcctgtgtgagatcaaagagaaaacaggtctcagcatcagaggagcccaggaggaggaccctcccgatccccagctaatgagactggacaatatgcttttggcagaaggggtttcaggtcctgagaaaggtgggggatcggcggcagcagctgcagccgcggcagcctctggaggttcttcagataactctattgaacactcagattacagagccaaattgacccagatcagacaaatctatcacacagaactggagaaatatgaacaggcatgtaatgaatttactacacatgtgatgaaccttctccgagaacagagtagaacacgtcccatttctccaaaagagattgaaagaatggtgggcatcatccatcgaaaatttagttccattcagatgcagctcaaacaaagcacttgtgaagcagttatgattttaagatcaaggttccttgatgccagacggaaaaggcgtaacttcagtaaacaggccacagaaatcttgaatgaatatttttactcacacctcagcaacccctaccccagtgaagaagccaaagaggagctggccaagaaatgcagcatcacagtgtcacaggtatccaattggtttggcaacaaacgaatcaggtacaagaagaacattggcaagtttcaggaagaagccaacctctatgctgcaaagacggccgtgacagctgcacacgcagtagcagcagctgtgcagaacaaccagaccaattcgcccaccacaccaaattccggttcttctggttcttttaacctcccaaattctggggacatgttcatgaacatgcagagtctgaatggggattcttaccaagggtcccaagtcggagccaatgtgcaatcacaggtggataccctccgtcatgttatcaatcagacgggaggctacagtgatggccttggaggaaattcactgtacagtccacataatttaaatgctaatggaggctggcaggacgcaacaactccatcttctgtgacttctcctacagaaggcccaggaagtgtgcactcggatacctctaactaatctctggccacacttttccctgagctacatgccttgataagtgcattcagagcaataggaggaaaaggaaagcgtttttgtagcccaccatctacagctttactgtaaaaccttgtcttattcgagaacttggtaaatctgttttttaaggaatcataatcatttgtatttatacttaaaaacacacaatgttaaaaaaaataaagcactttatccaattaggccaagatttaacattgttgacagtcctgtagctattttatcataatttattatcaatattttacattaatggtttcacagttgccaattacttggccttaagggtaaaaagtacaatatacactaaacctcaaccgttaaagcagatgcaaaaattcacctcacctaaattgaacttcttgcatatttccattactgacttggattgtctttctttcatatcactaatggagttggaataaagagctgtttgcctatccctgttaatgatggttgtgtttaagaatcttcctcgtcacgtttgtgttcagatctcttatgttataattagatcagagactggtagcatcgtttctctctctgaaagcaccagtgcccagagtctgctcggtaataaaattatggatccagattgttctgagagacgaagatacttgctgctgatagaggtgaaaacgagattgatccgtctggggttttacggtgtgcactgggtgctgcacagacttgtcaaggtttgctacgtcctctgggcatctgcaaaaggccctgctctctggagtgttgtatatagtgtagcaaaagagtatttatacatcccaccaatcaaaacacagctttattacctcatgcgaactcatacaaaccaatagaatttcaacatgttctgtagcttagagtgctcacttactacctctgaacaatactcacgctgtagtttgtctctttcttatctttttgcatcttgtaattaactctttgtttcccttcataaaatgtaatgtacattgtaatcttttaaaagaaaaatcagggttgcacttgcaacttttaaaaaaccgagtgtggaaacattgggtcttaattcaacacaggatcggtaaaactgttgtaaatactgagaaacattttgaatgttcttcatcttattactaatccatgcaaaaaaaaaaaaaaaa

SEQ ID NO: 162709 - DNA, 1723 bp, Artificial Sequence
  derived and/or modified sequence
ctctgcacaggagcggacgcgggagcccctccgcacccgtcccctcccccgggtcgccttcgcctgcccccggggcgaggctccccgcgcgggttcgcgtcgcgtctgcagtggccgaggctgctgcctgccgggcagatgggtccgccttgttccggctgcagctttcgccgccggggcttgctggctgtcgggaactagtcaactggagtttttgttgacttcccacggaaacatgccctgaactgtcacagaatgaaaccagcgctcttcagcgtcctgtgtgagatcaaagagaaaacaggtctcagcatcagaggagcccaggaggaggaccctcccgatccccagctaatgagactggacaatatgcttttggcagaaggggtttcaggtcctgagaaaggtgggggatcggcggcagcagctgcagccgcggcagcctctggaggttcttcagataactctattgaacactcagattacagagccaaattgacccagatcagacaaatctatcacacagaactggagaaatatgaacaggcatgtaatgaatttactacacatgtgatgaaccttctccgagaacagagtagaacacgtcccatttctccaaaagagattgaaagaatggtgggcatcatccatcgaaaatttagttccattcagatgcagctcaaacaaagcacttgtgaagcagttatgattttaagatcaaggttccttgatgccagacggaaaaggcgtaacttcagtaaacaggccacagaaatcttgaatgaatatttttactcacacctcagcaacccctaccccagtgaagaagccaaagaggagctggccaagaaatgcagcatcacagtgtcacaggtatccaattggtttggcaacaaacgaatcaggtacaagaagaacattggcaagtttcaggaagaagccaacctctatgctgcaaagacggccgtgacagctgcacacgcagtagcagcagctgtgcagaacaaccagaccaattcgcccaccacaccaaattccggttcttctggttcttttaacctcccaaattctggggacatgttcatgaacatgcagagtctgaatggggattcttaccaagggtcccaagtcggagccaatgtgcaatcacaggtggataccctccgtcatgttatcaatcagacgggaggctacagtgatggccttggaggaaattcactgtacagtccacataatttaaatgctaatggaggctggcaggacgcaacaactccatcttctgtgacttctcctacagaaggcccaggaagtgtgcactcggatacctctaactaatctctggccacacttttccctgagctacatgccttgataagtgcattcagagcaataggaggaaaaggaaagcgtttttgtagcccaccatctacagctttactgtaaaaccttgtcttattcgagaacttggtaaatctgttttttaaggaatcataatcatttgtatttatacttaaaaacacacaatgttaaaaaaaataaagcactttatccaattaggccaagatttaacattgttgacagtcctgtagctattttatcataatttattatcaatattttacattaatggtttcacagttgccaattacttggccttaagggtaaaaagtacaatatacactaaacctcaaccgttaaagcagatgcaaaaattcacctcacc

SEQ ID NO: 162710 - DNA, 1305 bp, Artificial Sequence
  derived and/or modified sequence
atggacgatcagagtcgcatgctgcaaacgttagccggagtaaacctcgctggccactctgtccagggagggatggctctccctccaccccctcatggtcatgagggcgctgacggggacggcaggaaacaggatattggcgacattctccaccagatcatgactatcaccgaccaatcacttgatgaagcccaagccaaaaaacatgccttgaattgtcatagaatgaagccggcattattctctgtcctctgcgagatcaaggagaagactggcctgagtatacgcggtgcccaggaagaggatcctcccgacccccagctcatgagactggacaacatgttgctcgctgagggcgtctccgggccagagaaaggcggtggctccgctgcagcggctgccgctgccgcagcttcaggcggatcttccgacaactctatcgaacactcagactacagggccaaactcacccagatcaggcaaatttaccataccgagctcgagaaatatgaacaggcatgcaacgaatttaccactcatgtcatgaatttgctcagggagcaaagccgcacacggccaatctcccctaaggaaatagaaaggatggtgggaattattcatcggaaattttctagcatccaaatgcagctgaaacagagtacctgcgaggcagtcatgattctacgttctagattcctggacgccagaaggaagagaagaaactttagcaagcaagccacagagattctgaatgagtacttttactcccatttgtcgaatccgtaccccagtgaagaagcgaaagaagagctcgcgaagaaatgctcaattaccgtgtcgcaggtgagcaattggtttggcaacaaacgcattagatacaagaagaatattgggaagttccaggaggaggccaatttgtacgccgcaaagacagccgtgacagcggctcatgccgtggcggctgcggtacagaacaatcaaaccaatagtccgactactcccaatagtggaagtagcggaagctttaacctccctaactctggcgatatgttcatgaatatgcaaagccttaacggggattcttaccaggggtcacaggtgggcgctaatgtgcaatcccaggttgatacattgaggcacgtgatcaatcaaactggcggttacagcgatggactcgggggaaattccctgtactcaccacacaacctgaatgcaaacggaggatggcaagatgccacaactcccagttcggtgacctcacctactgagggcccaggctccgtccacagtgacacctccaattag

SEQ ID NO: 162711 - DNA, 1305 bp, Artificial Sequence
  derived and/or modified sequence
atggacgaccagagcagaatgctgcagaccctggccggcgtgaacctggccggccacagcgtgcagggcggcatggccctgcccccccccccccacggccacgagggcgccgacggcgacggcagaaagcaggacatcggcgacatcctgcaccagatcatgaccatcaccgaccagagcctggacgaggcccaggccaagaagcacgccctgaactgccacagaatgaagcccgccctgttcagcgtgctgtgcgagatcaaggagaagaccggcctgagcatcagaggcgcccaggaggaggacccccccgacccccagctgatgagactggacaacatgctgctggccgagggcgtgagcggccccgagaagggcggcggcagcgccgccgccgccgccgccgccgccgccagcggcggcagcagcgacaacagcatcgagcacagcgactacagagccaagctgacccagatcagacagatctaccacaccgagctggagaagtacgagcaggcctgcaacgagttcaccacccacgtgatgaacctgctgagagagcagagcagaaccagacccatcagccccaaggagatcgagagaatggtgggcatcatccacagaaagttcagcagcatccagatgcagctgaagcagagcacctgcgaggccgtgatgatcctgagaagcagattcctggacgccagaagaaagagaagaaacttcagcaagcaggccaccgagatcctgaacgagtacttctacagccacctgagcaacccctaccccagcgaggaggccaaggaggagctggccaagaagtgcagcatcaccgtgagccaggtgagcaactggttcggcaacaagagaatcagatacaagaagaacatcggcaagttccaggaggaggccaacctgtacgccgccaagaccgccgtgaccgccgcccacgccgtggccgccgccgtgcagaacaaccagaccaacagccccaccacccccaacagcggcagcagcggcagcttcaacctgcccaacagcggcgacatgttcatgaacatgcagagcctgaacggcgacagctaccagggcagccaggtgggcgccaacgtgcagagccaggtggacaccctgagacacgtgatcaaccagaccggcggctacagcgacggcctgggcggcaacagcctgtacagcccccacaacctgaacgccaacggcggctggcaggacgccaccacccccagcagcgtgaccagccccaccgagggccccggcagcgtgcacagcgacaccagcaactag

SEQ ID NO: 162712 - protein, 356 aa, Artificial Sequence
  derived and/or modified sequence
MDAGVTESGLNVTLTIRLLMHGKEVGSIIGKKGESVKRIREESGARINISEGNCPERIITLTGPTNAIFKAFAMIIDKLEEDINSSMTNSTAASRPPVTLRLVVPATQCGSLIGKGGCKIKEIRESTGAQVQVAGDMLPNSTERAITIAGVPQSVTECVKQICLVMLETLSQSPQGRVMTIPYQPMPASSPVICAGGQDRCSDAAGYPHATHDLEGPPLDAYSIQGQHTISPLDLAKLNQVARQQSHFAMMHGGTGFAGIDSSSPEVKGYWASLDASTQTTHELTIPNNLIGCIIGRQGANINEIRQMSGAQIKIANPVEGSSGRQVTITGSAASISLAQYLINARLSSEKGMGCS

SEQ ID NO: 162713 - DNA, 1071 bp, Artificial Sequence
  derived and/or modified sequence
atggatgccggggtcaccgagagcggattgaatgttacattgacaatccgtctactgatgcatggcaaagaagttggctcgatcatcggcaaaaagggcgaatcagttaagagaatccgggaagagtccggggctaggatcaatatctccgagggtaattgccctgagagaatcattacactgactgggccaaccaacgcaatctttaaagccttcgcaatgattatcgacaaactggaagaggatattaatagctccatgacgaattccaccgcagcctcgagacctccagtaaccctgagactggtagtccccgctactcagtgcgggagcctaatcggtaaagggggttgtaagataaaggagatcagagagagcacaggggcccaggtccaggtcgccggggacatgctccctaactctacggaaagggccattacaatcgctggagtcccgcagagcgtgacagagtgtgtcaaacagatctgtcttgtgatgttggagaccttgtctcagagtccacaggggcgtgtcatgaccatcccctatcagccaatgcctgcttccagcccagtcatatgtgctggggggcaggaccggtgctcggacgcagccggctatccgcacgccactcacgacctagaaggcccacccctggatgcgtatagcatccaggggcagcatacaatcagccccctagatttagcgaagttgaaccaggtcgctcggcagcaatctcacttcgccatgatgcacggcggcacaggctttgccggtatcgacagttcatctccagaagtgaagggctattgggctagtctagacgcctccactcaaaccactcacgagttgacaattcccaacaatttgatagggtgcatcatagggcgccaaggagcgaatatcaacgagattcgacagatgagcggcgcccagattaaaattgccaatcctgttgaaggctcttcaggacgtcaggttaccattactgggtccgccgcgagcatttctttagcacagtatttgattaacgcgaggttgtcatcagaaaagggcatggggtgcagttag

SEQ ID NO: 162714 - DNA, 1071 bp, Artificial Sequence
  derived and/or modified sequence
atggatgctggggtgacagagagcggcctgaatgtgaccctgaccatccggctgctgatgcacggcaaggaggtgggcagcatcatcggcaagaagggggagagcgtgaagaggatccgggaggagagcggggcccgcatcaacatcagcgagggcaactgcccagagcgcatcatcaccctgaccggccccaccaatgccatcttcaaggcctttgccatgatcatcgacaagctggaggaggacatcaacagctccatgaccaacagcacagctgccagccggccccctgtgaccctgcggctggtggtgcctgccacccagtgtggcagcctgattggaaaaggaggctgcaagatcaaggagatccgggagagcactggagcccaggtgcaggtggccggggacatgctgcccaacagcacagagcgggccatcaccatcgccggcgtgccccagagcgtgacagaatgtgtgaagcagatctgcctggtgatgctggagaccctgagccagagcccccagggccgggtgatgaccatcccctaccagcccatgcctgccagcagccctgtgatctgtgccggcggccaggaccgctgcagtgatgctgctggctacccccacgccacccatgacctggagggcccccccctggatgcctacagcatccagggccagcacaccatcagccccctggacctggccaagctgaaccaggtggcccggcagcagagccactttgccatgatgcacggcggcactggatttgctggcatcgacagcagcagccctgaggtgaagggctactgggccagcctggatgccagcacccagaccacccatgagctgaccatccccaacaacctgattggctgcatcatcggccggcagggcgccaacatcaatgagatccggcagatgtctggggcccagatcaagatcgccaaccctgtggagggcagcagcggccggcaggtgaccatcaccggcagcgctgccagcatcagcctggcccagtacctgatcaatgcccggctgagcagcgagaagggcatgggctgcagctag

SEQ ID NO: 162715 - DNA, 1071 bp, Artificial Sequence
  derived and/or modified sequence
atggacgccggcgtgaccgagagcggcctgaacgtgaccctgaccatccggctcctcatgcatggaaaagaggtagggagtattataggtaagaagggagagagtgtcaagcgcataagggaagagtccggcgcgcgcatcaacatttccgagggcaattgtcctgaacgaataataacgctcacgggccccactaatgccatcttcaaggcctttgccatgattatcgacaagcttgaggaggatattaactcttcaatgaccaattcaaccgcagccagtaggcctcctgtgacattgagactcgtcgtcccagccactcagtgcggcagtttaattgggaaggggggatgtaaaatcaaggaaattcgcgaatccacaggtgcccaggtccaggttgcaggagacatgttgccgaactctacagagagagccatcactatagctggagtcccccagtcagtaactgagtgcgttaagcagatatgcttggtgatgctagaaaccctgagtcagagccctcaggggagggtaatgaccatcccctatcaacccatgccagcgtcttcccccgtgatatgcgcaggcggacaggataggtgtagcgacgccgcgggatatccgcacgctacccatgacctcgaaggacccccccttgacgcctacagcatccaaggccaacacacaatttcacctttggacctagcaaagctcaatcaggtggccagacaacaatcgcatttcgcaatgatgcatggggggacaggcttcgcagggatagattcgagcagccccgaggtcaagggttactgggcctcactggacgcctcgacgcaaacaacacacgagctgaccatcccaaacaacttaataggttgtattatcggacggcagggggctaatatcaatgagatcaggcagatgagcggcgcgcaaataaagatagccaaccccgtcgagggtagcagtgggcgacaggtgacaattaccgggtctgccgccagcattagcttggcccagtatctgataaatgcacggctgtcctctgaaaagggcatgggatgcagttag

SEQ ID NO: 162716 - DNA, 1748 bp, Artificial Sequence
  derived and/or modified sequence
gaaagcgggcttcccgccccgcccagaccgccgaggctgccgccggagtcgccaccgccgcgccctcgcccacccgcccgcccgccgctcccggccccgctcgccccctccgccgccgccgcccgcccctgcgactacgctgcggcctcccgcccgctcccgctcgctcccgcggccctcgctcgcctcgcgccggcagttttgggcctacacctcccctccccccgccagccgccaaagacttgaccacgtaacgagcccaactcccccgaacgccgcccgccgctcgccatggatgccggtgtgactgaaagtggactaaatgtgactctcaccattcggcttcttatgcacggaaaggaagtaggaagcatcattgggaagaaaggggagtcggttaagaggatccgcgaggagagtggcgcgcggatcaacatctcggaggggaattgtccggagagaatcatcactctgaccggccccaccaatgccatctttaaggctttcgctatgatcatcgacaagctggaggaagatatcaacagctccatgaccaacagtaccgcggccagcaggcccccggtcaccctgaggctggtggtgccggccacccagtgcggctccctgattgggaaaggcgggtgtaagatcaaagagatccgcgagagtacgggggcgcaggtccaggtggcgggggatatgctgcccaactccaccgagcgggccatcaccatcgctggcgtgccgcagtctgtcaccgagtgtgtcaagcagatttgcctggtcatgctggagacgctctcccagtctccgcaagggagagtcatgaccattccgtaccagcccatgccggccagctccccagtcatctgcgcgggcggccaagatcggtgcagcgacgctgcgggctacccccatgccacccatgacctggagggaccacctctagatgcctactcgattcaaggacaacacaccatttctccgctcgatctggccaagctgaaccaggtggcaagacaacagtctcactttgccatgatgcacggcgggaccggattcgccggaattgactccagctctccagaggtgaaaggctattgggcaagtttggatgcatctactcaaaccacccatgaactcaccattccaaataacttaattggctgcataatcgggcgccaaggcgccaacattaatgagatccgccagatgtccggggcccagatcaaaattgccaacccagtggaaggctcctctggtaggcaggttactatcactggctctgctgccagtattagtctggcccagtatctaatcaatgccaggctttcctctgagaagggcatggggtgcagctagaacagtgtaggttccctcaataacccctttctgctgttctcccatgatccaactgtgtaatttctggtcagtgattccaggttttaaataatttgtaagtgttcagtttctacacaactttatcatccgctaagaatttaaaaatcacattctctgttcagctgttaatgctgggatccatatttagttttataagcttttccctgtttttagttttgttttgggttttttggctcatgaattttatttctgtttgtcgataagaaatgtaagagtggaatgttaataaatttcagtttagttctgtaatgtcaagaatttaagaattaaaaaacggattggttaaaaaatgcttcatatttgaaaaagctgggaattgctgtctt

SEQ ID NO: 162717 - DNA, 1071 bp, Artificial Sequence
  derived and/or modified sequence
atggacgcaggtgtcacagagagcggattgaatgtcactttgactatcagactgctgatgcatggaaaggaagtcggctccataatcggcaaaaaaggtgaaagcgtgaaaaggatccgggaggaatcaggcgctcgcatcaacatcagcgaaggcaactgcccggaacgcattattactttgactgggcctactaatgctatcttcaaagcctttgcaatgattatcgataagctagaggaggatatcaactcatcgatgaccaattcaactgccgcttcccgcccacccgtgactctgagattggttgtccccgcaacacagtgtggctcgctcatagggaagggcggatgcaagattaaggagatccgagagagtaccggagctcaggtccaagtggccggagacatgctgcctaatagtaccgagagggccattactattgcaggcgtgccccagtctgtgaccgagtgcgtgaagcagatttgtctagtgatgctggaaacgctgtcacagtccccccagggacgcgtgatgactattccttaccagccaatgccagcctcttcccctgtgatttgcgccggaggacaggatagatgtagcgacgcagccggatacccccacgccacgcatgatctggagggccctccccttgacgcttactccatacagggtcagcacaccatctcgccattagatctggctaaactcaatcaggttgccaggcagcagagccatttcgctatgatgcacggcggtaccggattcgccggaatcgattcgagtagccccgaggtgaaaggctactgggcctctctggacgcttccacacaaactacgcatgaactcactatcccaaacaacctgattggctgcatcatcggtagacagggagctaatattaatgaaattcgtcagatgagcggagctcagatcaaaatagcgaacccagtggagggttcgagtggaagacaggtaacgataacgggctctgctgcaagcattagcctggctcagtatctgatcaacgcacgcctgagctccgaaaaagggatgggctgttcgtag

SEQ ID NO: 162718 - DNA, 1071 bp, Artificial Sequence
  derived and/or modified sequence
atggacgccggcgtgaccgagagcggcctgaacgtgaccctgaccatcagactgctgatgcacggcaaggaggtgggcagcatcatcggcaagaagggcgagagcgtgaagagaatcagagaggagagcggcgccagaatcaacatcagcgagggcaactgccccgagagaatcatcaccctgaccggccccaccaacgccatcttcaaggccttcgccatgatcatcgacaagctggaggaggacatcaacagcagcatgaccaacagcaccgccgccagcagaccccccgtgaccctgagactggtggtgcccgccacccagtgcggcagcctgatcggcaagggcggctgcaagatcaaggagatcagagagagcaccggcgcccaggtgcaggtggccggcgacatgctgcccaacagcaccgagagagccatcaccatcgccggcgtgccccagagcgtgaccgagtgcgtgaagcagatctgcctggtgatgctggagaccctgagccagagcccccagggcagagtgatgaccatcccctaccagcccatgcccgccagcagccccgtgatctgcgccggcggccaggacagatgcagcgacgccgccggctacccccacgccacccacgacctggagggcccccccctggacgcctacagcatccagggccagcacaccatcagccccctggacctggccaagctgaaccaggtggccagacagcagagccacttcgccatgatgcacggcggcaccggcttcgccggcatcgacagcagcagccccgaggtgaagggctactgggccagcctggacgccagcacccagaccacccacgagctgaccatccccaacaacctgatcggctgcatcatcggcagacagggcgccaacatcaacgagatcagacagatgagcggcgcccagatcaagatcgccaaccccgtggagggcagcagcggcagacaggtgaccatcaccggcagcgccgccagcatcagcctggcccagtacctgatcaacgccagactgagcagcgagaagggcatgggctgcagctag

SEQ ID NO: 162719 - protein, 2024 aa, Artificial Sequence
  derived and/or modified sequence
MATGGGPFEDGMNDQDLPNWSNENVDDRLNNMDWGAQQKKANRSSEKNKKKFGVESDKRVTNDISPESSPGVGRRRTKTPHTFPHSRYMSQMSVPEQAELEKLKQRINFSDLDQRSIGSDSQGRATAANNKRQLSENRKPFNFLPMQINTNKSKDASTNPPNRETIGSAQCKELFASALSNDLLQNCQVSEEDGRGEPAMESSQIVSRLVQIRDYITKASSMREDLVEKNERSANVERLTHLIDHLKEQEKSYMKFLKKILARDPQQEPMEEIENLKKQHDLLKRMLQQQEQLRALQGRQAALLALQHKAEQAIAVMDDSVVAETAGSLSGVSITSELNEELNDLIQRFHNQLRDSQPPAVPDNRRQAESLSLTREVSQSRKPSASERLPDEKVELFSKMRVLQEKKQKMDKLLGELHTLRDQHLNNSSSSPQRSVDQRSTSAPSASVGLAPVVNGESNSLTSSVPYPTASLVSQNESENEGHLNPSEKLQKLNEVRKRLNELRELVHYYEQTSDMMTDAVNENRKDEETEESEYDSEHENSEPVTNIRNPQVASTWNEVNSHSNAQCVSNNRDGRTVNSNCEINNRSAANIRALNMPPSLDCRYNREGEQEIHVAQGEDDEEEEEEAEEEGVSGASLSSHRSSLVDEHPEDAEFEQKINRLMAAKQKLRQLQDLVAMVQDDDAAQGVISASASNLDDFYPAEEDTKQNSNNTRGNANKTQKDTGVNEKAREKFYEAKLQQQQRELKQLQEERKKLIDIQEKIQALQTACPDLQLSAASVGNCPTKKYMPAVTSTPTVNQHETSTSKSVFEPEDSSIVDNELWSEMRRHEMLREELRQRRKQLEALMAEHQRRQGLAETASPVAVSLRSDGSENLCTPQQSRTEKTMATWGGSTQCALDEEGDEDGYLSEGIVRTDEEEEEEQDASSNDNFSVCPSNSVNHNSYNGKETKNRWKNNCPFSADENYRPLAKTRQQNISMQRQENLRWVSELSYVEEKEQWQEQINQLKKQLDFSVSICQTLMQDQQTLSCLLQTLLTGPYSVMPSNVASPQVHFIMHQLNQCYTQLTWQQNNVQRLKQMLNELMRQQNQHPEKPGGKERGSSASHPPSPSLFCPFSFPTQPVNLFNIPGFTNFSSFAPGMNFSPLFPSNFGDFSQNISTPSEQQQPLAQNSSGKTEYMAFPKPFESSSSIGAEKPRNKKLPEEEVESSRTPWLYEQEGEVEKPFIKTGFSVSVEKSTSSNRKNQLDTNGRRRQFDEESLESFSSMPDPVDPTTVTKTFKTRKASAQASLASKDKTPKSKSKKRNSTQLKSRVKNIRYESASMSSTCEPCKSRNRHSAQTEEPVQAKVFSRKNHEQLEKIIKCNRSTEISSETGSDFSMFEALRDTIYSEVATLISQNESRPHFLIELFHELQLLNTDYLRQRALYALQDIVSRHISESHEKGENVKSVNSGTWIASNSELTPSESLATTDDETFEKNFERETHKISEQNDADNASVLSVSSNFEPFATDDLGNTVIHLDQALARMREYERMKTEAESNSNMRCTCRIIEDGDGAGAGTTVNNLEETPVIENRSSQQPVSEVSTIPCPRIDTQQLDRQIKAIMKEVIPFLKEHMDEVCSSQLLTSVRRMVLTLTQQNDESKEFVKFFHKQLGSILQDSLAKFAGRKLKDCGEDLLVEISEVLFNELAFFKLMQDLDNNSITVKQRCKRKIEATGVIQSCAKEAKRILEDHGSPAGEIDDEDKDKDETETVKQTQTSEVYDGPKNVRSDISDQEEDEESEGCPVSINLSKAETQALTNYGSGEDENEDEEMEEFEEGPVDVQTSLQANTEATEENEHDEQVLQRDFKKTAESKNVPLEREATSKNDQNNCPVKPCYLNILEDEQPLNSAAHKESPPTVDSTQQPNPLPLRLPEMEPLVPRVKEVKSAQETPESSLAGSPDTESPVLVNDYEAESGNISQKSDEEDFVKVEDLPLKLTIYSEADLRKKMVEEEQKNHLSGEICEMQTEELAGNSETLKEPETVGAQSI

SEQ ID NO: 162720 - DNA, 6075 bp, Artificial Sequence
  derived and/or modified sequence
atggctaccggcggcggtccctttgaggacgggatgaacgaccaggatcttcccaattggtctaatgaaaacgtggatgaccgacttaataatatggactggggcgcacagcagaagaaggccaacagaagttctgagaagaacaaaaagaagtttggggtcgaaagcgacaagcgcgtgacaaacgacatttcacccgaaagcagccctggcgtgggaagacgtcgaaccaagaccccccacacattcccgcacagtcgttatatgtcacaaatgtccgtccccgagcaggccgaattggagaagttgaagcaacggatcaatttttccgacctggaccaacgatccattggtagcgacagtcaggggcgtgccaccgcagcaaacaataaacggcagctatccgagaacagaaagcccttcaattttctccctatgcagattaacaccaataaaagcaaggacgcaagcaccaatccccctaaccgcgagactatcgggtctgctcaatgtaaggaactgttcgcctcagccctgagcaatgacctcctgcaaaactgtcaagtcagtgaagaagatgggagaggcgagcctgccatggagtcttctcaaattgtctcacggttggtccagatccgcgactacattactaaggcctcatctatgcgtgaggacctggtcgagaagaatgaaaggagcgccaacgtcgagagattgacgcatttgatcgaccaccttaaagaacaggagaaaagctacatgaaattcctgaaaaagatactcgcccgggatccacaacaggagcccatggaagagatagagaatctgaagaagcaacacgatctgctgaaaagaatgctacagcaacaggagcagctgagggccctgcaggggcggcaggccgctctgctggcgctgcagcacaaggccgagcaggctatcgctgttatggatgactccgtcgtcgctgaaacagcaggcagtctatctggggtgagcattacgtctgaactgaatgaagagttaaacgatctaatccagcgtttccataaccaattacgggattctcagccgccagcggttccggataatcgtcggcaagcagagtctctcagtttgactcgcgaggtgtcgcagagtcggaagccaagtgccagcgagcggctgccagatgaaaaggtggaactcttctctaaaatgagagtgcttcaggagaagaaacagaagatggataagctcctgggtgagctgcacactctacgcgaccagcatcttaataactctagcagcagccctcagaggtcggtggatcagcgttctacgtctgccccatcggcctcagtgggactggctccagtcgtcaatggcgagagtaacagcctgacgagcagcgtcccatatcctacagcttccctggtcagccagaacgagtcagagaatgaggggcaccttaatccatctgaaaagttgcagaagctaaatgaagtgcggaaacggttaaacgaactccgcgagctcgtgcactactatgagcagacaagcgacatgatgacagacgcggtcaacgagaaccgcaaggacgaggagacggaggagtctgagtacgactccgaacacgaaaattctgagccggtaacaaatattcgcaacccccaggtggcctccacctggaatgaagtgaatagccattctaacgcacagtgcgttagtaacaatcgcgacggacggaccgtgaattccaactgcgaaatcaacaatagaagtgcagctaatattcgagcacttaacatgccaccatccctggactgtaggtataatagggagggcgaacaggagatccacgttgcacagggcgaagacgatgaggaggaagaagaggaggctgaagaagagggcgtgagcggcgcttcgctctccagtcataggagctcactggtggatgagcatcctgaagatgccgagttcgaacagaagataaaccgcctgatggctgcaaagcagaaactccgccagctccaggatcttgtggctatggtacaggatgacgacgcagcccagggtgttatttctgcatctgccagcaatctggatgatttttaccctgcagaagaggataccaaacaaaacagcaataacacgcggggaaacgccaataaaacccaaaaggacaccggtgtgaacgaaaaggccagagaaaagttttacgaggcaaaattgcagcagcagcaacgggagttaaaacagctacaagaggaaagaaagaagctgatagacatacaggaaaagatccaggctcttcagactgcttgccctgatctgcagttgtctgccgcgtccgtgggaaattgcccaactaagaaatatatgccagcggtgacctccacccctactgtgaaccagcacgagactagtacgtccaagtccgtctttgaacccgaagatagctctattgtggacaatgagctttggtccgaaatgagaagacacgagatgttgagagaagaactgcgacaacgcaggaaacagctggaggcccttatggctgagcatcagcgaaggcagggactggctgaaaccgccagcccggttgccgtgtcattgagaagcgacgggagcgagaacctttgcactccccagcagagtcgaacagagaaaaccatggccacatggggggggtctacccagtgcgccttagacgaggagggtgatgaggacggttatctaagtgagggaatagtccgcaccgacgaggaagaggaagaggagcaggatgcttcaagcaacgacaatttttcagtctgccctagcaactctgtaaatcacaatagctataacggaaaggagaccaaaaatagatggaaaaataattgcccattttcagctgacgagaattaccggcccctggctaaaacacggcaacagaacatttccatgcaaagacaggagaacctccgctgggttagcgaattgagctatgtcgaggaaaaagagcagtggcaggaacagataaaccagctgaaaaaacagcttgatttctcagtgtccatctgccagactttaatgcaggaccagcagacgctgtcatgccttctccagaccttgctgaccggtccatactctgtcatgccctcaaacgtcgcgagtccacaggtacacttcatcatgcatcagcttaatcaatgttacacacagctcacctggcaacagaacaatgtgcaaagactcaagcaaatgcttaatgaactcatgcgccaacagaaccagcaccccgaaaagcctggaggcaaggagaggggaagtagtgcttcccacccgccttccccatccctgttttgcccattctcattccccactcagcccgtcaacctgttcaacattccaggattcacaaatttcagctcttttgctcccggcatgaacttctcaccactctttccttcgaacttcggggacttcagccagaacatctccactcccagtgagcaacagcagcccctggcccagaacagctccggaaagacagagtacatggcttttccaaaaccatttgagagttccagctcgataggggcggaaaagcctcgcaataagaaactccctgaagaggaggtcgagagctccaggacaccatggctttatgagcaggaaggcgaagtagagaaacctttcataaaaacaggctttagcgtgtctgtcgagaaaagcacaagttcaaaccgcaagaaccagctcgacaccaacggccgcagacggcagttcgacgaggaatctctcgaatcattcagctctatgccagaccccgttgacccgacgaccgtaacaaagacgtttaagactaggaaggcttcagcccaggctagtctagcaagcaaggacaagactccaaaatctaaaagtaagaaacgcaatagcacccagctcaagtcgcgggtgaagaatatccgatatgagtcggcaagcatgtcgtcaacttgcgagccctgcaaaagccggaatagacattccgcacagacggaggaacctgtgcaagcaaaggttttcagccggaaaaaccacgagcagctagaaaagattatcaaatgtaaccggtcgaccgaaatctcaagtgagacaggcagcgacttctctatgtttgaggcgcttagagacacaatttatagcgaagtggccaccctgatctctcaaaatgaaagtcggcctcacttcttaatagaactctttcacgagctgcaactgctcaataccgactaccttcgtcagagggccctgtacgccctgcaggacatcgtgtccagacatatatcagagagccatgaaaagggggagaacgtgaagtccgtcaatagtggcacctggatcgctagcaattcggaactgactccttcagaatcactggccactaccgacgatgagacgttcgagaagaacttcgaaagggaaacacataagatatcggagcaaaatgatgccgacaacgcaagcgtgttaagtgtgagctctaactttgaaccctttgctacggacgatttaggtaataccgtgattcatctagaccaagccctggctcggatgcgcgagtacgagaggatgaaaaccgaggcagagtctaactctaatatgcgatgcacatgccgtattatcgaggatggcgacggcgcaggggccggaaccacagtaaacaatctcgaggaaacaccagtgatagagaaccgatcatctcaacaacccgttagtgaggtcagtactattccttgcccccgtattgatacacaacagctggatcggcagatcaaggccattatgaaggaggtgattccctttctcaaggagcacatggacgaagtgtgtagttcccagctgttgacatcagttagacgaatggtgctgacattgacccagcagaacgatgagagtaaggagttcgtgaagttctttcataaacagctcgggtccattctccaagactcactggccaagttcgcaggtcgcaagttgaaggactgcggggaagacttattggtggagatctctgaggtactctttaatgagctggccttcttcaagcttatgcaggaccttgacaacaactcaataacagtgaagcaaaggtgtaaacgtaaaattgaggcaacgggtgtgatccagtcctgcgccaaggaggccaaacggattttggaggatcatggctcacccgctggggagatcgatgacgaggacaaggataaagatgaaacggagactgtgaaacagactcaaacctcagaagtttacgacggtcccaagaatgtgagatccgacatctcggatcaggaggaagatgaggagagtgagggctgccccgtgtctatcaatctctccaaggccgaaactcaggctttgaccaattacggatctggcgaagatgagaacgaggatgaagaaatggaggaattcgaagagggacccgtggacgtccagacatctcttcaggccaacactgaagcaactgaggaaaacgagcacgatgaacaagtgttgcagagagactttaaaaaaacagctgagagcaaaaatgtccccctcgaacgcgaggcaaccagcaagaacgatcagaataactgccccgtcaagccttgttacctaaacatactcgaggacgagcaaccgctgaattctgcagcccataaagagtccccgcccacggttgattccactcagcagccaaaccctctccccctacgactgcctgaaatggagccacttgtgcctcgcgtgaaagaggtaaagtctgcccaggagactccagaatccagccttgccggttcccccgatacagagtccccagtgctcgtgaacgattatgaggcagagtcaggtaatattagtcagaagtccgatgaggaggactttgtgaaggtggaagatttgccgctgaaactcaccatctatagcgaagctgatcttcgcaagaaaatggtggaggaggagcagaaaaatcacctctcaggcgagatttgtgagatgcagacagaggagctggctgggaatagcgagactctcaaagagcctgagacggtgggggcacagtctatctag

SEQ ID NO: 162721 - DNA, 6075 bp, Artificial Sequence
  derived and/or modified sequence
atggccactggaggcggcccctttgaagatggcatgaatgaccaggacctgcccaactggagcaatgaaaatgtggatgaccggctgaacaacatggactggggcgcccagcagaagaaggccaacagaagcagcgagaagaacaagaagaagtttggagtggagagtgacaagagggtgaccaatgacatcagccctgagagcagccctggggtgggcagaagaaggaccaagaccccccacaccttcccccacagccgctacatgagccagatgtctgtgcctgagcaggccgagctggagaagctgaagcagaggatcaacttcagtgacctggaccagaggagcattggaagtgacagccagggccgggccacagctgccaacaacaagaggcagctgtctgagaacaggaagcccttcaacttcctgcccatgcagatcaacaccaacaagagcaaggatgccagcaccaacccccccaaccgggagaccatcggcagcgcccagtgcaaggagctgtttgccagcgccctgagcaatgacctgctgcagaactgccaggtgtctgaggaggatggccgcggggagcccgccatggagagcagccagatcgtgtcccggctggtgcagatccgggactacatcaccaaggccagctccatgagggaggacctggtggagaagaatgaaagaagtgccaacgtggagcggctgacccacctgattgaccacctgaaggagcaggagaagagctacatgaagttcctgaagaagatcctggcccgggacccccagcaggagcccatggaggagattgagaacctgaagaagcagcacgacctgctgaagaggatgctgcagcagcaggagcagctgcgggccctgcagggccggcaggccgccctgctggccctgcagcacaaggccgagcaggccatcgctgtgatggatgacagcgtggtggccgagacagctggcagcctgagcggcgtgtccatcaccagcgagctgaatgaggagctgaatgacctgatccagcgcttccacaaccagctgcgggacagccagcccccagctgtgcctgacaacagacggcaggccgagagcctgagcctgacccgggaggtgtcccagagcaggaagcccagcgccagcgagcggctgcctgatgagaaggtggagctgttcagcaagatgagggtgctgcaggagaagaagcagaagatggacaagctgctgggggagctgcacaccctgcgggaccagcacctgaacaacagcagcagcagcccccagaggtctgtggaccagaggagcaccagcgcccccagcgcctctgtgggcctggcccctgtggtgaatggagagagcaacagcctgaccagctctgtgccctaccccacagccagcctggtgtcccagaatgaaagtgaaaatgaaggccacctgaaccccagcgagaagctgcagaagctgaatgaggtgaggaagaggctgaatgagctgcgggagctggtgcactactatgagcagaccagtgacatgatgacagatgctgtgaatgaaaataggaaggatgaggagacagaggagagtgaatatgattctgaacatgagaacagcgagcctgtgaccaacatccggaacccccaggtggccagcacctggaatgaggtgaacagccacagcaatgcccagtgtgtgagcaacaacagagatggccgcacagtgaacagcaactgtgagatcaacaacagatctgctgccaacatccgggccctgaacatgccacccagcctggactgccgctacaaccgggagggggagcaggagatccacgtggcccagggagaagatgatgaggaggaggaggaggaggccgaggaggagggcgtgtctggggccagcctgagcagccacaggagcagcctggtggatgagcacccagaagatgctgagtttgagcagaagatcaaccggctgatggccgccaagcagaagctgcggcagctgcaggacctggtggccatggtgcaggatgatgatgctgcccagggcgtcatcagcgccagcgccagcaacctggatgacttctacccagctgaggaggacaccaagcagaacagcaacaacaccagaggaaatgccaacaagacccagaaggacaccggggtgaatgagaaggcccgggagaagttctatgaggccaagctgcagcagcagcagcgggagctgaagcagctgcaggaggagaggaagaagctgattgacatccaggagaagatccaggccctgcagacagcctgcccagacctgcagctgtctgctgcctctgtgggcaactgccccaccaagaagtacatgcctgctgtgaccagcacccccaccgtgaaccagcacgagaccagcaccagcaagtctgtgtttgagcctgaggacagcagcatcgtggacaatgagctgtggagcgagatgagaagacatgagatgctgcgggaggagctgcggcagaggaggaagcagctggaggccctgatggccgagcaccagaggcggcagggcctggccgagacagccagccctgtggccgtgtccctgcggagtgatggcagcgagaacctgtgcaccccccagcagagcaggacagagaagaccatggccacctggggcggcagcacccagtgtgccctggatgaggagggagatgaagatggctacctgtctgagggcatcgtgaggacagatgaggaggaggaggaggagcaggatgccagcagcaatgacaacttctctgtgtgccccagcaacagcgtgaaccacaacagctacaacgggaaggagaccaagaaccgctggaagaacaactgccccttcagcgcagatgagaactaccggcccctggccaagacccggcagcagaacatctccatgcagaggcaggagaacctgcgctgggtgtctgagctgtcctatgtggaggagaaggagcagtggcaggagcagatcaaccagctgaagaagcagctggacttctctgtgtccatctgccagaccctgatgcaggaccagcagaccctgagctgcctgctgcagaccctgctgaccggcccctacagcgtgatgcccagcaatgtggccagcccccaggtgcacttcatcatgcaccagctgaaccagtgctacacccagctgacctggcagcagaacaacgtgcagaggctgaagcagatgctgaatgagctgatgaggcagcagaaccagcaccctgagaagccaggcggcaaggagcggggcagcagcgccagccacccccccagccccagcctcttctgccccttctccttccccacccagcctgtgaacctcttcaacatccctggcttcaccaacttcagcagctttgcccctggcatgaacttcagccccctcttccccagcaactttggagacttcagccagaacatcagcacccccagcgagcagcagcagcccctggcccagaacagcagcggcaagacagagtacatggccttccccaagccctttgagagcagcagcagcattggagctgagaagcccaggaacaagaagctgcctgaggaggaggtggagagcagcaggaccccctggctgtatgagcaggagggggaggtggagaagcccttcatcaagacaggcttctctgtgtctgtggagaagagcaccagcagcaacaggaagaaccagctggacaccaatggaagaagacggcagtttgatgaggagagcctggagagcttcagctccatgccagaccctgtggaccccaccaccgtgaccaagaccttcaagaccaggaaggccagcgcccaggccagcctggccagcaaggacaagacccccaagagcaagagcaagaagaggaacagcacccagctgaagagccgggtgaagaacatccgctatgagagcgcctccatgagcagcacctgtgagccctgcaagagcaggaacagacattctgcccagacagaggagcctgtgcaggccaaggtgttcagcaggaagaaccacgagcagctggagaagatcatcaagtgcaacagaagcacagagatcagcagcgagactggaagtgacttctccatgtttgaggccctgcgggacaccatctacagcgaggtggccaccctcatcagccagaatgaaagccggccccacttcctgattgagctgttccacgagctgcagctgctgaacacagactacctgcggcagagggccctgtatgccctgcaggacatcgtgagccgccacatcagcgagagccatgagaagggggagaatgtgaagtctgtgaacagcggcacctggatcgccagcaacagcgagctgacccccagcgagagcctggccaccacagatgatgagacctttgagaagaactttgagcgggagacccacaagatcagcgagcagaatgatgctgacaatgcctctgtgctgtctgtgagcagcaactttgagccctttgccacagatgacctgggcaacacagtcatccacctggaccaggccctggccaggatgagagaatatgaaagaatgaagacagaggccgagagcaacagcaacatgcgctgcacctgccgcatcattgaagatggagatggagctggagctggcaccaccgtgaacaacctggaggagacccctgtgattgaaaatagaagcagccagcagcctgtgtctgaggtgtccaccatcccctgccccagaattgacacccagcagctggaccggcagatcaaggccatcatgaaggaggtgatccccttcctgaaggagcacatggatgaggtgtgcagcagccagctgctgacctctgtgcggaggatggtgctgaccctgacccagcagaatgatgagagcaaggagtttgtgaagttcttccacaagcagctgggcagcatcctgcaggacagcctggccaagtttgctggcaggaagctgaaggactgtggggaggacctgctggtggagatcagcgaggtgctcttcaatgagctggccttcttcaagctgatgcaggacctggacaacaacagcatcaccgtgaagcagcgctgcaagaggaagattgaggccactggagtcatccagagctgtgccaaggaggccaagaggatcctggaggaccacggcagccctgctggggagattgatgatgaggacaaggacaaggatgaaacagaaacagtgaagcagacccagaccagcgaggtgtatgatggccccaagaatgtgcggagtgacatcagtgaccaggaggaggatgaggagagcgagggctgccctgtgtccatcaacctgagcaaggccgagacccaggccctgaccaactacggcagcggggaggatgaaaatgaagatgaggagatggaggagtttgaggagggccctgtggatgtgcagaccagcctgcaggccaacacagaggccacagaagaaaatgaacatgatgagcaggtgctgcagagggacttcaagaagacagctgagagcaagaatgtgcccctggagcgggaggccaccagcaagaatgaccagaacaactgccctgtgaagccctgctacctgaacatcctggaggatgagcagcccctgaacagcgctgcccacaaggagagcccccccaccgtggacagcacccagcagcccaaccccctgcccctgcggctgcctgagatggagcccctggtgccccgggtgaaggaggtgaagagcgcccaggagaccccagagagcagcctggccggcagcccagacacagagagccctgtgctggtgaatgactatgaagctgagagcggcaacatcagccagaagagtgatgaagaagattttgtgaaggtggaggacctgcccctgaagctgaccatctacagcgaggccgacctgaggaagaagatggtggaggaggagcagaagaaccacctgtctggagagatctgtgagatgcagacagaggagctggccggcaacagcgagaccctgaaggagcctgagaccgtgggcgcccagagcatctag

SEQ ID NO: 162722 - DNA, 6075 bp, Artificial Sequence
  derived and/or modified sequence
atggccaccggcggcggccccttcgaggacggcatgaacgaccaggatctacctaattggtctaatgagaacgtggatgaccggctgaataatatggactggggggcacagcagaaaaaggccaatcgctcttccgaaaaaaacaaaaagaaatttggcgttgagagcgacaagcgggtgactaatgacatctccccagagtcctcacctggcgttggaagaaggcggacaaagaccccgcatacctttccccacagtagatatatgagccaaatgtccgtgccagagcaagcagagttagagaaactgaagcagagaatcaacttctctgatttagatcagaggagtataggaagcgattcccagggacgcgccaccgctgccaacaataaacgacaattgagcgagaaccggaagccatttaatttcctgccaatgcagattaacaccaacaaatccaaagacgcctctacaaacccacccaatagagaaacgataggttctgcccaatgtaaagagttgttcgcgtccgccctctctaatgatcttctgcagaactgccaagtttctgaagaggatggaaggggtgagcctgccatggagagctctcaaatcgtttcacgcttggtgcagattagggactacatcacaaaagctagctccatgagggaggacctcgtcgagaagaacgagcggagcgccaacgtggaacgacttacccacctgatagaccacctgaaagaacaggaaaagtcgtacatgaaattcctgaaaaaaatcctagctagggaccctcagcaggagcccatggaggagatagagaatctgaagaaacagcacgaccttctgaagcgaatgctgcagcagcaggaacagctgcgggcactccagggccgacaggcggctctgctggcactgcagcataaagccgaacaggcaatagctgtgatggatgattctgtggtagccgagaccgcaggttctctgagtggcgtcagcattaccagcgagctgaacgaggaattgaatgatctgatccagagattccataaccagttgagagactctcagcccccggccgtgccagataatcgtagacaggcggaatccctatccctgacaagggaggtatcgcaatctcggaagccatctgcgtcagagcgattgcctgacgagaaagtggagcttttttcaaagatgagagttctccaagagaaaaagcagaagatggacaagctcctcggagagctgcataccctgcgggatcagcatcttaataactcctccagttctccacaacgttctgtggatcagaggagcacctctgctccttcggcgtccgttgggctcgcccctgtggtcaatggagaatccaattccctcactagtagtgtgccttatccaaccgccagtcttgtgagccagaacgaaagcgaaaacgaaggacacctgaaccccagcgagaagctgcaaaagctgaacgaagtgaggaagaggcttaatgagttgcgggagctcgtccactactatgagcagacctccgacatgatgaccgatgccgtcaatgaaaatcgtaaagatgaagagaccgaggaatcagagtatgatagtgagcatgaaaatagtgaacccgttaccaatattaggaacccgcaggtggccagtacatggaatgaggtgaatagccactcgaatgcacagtgtgtgtcaaataaccgagacgggaggaccgtgaacagcaactgcgagattaataaccgctcagctgccaacataagggcactgaatatgccacctagcctcgactgtagatacaatagggagggcgagcaggaaattcacgtggcacagggtgaggacgatgaggaagaggaagaagaagctgaagaggaaggggtgtcaggcgcatctttgtccagtcatcgctctagcctggttgacgaacaccccgaagatgcagaattcgagcaaaaaattaacagacttatggctgccaagcagaaactgagacagttgcaagatctcgttgccatggttcaggatgacgacgccgcacaaggcgtgattagtgctagtgcaagcaatcttgacgacttttacccggctgaagaagacaccaaacagaatagcaacaacaccagaggaaacgccaacaaaacccaaaaggacaccggcgtgaatgaaaaggccagagaaaagttttacgaggccaaactgcagcagcagcagcgtgagctcaaacaattacaggaggaacgaaaaaagctcattgatatacaggagaagatccaagccctgcagaccgcctgcccagatctgcagctcagcgctgccagcgtggggaattgccctacaaaaaagtatatgccagcagtcacaagtacccccactgttaaccagcacgagacaagcacgagcaaaagcgtatttgagccggaggacagttcaattgtcgataatgagctgtggagtgaaatgcggcgacatgagatgctgagggaagaattaaggcagcgtcgtaaacagttggaggctctcatggccgaacatcaaaggaggcagggactagctgagaccgccagccccgtcgcggtatctctgcggtccgatgggagcgagaatctatgcacgcctcaacagtcccggacagaaaagacaatggcaacctggggcggctccactcagtgcgctctcgatgaagagggcgacgaagacgggtatcttagcgaaggaattgtgcggacagacgaggaagaagaagaggagcaggacgcctctagtaacgacaacttctcagtttgcccgagtaactcagtgaatcataacagttacaatggcaaggagactaagaacagatggaagaacaattgtccgtttagcgcagacgaaaactatagacccttggctaagactaggcaacaaaatatttcaatgcagagacaggaaaatctcaggtgggtttcagagctaagctatgtagaggagaaggagcagtggcaggagcagataaatcagctgaagaaacaactggatttctccgtttctatttgtcagaccctaatgcaggatcaacagaccctcagctgtcttcttcagaccctcctcacaggcccctactccgtgatgccgtcaaatgttgcctctccacaggtgcacttcatcatgcaccaattgaatcagtgctatacccagctgacgtggcagcaaaataatgtgcaaagactgaagcaaatgctcaatgagctgatgcggcagcagaaccaacacccagaaaagcctggtggaaaagaacggggctctagtgcctcacacccccctagcccctcccttttttgcccctttagtttccctactcagcctgtgaatctttttaatattcctggcttcacgaactttagcagcttcgcgcctgggatgaatttctcccccctttttccatccaatttcggagacttctctcagaatatatccactccttctgaacagcagcagccacttgctcagaatagttccgggaaaacggaatatatggcatttccgaagccattcgaatcgagctctagcataggggccgaaaaaccaaggaacaaaaagctgccagaagaagaggtcgagagttcccgcacaccctggctctatgagcaagaaggggaagtggagaagccctttatcaagacgggttttagcgtgtcggttgaaaagtccacatctagcaatcggaagaaccagcttgataccaacgggcggcggaggcagtttgacgaagagtctctggagtccttctcatccatgcccgaccccgtggatcccaccaccgtcactaagaccttcaagactcgcaaagccagcgcacaggcatctctggccagcaaagacaagactcctaaaagtaaaagcaaaaaacgcaatagcacacaactcaaatcacgtgtcaagaatatacgatatgaatcagcttcaatgtcttctacatgtgagccttgcaagtcgcggaataggcattcagcccaaactgaggaacctgtgcaggctaaggtgttcagtcgcaagaaccatgagcagctcgaaaagattattaagtgcaacaggagcactgagatcagctctgagacggggtctgacttttcaatgttcgaggcactgcgcgataccatatactccgaagtcgccacccttataagccaaaacgaaagcaggcctcatttcctgatagagctgttccacgagcttcagttgctgaacactgattatctgcgccagcgggccctctacgcactccaagacatcgttagccgacacatttccgaaagccatgaaaagggcgagaatgtcaagagtgtgaactctgggacatggattgccagtaacagtgagctgaccccaagcgagtccctcgcaacaacagacgatgagacatttgagaaaaactttgaaagggaaactcataagattagtgagcagaatgatgcagacaacgccagcgtgctgagcgtgtcctccaattttgagccattcgccactgatgacctcggcaacaccgtgattcacctggaccaggcactcgctcggatgcgcgagtacgaaagaatgaagacagaggccgaaagcaattccaacatgcggtgtacttgtcgaataatcgaggacggggacggcgctggggccggaaccaccgtgaataatctggaagagacccccgtgatcgaaaaccgctccagccaacagccagtgtccgaggtctcaaccattccgtgtccccgaattgacactcagcagttggatcgtcaaatcaaggctataatgaaggaagttatccctttcttaaaggaacatatggacgaagtctgctcctcccagctgctcacttcggtgcgccgcatggtcctgacccttacccagcagaacgatgaatctaaggagttcgtcaaattctttcacaagcagcttggtagcatccttcaagattctttagcgaagttcgctggaaggaaactgaaagactgtggagaggacttgcttgtggagatctccgaagtcctatttaacgaactcgccttctttaaactcatgcaggacttggacaataatagcatcaccgtcaagcagcgatgtaaaaggaaaatcgaggctacaggcgtgattcagtcttgtgcaaaggaagctaaacgaattctggaagatcacggcagtcccgccggcgaaattgacgatgaggataaggacaaggatgaaacagaaacagtgaagcagactcaaacctccgaagtctatgacggacccaaaaatgtacgctctgacattagcgaccaggaagaagacgaggaaagtgagggatgtccagtaagcataaatctcagcaaggcggagacgcaggcactcaccaactatggatctggagaggatgaaaacgaagacgaagaaatggaggaatttgaggaaggcccggttgacgtacagactagtctgcaggctaataccgaggctaccgaagaaaatgaacacgatgagcaggtgcttcagcgagattttaagaagaccgccgaatcaaaaaatgtgccgctcgaaagagaggctaccagcaagaatgaccagaataattgccccgtgaaaccttgctacctgaacatcttagaagacgagcaacccttgaatagtgccgcccataaggaatcaccgccaactgtggattccacacaacagcctaatccccttccgctgcgacttcctgagatggagccactagtcccccgagtgaaagaagtcaagtccgcgcaagaaacccctgaaagttctctggccgggtctccggacacagagagccctgttctggtgaacgactatgaggccgagtcaggaaatatcagccaaaagtccgatgaagaggacttcgtcaaggtggaagacctacctctgaagctcacaatatattcagaggccgacctgcggaagaaaatggtagaggaagagcaaaaaaatcacctcagcggcgaaatatgtgaaatgcagacggaggagttggccggaaactctgaaactttgaaagagcctgagactgttggcgcccagagcatttag

SEQ ID NO: 162723 - DNA, 6820 bp, Artificial Sequence
  derived and/or modified sequence
tccggcgggtcacatgactccagtctagctcgcattgcggctcccgcccgggcgagttctcgcccccgcgcggccgttgccgaggagacggcgcatgtcccgccgcgcgttgccccctctgcagtacccccgcccctcttctcccaccacaatgagatcctaagatggcggtggctgcggcggttggcgctgcgtagctgaggtcgaaaaggcggccactggggccgaggcagccaggaaacgtgtgggcctctctgctgcggtctccgagggccgaccgctgccggcggcgggtcgtgggggctgactgtcgctctgcctttgacaggagaggctgcttcttgtagaggaaacagctttgaagtgtggagcgggaaaggagcagtttctgagctgcaaaaactagtttctaaacagagagttaattgttaaatccagtatggccacaggaggaggtccctttgaagatggcatgaatgatcaggatttaccaaactggagtaatgagaatgttgatgacaggctcaacaatatggattggggtgcccaacagaagaaagcaaatagatcatcagaaaagaataagaaaaagtttggtgtagaaagtgataaaagagtaaccaatgatatttctccggagtcgtcaccaggagttggaaggcgaagaacaaagactccacatacgttcccacacagtagatacatgagtcagatgtctgtcccagagcaggcagaattagagaaactgaaacagcggataaacttcagtgatttagatcagagaagcattggaagtgattcccaaggtagagcaacagctgctaacaacaaacgtcagcttagtgaaaaccgaaagcccttcaactttttgcctatgcagattaatactaacaagagcaaagatgcatctacaaaccccccaaacagagaaacgattggatcagcacagtgtaaagagttgtttgcttctgctttaagtaatgacctcttgcaaaactgtcaggtgtctgaagaagatgggaggggagaacctgcaatggagagcagccagattgtaagcaggcttgttcaaattcgcgattatattactaaagctagttccatgcgggaagatcttgtagagaaaaatgagagatctgctaatgttgagcgccttactcatctaatagatcaccttaaagaacaagagaagtcatatatgaaatttcttaaaaaaatccttgccagagatcctcagcaggagcctatggaagagatagaaaatttgaagaaacaacatgatttattaaaaagaatgttacaacagcaggagcaactaagagctctacagggacggcaggctgcacttctagctctgcaacataaagcagagcaagctattgcagtgatggatgattctgttgttgcagaaactgcaggtagcttatctggcgtcagtatcacatctgaactaaatgaagaattgaatgacttaattcagcgttttcataatcagcttcgtgattctcagcctccagctgttccagacaatagaagacaggcagaaagtctttcattaactagggaggtttcccagagcaggaaaccatcagcttcagaacgtttacctgatgagaaagtcgaactttttagcaaaatgagagtgctacaggaaaagaaacaaaaaatggacaaattgcttggagaacttcatacacttcgagatcagcatcttaacaattcatcatcctctccacaaaggagtgtcgatcagagaagtacttcagctccctctgcttctgtaggcttggcaccggttgtcaatggagaatccaatagcctcacatcatctgttccttatcctactgcttctctagtatctcagaatgagagtgaaaacgaaggccacctcaatccatctgaaaaactccagaagttaaatgaagttcgaaagagattgaatgagctaagagaattagttcattattatgaacaaacgtcagacatgatgacagatgctgtgaatgaaaacaggaaagatgaagaaactgaagagtcagaatatgattctgagcatgaaaattccgagcctgttactaacattcgaaatccacaagtagcttccacttggaatgaagtaaatagtcatagtaatgcacagtgtgtttctaataatagagatgggcgaacagttaattctaattgtgaaattaacaacagatctgctgccaacataagggctctaaacatgcctccttctttagattgtcgatataatagagaaggggaacaggagattcatgttgcacaaggtgaagatgatgaggaggaggaggaagaagcagaagaggagggagtcagtggagcttcattatctagtcacaggagcagtctggttgatgagcatccagaagatgctgaatttgaacagaagatcaaccgacttatggctgcaaaacagaaacttagacagttacaagatcttgttgctatggtacaggatgatgatgcagctcaaggagttatctctgccagtgcatcaaatttggatgatttctacccagcagaagaagacaccaagcaaaattcaaataacactagaggaaatgccaataaaacacagaaagatactggagtaaatgaaaaggcaagagagaaattttatgaggctaaactacagcagcaacagagagagctaaaacaattgcaggaagaaagaaagaaactgattgacattcaggagaaaattcaagcattgcaaacggcatgccctgacttacagctgtcagctgctagtgtgggtaactgtcccaccaaaaaatatatgccagctgttacttcaaccccaactgttaatcaacacgagaccagtacaagcaaatctgtttttgagcctgaagattcttcaatagtagataatgagttgtggtcagaaatgagaagacatgaaatgttgagggaggagctgcgacagagaagaaagcagcttgaagctctgatggctgaacatcagaggaggcaaggtctagctgaaactgcatctccagtggctgtgtcattgagaagtgatggatctgagaacctatgtactcctcagcaaagtagaacagaaaaaacgatggcaacttggggagggtctacccagtgtgcactagatgaagaaggagatgaagacggttacctttctgaaggaattgttcggacagatgaagaggaggaagaagagcaagatgccagttccaatgataacttttctgtgtgtccttctaacagtgtgaatcataactcctacaatggaaaggaaactaaaaataggtggaagaacaattgccctttttcggcagatgaaaattatcgtcctttagccaagacaaggcaacagaatatcagcatgcaacggcaagaaaaccttcgttgggtgtcagagctctcttacgtagaagagaaagaacaatggcaagaacaaatcaatcagctaaagaaacagcttgattttagtgtcagtatttgtcagactttgatgcaagaccagcagactctatcttgtctgctacaaactcttctcacgggtccttacagtgttatgcccagcaatgttgcatctcctcaagtacacttcataatgcaccagttgaaccagtgctatactcagctaacatggcaacagaataatgttcagaggttgaaacaaatgctaaatgaacttatgcgccagcaaaatcagcatccagaaaaacctggaggcaaggaaagaggcagtagtgcatcgcaccctccttctcccagtttattttgtcctttcagctttccaacacagcctgtaaatctcttcaatatacctggatttactaacttttcatcatttgcaccaggtatgaatttcagccctttatttccttctaattttggagatttttctcagaatatctctacacccagtgaacagcagcaacccttagcccagaattcttcaggaaaaacagaatatatggcttttccaaaaccttttgaaagcagttcctctattggagcagagaaaccaaggaataaaaaactgcctgaagaggaggtggaaagcagtaggacaccatggttatatgaacaagaaggtgaagtagagaaaccatttatcaagactggattttcagtgtctgtagaaaaatctacaagtagtaaccgcaaaaatcaattagatacaaacggaagaagacgccagtttgatgaagaatcactggaaagctttagcagtatgcctgatccagtagatccaacaacagtgactaaaacattcaagacaagaaaagcgtctgcacaggccagcctggcatctaaagataaaactcccaagtcaaaaagtaagaagaggaattctactcagctgaaaagcagagttaaaaacatcaggtatgaaagtgccagtatgtctagcacatgtgaaccttgcaaaagtaggaacagacattcagcccagactgaagagcctgttcaagcaaaagtattcagcagaaagaatcatgagcaactggaaaaaataataaaatgtaataggtctacagaaatatcttcagaaactgggagtgatttttccatgtttgaagctttgcgagatactatttattctgaagtagctacattaatttctcaaaatgaatctcgtccacattttcttattgaactcttccatgagctgcagctactaaacacagactacttgagacagagggctttatatgcattgcaggacatagtatccagacatatttctgagagccatgaaaaaggagaaaatgtaaagtcagtaaactctggtacttggatagcatcaaactcagaacttactcctagtgagagccttgctactactgatgatgaaacttttgagaagaactttgaaagagaaacccataaaataagtgagcaaaatgatgctgataatgctagtgtcctgtctgtatcatcaaattttgagccttttgcaacagatgatctaggtaacaccgtgattcacttagatcaagcattagccagaatgagagaatatgagcgtatgaagactgaggctgaaagtaactcaaatatgagatgcacctgcaggattattgaggatggagatggtgctggtgcaggtactacagttaataatttagaagaaactcccgttattgaaaatcgtagttcacaacaacctgtaagtgaagtttctaccatcccatgtcctagaattgatactcagcagctggaccggcaaattaaagcaattatgaaagaagtcattccttttttgaaggagcacatggatgaagtatgctcctcgcagcttctaacttcagtaaggcgcatggttttgacccttacccagcaaaatgatgagagcaaagagtttgtaaagttctttcataaacaacttggaagtatattacaggattcactggcaaaatttgctggcagaaaactgaaagactgtggagaagatcttcttgtagagatatctgaagtgttgttcaatgaattggctttctttaagcttatgcaagatttggataataatagtataactgttaaacagagatgcaaaaggaaaatagaagcaactggagtgatacaatcttgtgccaaagaggctaaaaggattcttgaagatcatggctcacctgctggagagattgatgatgaagacaaagacaaggatgaaactgaaacagttaagcagactcaaacatctgaggtgtatgatggtcccaaaaatgtaagatctgatatttctgatcaagaggaagatgaagaaagtgaaggatgtccagtgtctattaatttgtctaaagctgaaactcaggctttaactaattatggaagtggagaagatgaaaatgaggatgaagaaatggaagaatttgaagaaggccctgtggatgtccagacttccctccaggctaacactgaagctactgaagaaaatgaacatgatgaacaggtcctacaacgtgactttaaaaagacagcagaaagcaaaaatgtcccattggaacgagaagccactagtaaaaatgaccaaaataactgtcctgtgaaaccctgttacctcaatatcttggaagatgagcaacctttaaatagtgctgcccataaggagtcacctcctactgttgattcaactcaacagcctaaccctttgccgttacgtttacctgaaatggaacccttagtgcctagagtcaaagaagttaaatctgctcaggaaactcctgaaagctctctggctggaagtcctgatactgaatctccagtgttagtgaatgactatgaagcagaatctggtaatataagtcaaaagtctgatgaagaagattttgtaaaagttgaagatttaccactgaaactgacaatatattcagaggcagatctaagaaagaaaatggtagaagaagaacagaaaaaccatttatctggtgaaatatgtgaaatgcagaccgaagaattagctggaaattctgagacactaaaagaacctgaaacggtgggagcccagagtatatgagatgtcttcagaggctcatctaactctgtccttacatactcaatgcatatatgaaaacaatactaaataaacatctgatctgtataaaaatgtaaattagtttgacactgcttttttgataggtgtggtcatttctccccatggtagtttaaaacatcagaaactgaattctggacagatttaagccttgacacactgtgtttttttttttttcccccttcttttttgggtcttcatttttttccccattgtgatgtttggtaacgaatttaaaatgtagttttaaataaagtttggacttatcta

SEQ ID NO: 162724 - DNA, 6074 bp, Artificial Sequence
  derived and/or modified sequence
atggcgaccggcggtgggccatttgaagatggaatgaacgatcaggatctgcctaattggagcaatgagaatgttgacgaccggctgaataacatggattggggtgcccagcagaaaaaggcaaaccgatcgtcggagaaaaacaagaagaaatttggagtcgagtccgacaaaagggtaacaaacgacatttccccagagtcgagtccaggagtagggagaaggcggacaaagacaccacacacctttcctcattctcggtacatgtcacagatgtccgtgcctgaacaggctgagttagaaaagctgaagcagcgcatcaactttagcgacttagaccagcggtcaatcggatcggattctcaggggagggctaccgccgcaaacaacaaacgccagctgtccgaaaacagaaagccctttaattttcttccgatgcagatcaacactaacaaatccaaggatgcctccacaaacccccctaacagggaaaccattggctctgcccagtgtaaggagttgtttgcttctgccctctctaatgacctgctgcagaattgccaggtatccgaagaggatgggcgaggagaacctgcaatggaatcctctcaaattgtgtcccgattggtccagattagagactacatcactaaggcctcctccatgcgggaagacctggtggaaaagaacgagcgcagcgctaacgtagaaaggctcacccatctcatcgatcaccttaaggagcaggagaagtcatacatgaaatttttgaagaaaatcctcgcacgtgacccgcagcaggaacccatggaagaaatcgagaatctgaaaaaacagcacgacctcctgaagaggatgctgcagcagcaggaacagctcagggccctccagggaaggcaggccgcacttctagccctccaacataaggcggagcaggccattgctgtcatggatgattctgtcgttgccgaaaccgccggttccctttccggtgtgtcaataacctctgagctaaatgaagagctgaatgacctaattcagcgttttcacaaccagctccgggactctcaacctcccgctgtcccagacaaccggaggcaagcggagtctctgagtctgacccgcgaagtgtctcagtctcgaaagccgtctgcaagtgagagactccctgatgaaaaagtggagctgttcagtaaaatgcgggttcttcaagagaaaaaacagaaaatggacaaattactgggagaactgcacaccctccgcgatcagcaccttaataatagcagttcttcacctcagcgtagtgtcgatcagagatctaccagtgcaccttccgcgtcagtcgggctagctcccgtggtaaacggagaatctaactctctgacaagtagcgtgccctatccaaccgccagcctcgtttcccagaacgagagtgagaatgaagggcatttgaatccctcagagaaactgcagaaactgaatgaagtgcgtaagaggctgaacgagctgagggaactggtgcattattacgagcagacctcggacatgatgacagatgccgtgaacgaaaacaggaaggacgaggagacggaggagtctgagtacgacagcgagcatgagaattcagaaccagtgaccaatattaggaatccccaggtggcgtccacatggaacgaagtcaactcgcattccaatgcgcaatgcgtttccaacaacagagacggtcggactgtgaattcaaactgtgaaatcaataatcgctcggcggcaaacatccgggctctgaacatgcctccttcgctggactgccgatacaatagggagggggaacaggagatccacgtcgcacagggcgaagacgatgaagaggaagaagaggaggcggaagaggaaggggtctctggggcatcacttagtagccaccggtcttccctcgtagacgagcatccagaggatgcagagttcgaacagaaaatcaatagactgatggccgcaaagcagaaactacgacagctgcaggacctggttgcaatggtccaggatgatgatgcggctcagggggtgatctctgcgtccgccagtaacctcgacgatttttatcccgctgaggaagacaccaagcagaactccaataatacacggggaaacgcaaacaaaacccagaaagacacaggagtgaatgagaaagccagagagaagttttacgaagccaagctgcaacagcagcaaagagagctgaaacaactccaagaggagcgcaaaaaattgatagatatccaagagaagatccaagcacttcagaccgcttgtcccgatctacaactctccgccgcttccgtcggcaactgccctacgaagaagtatatgcctgctgtcaccagcaccccaacggttaaccagcacgaaacatctacgagcaaaagcgtctttgagcccgaggattcaagcatcgtggacaacgaactttggtccgagatgaggagacacgaaatgctgcgagaggagctacgccaacgaagaaagcaactggaggctcttatggcagagcaccaacgtcgtcaaggcttagctgagacggccagcccagtcgctgtgtccctcagatcagatgggtccgaaaatctgtgtactccccagcagagtaggactgagaaaaccatggcaacctggggcggatcaacacagtgcgccctggacgaggaaggtgacgaagatgggtatctctctgaggggatagtgaggacagacgaggaggaggaagaggagcaggatgccagctcaaatgataacttttcagtgtgtccctccaactccgtgaaccataacagttataacggtaaggaaacaaaaaatcgatggaaaaataactgtccgttctccgctgacgagaactaccggcctctggccaagacccgacagcagaacatcagcatgcagcggcaggagaatctccgttgggtgtccgaactgtcatacgtagaggaaaaagagcaatggcaagaacagataaatcagctgaagaaacagttggatttcagcgtctccatatgtcagacactcatgcaggatcagcagaccttgagctgtctccttcaaaccctcttaacagggccatattctgtcatgccctcaaatgttgcaagcccgcaagtacatttcataatgcatcagctgaatcagtgttatacccagctcacctggcagcagaataacgtgcagagattgaagcagatgctgaacgaactcatgagacagcagaaccagcatcccgaaaaaccaggaggcaaagagagaggcagctccgcaagccatcctccctcacctagcctcttctgcccttttagcttcccaacacaacctgtgaacctattcaacattcccggattcaccaatttttcctctttcgcgcctgggatgaacttctcgcccctcttcccaagcaattttggtgatttctctcaaaacatttctacaccctctgagcaacagcaacccttagcccaaaacagttccggtaagacagaatacatggcgtttccaaagcctttcgagtcctccagctctataggcgcagagaagcccagaaataaaaaactgccggaggaggaagtcgaatcttctcggaccccctggctgtacgagcaagaaggcgaagttgaaaagcccttcatcaaaactggattttccgtgtctgttgaaaaatctactagctccaacagaaagaaccagctggacaccaatggcagaagacgtcagttcgacgaagaatccttggagagcttcagctcgatgcctgaccctgtggatcccactactgtcacaaaaacgttcaagacacgaaaggcttctgcccaggcatcacttgcttcgaaagataagaccccaaagtccaagagcaaaaagcgaaattccacacagctcaagtccagggtgaaaaatattcggtacgagagtgcttcaatgtcctccacgtgcgagccttgtaaatcccggaatcgtcacagtgctcagactgaagaaccagtccaggccaaggtgttctcaaggaagaaccacgagcagcttgaaaagatcataaaatgcaatcgctcaacagagatttcaagcgagaccgggagcgacttcagcatgttcgaagcgctccgcgacaccatctactcagaggtggctacccttataagccagaatgagtctagaccccacttcctgatcgagctgttccacgaactccagctgctgaatacagattacttgcgtcagcgggcactatacgccctgcaggacattgtatccagacacatttctgagagccacgagaaaggcgagaacgtgaaatctgtaaattctggcacgtggattgcatccaattccgaattgacaccatccgaaagccttgccaccacggatgatgagacatttgaaaaaaatttcgagcgtgagacccacaaaatttcagaacagaatgacgctgataacgccagcgtgctgtcagtttcttccaacttcgaacccttcgctactgacgatctgggtaacaccgtgatacatctcgaccaggccctcgcaaggatgcgcgaatatgagcgaatgaagaccgaagcagaaagcaattcgaatatgcggtgtacctgtcgtatcatagaagacggcgacggcgcaggcgctggaaccacagtgaataacttggaggaaacgcctgtgatcgaaaacaggagcagccaacagcccgtgtctgaagtgtccactatcccgtgcccgcgaattgatactcagcagcttgatagacagatcaaggcaattatgaaagaggtaattcctttcctgaaagaacatatggatgaggtgtgcagttcccaactcctgacatctgtcaggaggatggtgctgacgttgacccagcagaatgatgaaagcaaggagtttgttaagttcttccataaacagctagggagtattctacaggattccctggcaaagtttgccggtcgtaagttgaaagactgcggagaagaccttcttgtagaaataagcgaggtgctgttcaacgagctcgcctttttcaagttgatgcaagatctcgacaacaattctattacagtcaaacagagatgcaagagaaagatcgaagccaccggcgttatccaatcctgtgcaaaagaagccaagagaattctagaagatcacggatcccctgctggggaaatcgatgatgaagataaagacaaagacgagacagagacggttaaacagacacagacttcagaagtgtatgatgggcctaaaaatgtgagatccgacatctctgaccaggaagaggatgaagagagcgaaggatgtcccgtcagcataaaccttagcaaagccgaaacccaggcactgacaaattacggaagcggcgaggatgagaacgaggacgaagagatggaggaattcgaggagggccctgtagacgtgcagaccagcctgcaagcaaacaccgaggctacagaagagaatgagcatgacgagcaggtgctgcagagggactttaagaagactgctgaatcgaaaaatgtgcccctggagcgcgaagccacctccaagaacgaccaaaacaattgtccggtgaaaccctgttatctgaatattttagaagatgaacagcccttaaattccgctgcacataaggagtcccctccgaccgtcgattccactcagcagcctaaccccctcccattacggcttcccgaaatggagccattggtgccccgagttaaagaggtgaagtcagcacaagaaaccccagaaagttctctggccggatccccggacacggagtcaccagttctggtgaatgattatgaagctgaatctgggaacattagccaaaagtctgatgaagaggattttgtcaaagtcgaggatcttcccttgaaactgactatctatagtgaagccgacctgcgtaagaagatggtggaggaggaacaaaagaaccatctctccggggaaatctgtgagatgcaaactgaggaactggctgggaatagcgaaacactgaaggagccggagactgtcggtgcccagagtatcta

SEQ ID NO: 162725 - DNA, 6075 bp, Artificial Sequence
  derived and/or modified sequence
atggccaccggcggcggccccttcgaggacggcatgaacgaccaggacctgcccaactggagcaacgagaacgtggacgacagactgaacaacatggactggggcgcccagcagaagaaggccaacagaagcagcgagaagaacaagaagaagttcggcgtggagagcgacaagagagtgaccaacgacatcagccccgagagcagccccggcgtgggcagaagaagaaccaagaccccccacaccttcccccacagcagatacatgagccagatgagcgtgcccgagcaggccgagctggagaagctgaagcagagaatcaacttcagcgacctggaccagagaagcatcggcagcgacagccagggcagagccaccgccgccaacaacaagagacagctgagcgagaacagaaagcccttcaacttcctgcccatgcagatcaacaccaacaagagcaaggacgccagcaccaacccccccaacagagagaccatcggcagcgcccagtgcaaggagctgttcgccagcgccctgagcaacgacctgctgcagaactgccaggtgagcgaggaggacggcagaggcgagcccgccatggagagcagccagatcgtgagcagactggtgcagatcagagactacatcaccaaggccagcagcatgagagaggacctggtggagaagaacgagagaagcgccaacgtggagagactgacccacctgatcgaccacctgaaggagcaggagaagagctacatgaagttcctgaagaagatcctggccagagacccccagcaggagcccatggaggagatcgagaacctgaagaagcagcacgacctgctgaagagaatgctgcagcagcaggagcagctgagagccctgcagggcagacaggccgccctgctggccctgcagcacaaggccgagcaggccatcgccgtgatggacgacagcgtggtggccgagaccgccggcagcctgagcggcgtgagcatcaccagcgagctgaacgaggagctgaacgacctgatccagagattccacaaccagctgagagacagccagccccccgccgtgcccgacaacagaagacaggccgagagcctgagcctgaccagagaggtgagccagagcagaaagcccagcgccagcgagagactgcccgacgagaaggtggagctgttcagcaagatgagagtgctgcaggagaagaagcagaagatggacaagctgctgggcgagctgcacaccctgagagaccagcacctgaacaacagcagcagcagcccccagagaagcgtggaccagagaagcaccagcgcccccagcgccagcgtgggcctggcccccgtggtgaacggcgagagcaacagcctgaccagcagcgtgccctaccccaccgccagcctggtgagccagaacgagagcgagaacgagggccacctgaaccccagcgagaagctgcagaagctgaacgaggtgagaaagagactgaacgagctgagagagctggtgcactactacgagcagaccagcgacatgatgaccgacgccgtgaacgagaacagaaaggacgaggagaccgaggagagcgagtacgacagcgagcacgagaacagcgagcccgtgaccaacatcagaaacccccaggtggccagcacctggaacgaggtgaacagccacagcaacgcccagtgcgtgagcaacaacagagacggcagaaccgtgaacagcaactgcgagatcaacaacagaagcgccgccaacatcagagccctgaacatgccccccagcctggactgcagatacaacagagagggcgagcaggagatccacgtggcccagggcgaggacgacgaggaggaggaggaggaggccgaggaggagggcgtgagcggcgccagcctgagcagccacagaagcagcctggtggacgagcaccccgaggacgccgagttcgagcagaagatcaacagactgatggccgccaagcagaagctgagacagctgcaggacctggtggccatggtgcaggacgacgacgccgcccagggcgtgatcagcgccagcgccagcaacctggacgacttctaccccgccgaggaggacaccaagcagaacagcaacaacaccagaggcaacgccaacaagacccagaaggacaccggcgtgaacgagaaggccagagagaagttctacgaggccaagctgcagcagcagcagagagagctgaagcagctgcaggaggagagaaagaagctgatcgacatccaggagaagatccaggccctgcagaccgcctgccccgacctgcagctgagcgccgccagcgtgggcaactgccccaccaagaagtacatgcccgccgtgaccagcacccccaccgtgaaccagcacgagaccagcaccagcaagagcgtgttcgagcccgaggacagcagcatcgtggacaacgagctgtggagcgagatgagaagacacgagatgctgagagaggagctgagacagagaagaaagcagctggaggccctgatggccgagcaccagagaagacagggcctggccgagaccgccagccccgtggccgtgagcctgagaagcgacggcagcgagaacctgtgcaccccccagcagagcagaaccgagaagaccatggccacctggggcggcagcacccagtgcgccctggacgaggagggcgacgaggacggctacctgagcgagggcatcgtgagaaccgacgaggaggaggaggaggagcaggacgccagcagcaacgacaacttcagcgtgtgccccagcaacagcgtgaaccacaacagctacaacggcaaggagaccaagaacagatggaagaacaactgccccttcagcgccgacgagaactacagacccctggccaagaccagacagcagaacatcagcatgcagagacaggagaacctgagatgggtgagcgagctgagctacgtggaggagaaggagcagtggcaggagcagatcaaccagctgaagaagcagctggacttcagcgtgagcatctgccagaccctgatgcaggaccagcagaccctgagctgcctgctgcagaccctgctgaccggcccctacagcgtgatgcccagcaacgtggccagcccccaggtgcacttcatcatgcaccagctgaaccagtgctacacccagctgacctggcagcagaacaacgtgcagagactgaagcagatgctgaacgagctgatgagacagcagaaccagcaccccgagaagcccggcggcaaggagagaggcagcagcgccagccacccccccagccccagcctgttctgccccttcagcttccccacccagcccgtgaacctgttcaacatccccggcttcaccaacttcagcagcttcgcccccggcatgaacttcagccccctgttccccagcaacttcggcgacttcagccagaacatcagcacccccagcgagcagcagcagcccctggcccagaacagcagcggcaagaccgagtacatggccttccccaagcccttcgagagcagcagcagcatcggcgccgagaagcccagaaacaagaagctgcccgaggaggaggtggagagcagcagaaccccctggctgtacgagcaggagggcgaggtggagaagcccttcatcaagaccggcttcagcgtgagcgtggagaagagcaccagcagcaacagaaagaaccagctggacaccaacggcagaagaagacagttcgacgaggagagcctggagagcttcagcagcatgcccgaccccgtggaccccaccaccgtgaccaagaccttcaagaccagaaaggccagcgcccaggccagcctggccagcaaggacaagacccccaagagcaagagcaagaagagaaacagcacccagctgaagagcagagtgaagaacatcagatacgagagcgccagcatgagcagcacctgcgagccctgcaagagcagaaacagacacagcgcccagaccgaggagcccgtgcaggccaaggtgttcagcagaaagaaccacgagcagctggagaagatcatcaagtgcaacagaagcaccgagatcagcagcgagaccggcagcgacttcagcatgttcgaggccctgagagacaccatctacagcgaggtggccaccctgatcagccagaacgagagcagaccccacttcctgatcgagctgttccacgagctgcagctgctgaacaccgactacctgagacagagagccctgtacgccctgcaggacatcgtgagcagacacatcagcgagagccacgagaagggcgagaacgtgaagagcgtgaacagcggcacctggatcgccagcaacagcgagctgacccccagcgagagcctggccaccaccgacgacgagaccttcgagaagaacttcgagagagagacccacaagatcagcgagcagaacgacgccgacaacgccagcgtgctgagcgtgagcagcaacttcgagcccttcgccaccgacgacctgggcaacaccgtgatccacctggaccaggccctggccagaatgagagagtacgagagaatgaagaccgaggccgagagcaacagcaacatgagatgcacctgcagaatcatcgaggacggcgacggcgccggcgccggcaccaccgtgaacaacctggaggagacccccgtgatcgagaacagaagcagccagcagcccgtgagcgaggtgagcaccatcccctgccccagaatcgacacccagcagctggacagacagatcaaggccatcatgaaggaggtgatccccttcctgaaggagcacatggacgaggtgtgcagcagccagctgctgaccagcgtgagaagaatggtgctgaccctgacccagcagaacgacgagagcaaggagttcgtgaagttcttccacaagcagctgggcagcatcctgcaggacagcctggccaagttcgccggcagaaagctgaaggactgcggcgaggacctgctggtggagatcagcgaggtgctgttcaacgagctggccttcttcaagctgatgcaggacctggacaacaacagcatcaccgtgaagcagagatgcaagagaaagatcgaggccaccggcgtgatccagagctgcgccaaggaggccaagagaatcctggaggaccacggcagccccgccggcgagatcgacgacgaggacaaggacaaggacgagaccgagaccgtgaagcagacccagaccagcgaggtgtacgacggccccaagaacgtgagaagcgacatcagcgaccaggaggaggacgaggagagcgagggctgccccgtgagcatcaacctgagcaaggccgagacccaggccctgaccaactacggcagcggcgaggacgagaacgaggacgaggagatggaggagttcgaggagggccccgtggacgtgcagaccagcctgcaggccaacaccgaggccaccgaggagaacgagcacgacgagcaggtgctgcagagagacttcaagaagaccgccgagagcaagaacgtgcccctggagagagaggccaccagcaagaacgaccagaacaactgccccgtgaagccctgctacctgaacatcctggaggacgagcagcccctgaacagcgccgcccacaaggagagcccccccaccgtggacagcacccagcagcccaaccccctgcccctgagactgcccgagatggagcccctggtgcccagagtgaaggaggtgaagagcgcccaggagacccccgagagcagcctggccggcagccccgacaccgagagccccgtgctggtgaacgactacgaggccgagagcggcaacatcagccagaagagcgacgaggaggacttcgtgaaggtggaggacctgcccctgaagctgaccatctacagcgaggccgacctgagaaagaagatggtggaggaggagcagaagaaccacctgagcggcgagatctgcgagatgcagaccgaggagctggccggcaacagcgagaccctgaaggagcccgagaccgtgggcgcccagagcatctag

SEQ ID NO: 162726 - protein, 62 aa, Artificial Sequence
  derived and/or modified sequence
MSERQGAGATNGKDKTSGENDGQKKVQEEFDIDMDAPETERAAVAIQSQFRKFQKKKAGSQS

SEQ ID NO: 162727 - DNA, 189 bp, Artificial Sequence
  derived and/or modified sequence
atgagtgagaggcaaggagcaggtgccaccaacggtaaggataagactagcggcgagaacgatggacagaagaaagtccaggaggaatttgatattgacatggacgccccagagacagagcgggccgccgttgccattcaatctcaattccgcaagttccagaagaagaaggccgggtctcagagttag

SEQ ID NO: 162728 - DNA, 189 bp, Artificial Sequence
  derived and/or modified sequence
atgtctgagcggcagggcgctggggccaccaacgggaaggacaagaccagcggagaaaatgatggccagaagaaggtgcaggaggagtttgacatcgacatggatgcccctgagacagaaagagctgctgtggccatccagagccagttcaggaagttccagaagaagaaggccggcagccagagctag

SEQ ID NO: 162729 - DNA, 189 bp, Artificial Sequence
  derived and/or modified sequence
atgagcgagcggcagggcgccggcgccaccaacggcaaggacaagacatccggggagaatgacggccagaaaaaggtgcaggaagaatttgacatcgacatggacgcacccgaaaccgagagggccgctgtagcgatccagagccagttcagaaagttccaaaaaaagaaggcgggaagtcagtcttag

SEQ ID NO: 162730 - DNA, 189 bp, Artificial Sequence
  derived and/or modified sequence
atgagcgagagacagggagctggagcaaccaatggcaaagacaagacctccggagagaatgatgggcaaaagaaggtccaggaagagtttgatatcgacatggacgccccagagaccgagagagctgcagttgccatccagtcacaatttaggaagttccagaagaaaaaagccggttcccaatcatag

SEQ ID NO: 162731 - DNA, 660 bp, Artificial Sequence
  derived and/or modified sequence
gcccctggtgctctcagatgtcggccaggcttgcagacaggtgaatgcatctcattggctccagggaggcatgatgccaccgggcagctctttttaagagaaaagccagaaccggtggagcagcgacccctgagcagtgttctctgtgctgagcggcgggactgagctgttgagttagagccaacatgagtgagcgacaaggtgctggggcaaccaatggaaaagacaagacatctggtgaaaatgatggacagaagaaagttcaagaagaatttgacattgacatggatgcaccagagacagaacgtgcagcggtggccattcagtctcagttcagaaaattccagaagaagaaggctgggtctcagtcctagtgggagaaccccctcctagtccacctgaaaacaccaaattcaaccatcatctgtcaagaaattaaaagaacaacaccctagagagaagtcatccacacacaatccacacacgcatagcaaacctccaatgcatgtacagaaacctgtgatatttatacccttgtaggaaggtatagacaatggaattgtgagtagcttaatctctatgtttctctccattttcattcctcctgcaactattttccttgatgttgtaataaaatgaagttacgatgagtgaattcaa

SEQ ID NO: 162732 - DNA, 189 bp, Artificial Sequence
  derived and/or modified sequence
atgagcgagagacagggcgccggcgccaccaacggcaaggacaagaccagcggcgagaacgacggccagaagaaggtgcaggaggagttcgacatcgacatggacgcccccgagaccgagagagccgccgtggccatccagagccagttcagaaagttccagaagaagaaggccggcagccagagctag

SEQ ID NO: 162733 - protein, 913 aa, Artificial Sequence
  derived and/or modified sequence
MGWGSRCCCPGRLDLLCVLALLGGCLLPVCRTRVYTNHWAVKIAGGFPEANRIASKYGFINIGQIGALKDYYHFYHSRTIKRSVISSRGTHSFISMEPKVEWIQQQVVKKRTKRDYDFSRAQSTYFNDPKWPSMWYMHCSDNTHPCQSDMNIEGAWKRGYTGKNIVVTILDDGIERTHPDLMQNYDALASCDVNGNDLDPMPRYDASNENKHGTRCAGEVAAAANNSHCTVGIAFNAKIGGVRMLDGDVTDMVEAKSVSFNPQHVHIYSASWGPDDDGKTVDGPAPLTRQAFENGVRMGRRGLGSVFVWASGNGGRSKDHCSCDGYTNSIYTISISSTAESGKKPWYLEECSSTLATTYSSGESYDKKIITTDLRQRCTDNHTGTSASAPMAAGIIALALEANPFLTWRDVQHVIVRTSRAGHLNANDWKTNAAGFKVSHLYGFGLMDAEAMVMEAEKWTTVPRQHVCVESTDRQIKTIRPNSAVRSIYKASGCSDNPNRHVNYLEHVVVRITITHPRRGDLAIYLTSPSGTRSQLLANRLFDHSMEGFKNWEFMTIHCWGERAAGDWVLEVYDTPSQLRNFKTPGKLKEWSLVLYGTSVQPYSPTNEFPKVERFRYSRVEDPTDDYGTEDYAGPCDPECSEVGCDGPGPDHCNDCLHYYYKLKNNTRICVSSCPPGHYHADKKRCRKCAPNCESCFGSHGDQCMSCKYGYFLNEETNSCVTHCPDGSYQDTKKNLCRKCSENCKTCTEFHNCTECRDGLSLQGSRCSVSCEDGRYFNGQDCQPCHRFCATCAGAGADGCINCTEGYFMEDGRCVQSCSISYYFDHSSENGYKSCKKCDISCLTCNGPGFKNCTSCPSGYLLDLGMCQMGAICKDATEESWAEGGFCMLVKKNNLCQRKVLQQLCCKTCTFQG

SEQ ID NO: 162734 - protein, 101 aa, Artificial Sequence
  derived and/or modified sequence
CQPCHRFCATCAGAGADGCINCTEGYFMEDGRCVQSCSISYYFDHSSENGYKSCKKCDISCLTCNGPGFKNCTSCPSGYLLDLGMCQMGAICKDVSLFRGA

SEQ ID NO: 162735 - DNA, 2742 bp, Artificial Sequence
  derived and/or modified sequence
atggggtggggttcgcggtgctgttgccctgggcgtctggacttgctttgtgtcttagccctacttggaggctgtctgcttccagtttgtaggacaagggtttacaccaaccactgggccgtgaaaatagccggcggcttcccagaagccaaccgcattgcctccaagtatggtttcatcaatatcggacagatcggagccctaaaggattactatcacttctatcacagtcgaacaataaagcgcagcgtaattagctcccgcggtacccatagcttcatttccatggagccgaaagtggagtggatccagcagcaggttgttaaaaaaagaactaagcgggactacgacttctccagagctcagtccacctatttcaacgatcccaaatggcctagtatgtggtatatgcattgttcagataacactcatccctgccaatctgacatgaacattgagggcgcttggaagcggggctataccggtaagaatatcgtggtcaccatcctggatgacggaattgagcggacccatcccgatctcatgcagaattacgatgctttagcaagctgcgatgtgaatggcaacgatctggatccaatgccacggtacgacgcttctaacgagaacaagcacggaaccagatgtgccggcgaggtcgcagccgccgcaaataactcccattgcacagtgggcatagccttcaacgctaaaattggaggagttcgaatgttggacggggatgtcactgatatggtggaagccaagtcagtctctttcaatccccaacacgtccacatttacagcgctagctgggggcctgacgatgatggaaagaccgtcgacggaccagccccattgaccagacaggctttcgaaaacggcgtgcggatggggcgaagaggccttggcagcgtcttcgtgtgggctagcgggaatggcggtcgttctaaggaccactgcagctgtgatggttacacaaattcaatttacaccatctccatttccagtacagccgagtcaggtaagaaaccttggtatcttgaggagtgctcatccacccttgccacgacgtacagttcgggcgagtcgtatgacaagaagatcatcacgactgacttgaggcaacgctgtaccgataaccacaccggaaccagcgccagcgcccctatggcggccgggattattgctctggcccttgaggccaatccttttttaacatggagagatgtacagcatgtcattgtcagaacatccagggctggccacttaaacgctaatgattggaagactaatgctgctggcttcaaagtgtctcacttgtatggtttcggattaatggatgcagaggccatggtgatggaagccgaaaagtggactaccgtacccaggcaacacgtgtgcgtagaaagcacggatcggcagatcaaaacaatcaggcccaattccgctgtgcgaagtatttacaaggcctccggctgctcagacaatccaaatcgtcatgtcaactatttggaacacgtggtggtaaggatcactattacccacccccggcgcggtgacctggcaatctacctcacatccccaagcgggaccagaagtcagttattggccaacagactctttgatcatagcatggagggtttcaaaaactgggagttcatgacgatccactgttggggcgagagagcagccggcgattgggtgctggaagtttacgatacaccgagtcaactgcggaatttcaaaactcccggaaagttgaaagagtggtcactggtgctctatggtactagcgttcaaccttattccccgaccaacgagtttcccaaggttgagcgattcaggtatagtcgtgtcgaggaccccaccgacgattatggaacagaggactatgcgggtccgtgcgatcctgagtgctcagaggtgggatgtgacggcccaggcccggaccactgcaacgattgtttgcactactactacaaactgaaaaacaacactcggatttgtgtttcttcctgtccaccaggacactaccacgctgacaagaagaggtgtaggaagtgcgcgcctaattgtgagtcttgcttcggcagccacggtgatcagtgcatgtcttgtaagtacggatattttctcaatgaagagacgaactcttgtgtaacccactgccctgatgggtcttaccaggacaccaagaagaacctgtgccggaaatgctctgaaaattgcaagacgtgcacggagttccataactgcaccgagtgtcgagacggcctctccctgcagggatcccggtgttccgtctcctgcgaggatggaaggtatttcaatgggcaggactgccagccctgccacagattttgtgccacctgcgcgggtgctggagccgatggttgtatcaattgcaccgagggttactttatggaagacggccggtgcgtgcagtcctgctccatctcctactactttgatcactccagcgagaacggatataagagctgtaagaaatgtgatatctcctgcctcacttgcaatggtcccggttttaagaactgcacatcatgccccagcggatacctgctcgatctcggcatgtgtcagatgggagccatctgcaaggatgctaccgaagagtcttgggcagagggaggattctgcatgctggtgaaaaaaaacaacctgtgtcagcggaaggtgcttcaacagctttgctgcaagacctgcacattccagggctag

SEQ ID NO: 162736 - DNA, 306 bp, Artificial Sequence
  derived and/or modified sequence
tgccagccatgtcacaggttctgcgctacctgtgccggtgccggtgcagatggctgtatcaactgtaccgagggctatttcatggaagatggccggtgtgtgcagagctgttcaatatcctattacttcgatcacagcagtgagaacgggtacaagtcctgcaagaagtgtgatatttcatgcttaacatgcaatggtcccggattcaagaattgcacatcgtgcccaagtggctacctgctggatctcggcatgtgccagatgggcgctatttgtaaggacgtgtcattgtttaggggagcctag

SEQ ID NO: 162737 - DNA, 2742 bp, Artificial Sequence
  derived and/or modified sequence
atgggctggggcagccgctgctgctgccccggccgcctggacctgctgtgtgtgctggccctgctgggcggctgcctgctgcctgtgtgcaggaccagggtgtacaccaaccactgggccgtgaagattgctgggggcttccctgaggccaacagaattgccagcaaatatggcttcatcaacatcggccagattggagccctgaaggactactaccacttctaccacagcaggaccatcaagaggagcgtcatcagcagccggggcacccacagcttcatctccatggagcccaaggtggagtggatccagcagcaggtggtgaagaagaggaccaagagggactatgacttcagccgggcccagagcacctacttcaatgaccccaagtggcccagcatgtggtacatgcactgcagcgacaacacccacccctgccagagcgacatgaacatcgagggcgcctggaagaggggctacacaggcaagaacatcgtggtgaccatcctggatgatggcatcgagaggacccacccagacctgatgcagaactatgatgccctggccagctgtgatgtgaatggaaatgacctggaccccatgcccaggtatgatgccagcaatgaaaacaagcacggcacccgctgtgccggggaggtggccgctgctgccaacaacagccactgcaccgtgggcatcgccttcaatgccaagattggaggagtgaggatgctggatggagatgtgacagacatggtggaggccaagtctgtgtccttcaacccccagcacgtgcacatctacagcgcctcctggggcccagatgatgatggcaagacagtggatggccctgcccccctgacccggcaggcctttgaaaatggagtgaggatgggccggcggggcctgggctctgtgtttgtgtgggccagcggaaatggaggccgcagcaaggaccactgcagctgtgatggctacaccaacagcatctacaccatcagcatcagcagcacagctgagagcggcaagaagccctggtacctggaggagtgcagcagcaccctggccaccacctacagcagtggagagagctatgacaagaagatcatcaccacagacctgcggcagcgctgcacagacaaccacacaggcaccagcgccagcgcccccatggctgctggcatcatcgccctggccctggaggccaaccccttcctgacctggagagatgtgcagcacgtgattgtgaggaccagcagagctggccacctgaatgccaatgactggaagaccaatgctgctggcttcaaggtgagccacctgtatggcttcggcctgatggatgctgaggccatggtgatggaggccgagaagtggaccaccgtgccccggcagcacgtgtgtgtggagagcacagaccggcagatcaagaccatccggcccaacagcgctgtgcgcagcatctacaaggccagcggctgcagcgacaaccccaacagacatgtgaactacctggagcacgtggtggtgcgcatcaccatcacccacccccggcggggggacctggccatctacctgaccagccccagcggcaccaggagccagctgctggccaacagactctttgaccacagcatggagggcttcaagaactgggagttcatgaccatccactgctggggcgagagagctgctggggactgggtgctggaggtgtatgacacccccagccagctgaggaacttcaagaccccaggcaagctgaaggagtggagcctggtgctgtatggcacctctgtgcagccctacagccccaccaatgagttccccaaggtggagcgcttccgctacagccgggtggaggaccccacagatgattatggaacagaggactatgccggcccctgtgaccctgaatgttctgaggtgggctgtgatggccctggccctgaccactgcaatgactgcctgcactactactacaagctgaagaacaacacccgcatctgtgtgagcagctgccccccaggccactaccacgccgacaagaagcgctgcaggaaatgtgcccccaactgtgagagctgcttcggcagccacggggaccagtgcatgagctgcaagtatggctacttcctgaatgaggagaccaacagctgtgtgacccactgcccagatggcagctaccaggacaccaagaagaacctgtgcaggaaatgttctgagaactgcaagacctgcacagagttccacaactgcacagaatgtagagatggcctgagcctgcagggcagccgctgcagcgtgtcctgtgaagatggccgctacttcaacggccaggactgccagccctgccaccgcttctgtgccacctgtgccggggccggggctgatggctgcatcaactgcacagagggctacttcatggaggatggccgctgtgtgcagagctgcagcatctcctactactttgaccacagcagtgaaaatggctacaagagctgcaagaagtgtgacatcagctgcctgacctgcaatggacctggcttcaagaactgcaccagctgccccagcggctacctgctggacctgggcatgtgccagatgggcgccatctgcaaggatgccacagaggagagctgggccgagggcggcttctgcatgctggtgaagaagaacaacctgtgccagaggaaggtgctgcagcagctgtgctgcaagacctgcaccttccagggctag

SEQ ID NO: 162738 - DNA, 306 bp, Artificial Sequence
  derived and/or modified sequence
tgccagccctgccaccgcttctgtgccacctgtgccggggccggggctgatggctgcatcaactgcacagagggctacttcatggaggatggccgctgtgtgcagagctgcagcatctcctactactttgaccacagcagtgaaaatggctacaagagctgcaagaagtgtgacatcagctgcctgacctgcaatggacctggcttcaagaactgcaccagctgccccagcggctacctgctggacctgggcatgtgccagatgggcgccatctgcaaggatgtgtccctcttccggggggcctag

SEQ ID NO: 162739 - DNA, 2742 bp, Artificial Sequence
  derived and/or modified sequence
atgggctggggcagccggtgctgctgccccggccggctggacctgctgtgtgttcttgcactattggggggctgcttactcccggtatgtaggacccgggtatacaccaaccactgggcggtcaaaatagctgggggatttccggaggctaatcgaatcgcttcgaagtacggcttcattaacatcggccagataggcgccctgaaagattattaccacttctaccacagccggacaattaagagatcggtgataagctctcggggcacgcatagctttattagcatggaaccaaaagtcgaatggattcaacagcaggtggttaagaagaggactaaaagagattacgatttcagcagagcacagagtacttattttaacgatcccaaatggccgagtatgtggtatatgcactgtagcgataatacacacccatgtcagtccgacatgaatatcgaaggagcttggaagcgcggatatacaggcaaaaatatcgttgtgaccatcctggatgacggtatcgagcgaactcacccagatttgatgcagaattatgatgctctcgccagctgtgacgttaacggcaacgacttggatcctatgcctagatacgacgcgagtaacgaaaataagcacggaacccgatgcgctggcgaggtcgccgctgcagcaaacaacagtcattgcaccgtaggcattgctttcaacgctaagatcggaggtgtgaggatgcttgatggcgatgtcaccgatatggtggaagctaagtctgtgtcgtttaatccccaacacgttcacatttatagtgcttcttggggacccgacgatgatggaaagacagtcgatggccccgctccactgaccagacaggcctttgagaacggcgtgcggatggggagaaggggattgggatccgtattcgtttgggcttctggaaatggaggtagatccaaggaccactgttcatgcgacggctataccaattccatttatacaatttccatatcctcaaccgcggagagtggcaagaagccttggtatttggaggagtgctcttctacactagccaccacatactcctccggcgagtcgtatgataagaaaattatcacaacagatctgcgccaacgctgtacagataaccacaccggcacatccgcttcagcccccatggccgctggtattatcgcgctcgctttagaagcaaaccccttcttgacttggcgtgatgtgcagcacgtgattgtacgaacctcacgggcagggcatttgaacgcaaacgactggaagacaaacgccgccggtttcaaagtatcacacctatacggattcgggctcatggatgccgaagccatggtgatggaggccgagaagtggaccacagtgcccagacagcacgtctgtgtcgagagtaccgaccgacagatcaagacaatccggccaaacagtgccgttcggtctatctataaagcaagcggctgctcagataatcctaaccgccatgtgaactatctggagcatgtggtagtcagaatcactattacccatcccaggaggggagatcttgccatatatctgacctccccttctggtaccagatctcagcttctcgcgaatcgactgtttgatcactccatggagggctttaagaactgggaatttatgaccattcattgttggggtgagcgggccgccggcgactgggttctcgaagtttatgatacaccgagccagctcagaaattttaagacaccaggcaagcttaaagaatggtcactggttttgtacggcaccagcgtgcagccatactcccctaccaacgaattccccaaagtggaacgctttcgctactcacgcgtggaagacccaactgacgattacggaacggaggactatgctgggccgtgtgacccagaatgcagcgaggtggggtgtgacggcccggggcccgaccattgcaatgattgcctgcattactactataagcttaaaaataacacccggatttgtgttagtagctgtccacctgggcactaccacgccgacaagaagcgctgtcgcaaatgcgccccaaattgtgagtcttgcttcggatcccacggggaccagtgtatgtcttgcaaatatggttattttctgaacgaagaaacaaacagttgcgttacacattgccctgacgggagctatcaggatacaaagaagaacctgtgcagaaaatgttcggagaactgcaagacctgtactgagtttcacaattgcacagaatgcagggacgggctctccctccagggcagtcggtgtagcgtaagttgtgaagatgggcggtatttcaatggtcaggattgccaaccttgtcatcgattttgcgccacatgcgcgggcgctggagctgatggctgcattaactgcaccgaggggtacttcatggaagacggtagatgtgtgcagtcatgctctatctcgtactatttcgatcatagttctgaaaatggctacaaatcctgcaagaagtgcgatatctcatgcctgacgtgcaatgggccgggcttcaaaaactgcaccagttgcccctctggttatttgctggatctggggatgtgccagatgggtgcgatctgtaaggacgccactgaagaaagctgggccgaaggcggattttgtatgctggtaaagaaaaataacctctgccagcggaaagtcctccagcaactttgctgcaaaacttgcacctttcaaggttag

SEQ ID NO: 162740 - DNA, 306 bp, Artificial Sequence
  derived and/or modified sequence
tgccagccctgccaccggttctgcgccacctgcgccggcgccggcgccgatggctgcatcaactgtaccgaaggctactttatggaggacgggagatgtgtgcagtcctgttcaatctcctactacttcgatcatagttcagagaatggctataagtcgtgcaaaaagtgtgatataagctgtctgacatgcaacgggcctggtttcaaaaattgcacatcttgcccttcaggctatttactcgacctgggaatgtgccagatgggggctatatgtaaggatgtatcattgtttcgtggcgcctag

SEQ ID NO: 162741 - DNA, 2742 bp, Artificial Sequence
  derived and/or modified sequence
atgggctggggcagcaggtgctgttgccctgggagactcgatctgctgtgtgttcttgctctgttgggcggatgccttctgcccgtgtgccgtacccgcgtttatactaaccattgggccgtgaaaattgctggaggctttcccgaagcgaacaggatagcaagtaaatatgggttcattaacattggacagatcggagctctgaaggactactatcatttttaccattcaagaaccatcaagaggtccgttatcagctctcgaggaactcattcttttataagtatggagccgaaggtggagtggatacagcagcaggtggtgaagaaacgcaccaaacgggattacgatttttctagggcccagagcacctattttaatgaccccaaatggccaagtatgtggtacatgcattgtagcgacaacacccacccctgccagagtgacatgaatattgagggcgcttggaaacggggttataccggcaaaaatatcgtcgtcactatactggatgatggtatcgagcgcacgcatcccgacctcatgcagaactacgatgctttggcttcctgcgacgtgaatggaaacgatcttgacccgatgcctaggtacgacgcttcaaacgagaataagcatggcactagatgcgccggagaagttgccgctgccgctaacaacagtcactgcacagttggaattgcttttaacgccaagatcggcggagtccgaatgctcgatggggatgttacagacatggtagaggctaagtcggtgtcctttaacccccagcatgtgcatatttattctgcaagctggggtccagacgacgacgggaagacagtcgacggtccggctccacttacccgccaggccttcgagaatggcgtgaggatgggccgacggggactaggatctgtctttgtttgggcaagcgggaatgggggaagaagcaaggaccattgttcatgcgacggatataccaacagcatatacacgatttctatctcaagtaccgctgagagcggtaagaaaccttggtacctggaagagtgtagcagcaccctggctacaacctatagtagcggggaatcatatgacaaaaagataattactacggacttgcgacagcggtgcactgacaatcatacagggacatcagcctccgccccaatggcagcaggcatcatcgccctagcactcgaggccaacccattcctcacctggcgcgatgtacagcacgtgattgtacggacctcacgcgctggacacttgaacgctaacgattggaagacaaatgctgctgggttcaaggtatcacacctatacggcttcggcctaatggatgccgaagcaatggtaatggaagcagaaaaatggaccactgtgccccgacaacatgtctgcgtggagtcaacagaccgacaaatcaagacaatcaggcctaattccgcagtgaggagtatctacaaagcctccgggtgtagcgacaacccgaacaggcatgtcaactatcttgagcatgtagtggtgcggatcactatcacccatccccgacggggtgacctcgccatctacctaacgtctccgtctggcacgcgcagccagctccttgccaacagacttttcgatcacagcatggaaggcttcaagaattgggaatttatgactatccattgttggggcgagcgtgccgctggcgattgggttctggaagtgtacgacactccaagccaattacgaaatttcaaaacgccgggaaaactaaaggaatggagtctggtgctttacgggacatccgtgcagccctacagccccaccaatgagtttcctaaagtggaacggttccggtactctcgagttgaggatcccaccgatgattacggaactgaggactacgcgggtccttgcgaccccgagtgtagcgaggtcggatgtgatgggccaggtccagatcattgtaatgattgtctacactattattacaagcttaagaataacacaaggatctgcgtttcctcctgcccccctggtcactatcacgcagataagaaaagatgtagaaaatgcgcgcctaattgtgaatcgtgctttggatctcacggcgatcagtgtatgtcatgcaagtacggttatttcctaaatgaggaaaccaattcctgcgtgacacactgcccagacgggagctatcaggacacgaaaaagaatctgtgccggaagtgcagtgagaattgcaagacttgtactgagtttcacaactgtaccgagtgtcgcgacggcttatcacttcaggggtcacgttgctctgtctcctgtgaggacggtcgctatttcaacggtcaggactgtcagccatgccatagattctgcgctacttgtgccggtgccggagccgatggatgcataaattgcacagaaggctattttatggaagacgggaggtgtgttcagagctgttctatttcctattacttcgaccatagctcagagaacgggtataaaagctgtaaaaagtgtgacatctcatgcctgacctgtaacggcccaggttttaagaactgtactagttgcccctctgggtatttgctggatcttggcatgtgccaaatgggagcgatttgcaaggacgcgaccgaagagtcatgggccgagggtgggttctgcatgctggtgaaaaagaataacctatgtcagcgcaaagtactgcagcagctgtgctgtaaaacctgcactttccaggggtag

SEQ ID NO: 162742 - DNA, 306 bp, Artificial Sequence
  derived and/or modified sequence
tgccagccgtgtcaccgattctgcgccacttgcgcaggtgcaggcgcagacgggtgcattaattgtaccgaaggctacttcatggaagacggtaggtgtgtccagtcttgcagtatttcctactacttcgatcatagcagcgaaaacgggtacaaaagttgtaagaaatgtgacatcagttgcttaacctgcaatggacctggcttcaaaaattgtacttcctgtccgtctgggtacctgctagaccttggaatgtgccagatgggtgctatttgcaaggacgtctcactattcaggggagcttag

SEQ ID NO: 162743 - DNA, 5756 bp, Artificial Sequence
  derived and/or modified sequence
cggagggagcgctgggagcgagcaagcgagcgtttggagcccgggccagcagagggggcgcccggtcgctgcctgtaccgctcccgctggtcatctccgccgcgctcgggggccccgggaggagcgagaccgagtcggagagtccgggagccaagccgggcgaaacccaactgcggaggacgcccgccccactcagcctcctcctgcgtccgagccggggagcatcgccgagcgccccacgggccggagagctgggagcacaggtcccggcagccccagggatggtctaggagccggcgtaaggctcgctgctctgctccctgccggggctagccgcctcctgccgatcgcccggggctgcgagctgcggcggcccggggctgctcgccgggcggcgcaggccggagaagttagttgtgcgcgcccttagtgcgcggaaccagccagcgagcgagggagcagcgaggcgccgggaccatgggctgggggagccgctgctgctgcccgggacgtttggacctgctgtgcgtgctggcgctgctcgggggctgcctgctccccgtgtgtcggacgcgcgtctacaccaaccactgggcagtcaaaatcgccgggggcttcccggaggccaaccgtatcgccagcaagtacggattcatcaacataggacagataggggccctgaaggactactaccacttctaccatagcaggacgattaaaaggtcagttatctcgagcagagggacccacagtttcatttcaatggaaccaaaggtggaatggatccaacagcaagtggtaaaaaagcggacaaagagggattatgacttcagtcgtgcccagtctacctatttcaatgatcccaagtggcccagcatgtggtatatgcactgcagtgacaatacacatccctgccagtctgacatgaatatcgaaggagcctggaagagaggctacacgggaaagaacattgtggtcactatcctggatgacggaattgagagaacccatccagatctgatgcaaaactacgatgctctggcaagttgcgacgtgaatgggaatgacttggacccaatgcctcgttatgatgcaagcaacgagaacaagcatgggactcgctgtgctggagaagtggcagccgctgcaaacaattcgcactgcacagtcggaattgctttcaacgccaagatcggaggagtgcgaatgctggacggagatgtcacggacatggttgaagcaaaatcagttagcttcaacccccagcacgtgcacatttacagcgccagctggggcccggatgatgatggcaagactgtggacggaccagcccccctcacccggcaagcctttgaaaacggcgttagaatggggcggagaggcctcggctctgtgtttgtttgggcatctggaaatggtggaaggagcaaagaccactgctcctgtgatggctacaccaacagcatctacaccatctccatcagcagcactgcagaaagcggaaagaaaccttggtacctggaagagtgttcatccacgctggccacaacctacagcagcggggagtcctacgataagaaaatcatcactacagatctgaggcagcgttgcacggacaaccacactgggacgtcagcctcagcccccatggctgcaggcatcattgcgctggccctggaagccaatccgtttctgacctggagagacgtacagcatgttattgtcaggacttcccgtgcgggacatttgaacgctaatgactggaaaaccaatgctgctggttttaaggtgagccatctttatggatttggactgatggacgcagaagccatggtgatggaggcagagaagtggaccaccgttccccggcagcacgtgtgtgtggagagcacagaccgacaaatcaagacaatccgccctaacagtgcagtgcgctccatctacaaagcttcaggctgctcggataaccccaaccgccatgtcaactacctggagcacgtcgttgtgcgcatcaccatcacccaccccaggagaggagacctggccatctacctgacctcgccctctggaactaggtctcagcttttggccaacaggctatttgatcactccatggaaggattcaaaaactgggagttcatgaccattcattgctggggagaaagagctgctggtgactgggtccttgaagtttatgatactccctctcagctaaggaactttaagactccaggtaaattgaaagaatggtctttggtcctctacggcacctccgtgcagccatattcaccaaccaatgaatttccgaaagtggaacggttccgctatagccgagttgaagaccccacagacgactatggcacagaggattatgcaggtccctgcgaccctgagtgcagtgaggttggctgtgacgggccaggaccagaccactgcaatgactgtttgcactactactacaagctgaaaaacaataccaggatctgtgtctccagctgcccccctggccactaccacgccgacaagaagcgctgcaggaagtgtgcccccaactgtgagtcctgctttgggagccatggtgaccaatgcatgtcctgcaaatatggatactttctgaatgaagaaaccaacagctgtgttactcactgccctgatgggtcatatcaggataccaagaaaaatctttgccggaaatgcagtgaaaactgcaagacatgtactgaattccataactgtacagaatgtagggatgggttaagcctgcagggatcccggtgctctgtctcctgtgaagatggacggtatttcaacggccaggactgccagccctgccaccgcttctgcgccacttgtgctggggcaggagctgatgggtgcattaactgcacagagggctacttcatggaggatgggagatgcgtgcagagctgtagtatcagctattactttgaccactcttcagagaatggatacaaatcctgcaaaaaatgtgatatcagttgtttgacgtgcaatggcccaggattcaagaactgtacaagctgccctagtgggtatctcttagacttaggaatgtgtcaaatgggagccatttgcaaggatgcaacggaagagtcctgggcggaaggaggcttctgtatgcttgtgaaaaagaacaatctgtgccaacggaaggttcttcaacaactttgctgcaaaacatgtacatttcaaggctgagcagccatcttagatttctttgttcctgtagacttatagattattccatattattaaaaagaaaaaagccaaaaagaaaaaaaaaaaaagcaagccacctctctctttcttttcttgctctctttttctttctctctctctcaagtttgtgcagggagatggtgaactgttttgtcagaacttaaatggaaaaaaaaataaaactacaacaagcctaccttttataactgggtgtttagtgctaaacagccagaaccacagagacagtattgtatgaccaaagcatttgatgccaaaatttgacgttaaagtaatgatttgatttcctgccctggttttgaaggtccatttttttcccttttgcattgacttgcttgtttcccctttgaaacacctaaaaatacctttccaaaacatcgcgagagcatacatagacaaaaatgaaatagaaagctcttgcatgcttgagtccaccattgggggaaatgacagaaaactggacctgagggcattaggaacatcctacagagttgtgtttagtgtcgtttgccatggtatttcacagtgaaacatggatactctccacacatcatttacttcatgctgtgtacttatgtactggtttttgcattttactcacttgataagtctgctccactggtttcatcagatagacttgctgctactggcttttccattgtagattgggttattttacacgcagttcgccaaatgggattgctctgtatagtcaaattggtgatggacagatggacagaatgcagaggtacatagatgagctgaggctgatccagctcccctgaaattcagagtgttaactttgtagaccctgcacaatctcttggtgctatctagccattacccccattttttttttaaaggccatctgaaattccatttgtcatggtgggaagcattttggatatgatgcaggaaatctcttcctggagtcaaaagttcccaagaggtcctgtatttttaagaaatggaatttatttaaataatatttaagcttgtgcccatgttggccgggcaacttttttcaatggtgcttattagaagaagttttttcatcttgtcattttaagaaaataaaactggaaattgaatatgggtggcatgattgtacccttttagttctcttatttttctactcctctgtccctctataactatgccatactattatatgctggtccactgaatgctgagatgatctgttttttggggttttttttttttaagaaatattttcactggttttctgtgactctctaaacacttcatcgaaactagaagactgaattatgaggaaactatttggattagtggccagaaacgatgaaatcttatagatcttttgacagtttctctgtttaggggagcctagactgatatcaagtttcttcatatcaaagcttcattggtgacctcatttgctttacaagtgaccagccatcttgcaggcttcatgcttctgagagccttacttagaagatgctgctggagtcacagctgaggagaggaatactatcaacatggactatcctgggaaagagctaggaagtagatgctgaggtccccatccaaacagcaagctaggaaaaagcctgccttgaaaatatttctagacatcaaagataacttacaacccaaagtgaataataagtaaatagtctgatgaccctcttaatagcattgcaattgtattgaatcacataatgattcataagtaactagggaaccaactgattttgctaagcagtcttccccttataacaccacaggcccttctgacacacaaaaaaatgaaagttaatcctgggtacagcatacagttttacatttaaacgcacagtcttacgtggacaaatgcaagcacaagcctaaagcaaggtcaagcagatggcaaaaccgaatttgcctgcaaagaaatctatttaactgaatcagcccataatatttgaggcacgaggttactgtgattgataggaaagataaaaatgatgtctgtttttgtagacgaataaccatcaacatgacaacaaaattcattggggtctaccagcgtgcattccatttcccactgaccatgcaggtgcacgtcgcggaaatactggtttaactactagtgtgttactgcctcatttatctacataacattattaactagaacataatgctttcaaagtttaagttaatgttatatattatgtataaatatatatattcataatgagatatatgtaatggatagtacaaagtttggagactcaacaaatgctctaaccttctagagacaaaagtcctatttctgttttcttttgtctttttattttcaattagtgacccattgttaaatccaaatccacttttactgaaaaatactgtacatgtgtaaaatgttcagttgtttttttgtaaaatatagtagaacggttgtaactgatactggccaaaatcaatgttattccatattttattttttctattaaattaacctaagttcctgttta

SEQ ID NO: 162744 - DNA, 503 bp, Artificial Sequence
  derived and/or modified sequence
tgccagccctgccaccgcttctgcgccacttgtgctggggcaggagctgatgggtgcattaactgcacagagggctacttcatggaggatgggagatgcgtgcagagctgtagtatcagctattactttgaccactcttcagagaatggatacaaatcctgcaaaaaatgtgatatcagttgtttgacgtgcaatggcccaggattcaagaactgtacaagctgccctagtgggtatctcttagacttaggaatgtgtcaaatgggagccatttgcaaggatgtttctctgtttaggggagcctagactgatatcaagtttcttcatatcaaagcttcattggtgacctcatttgctttacaagtgaccagccatcttgcaggcttcatgcttctgagagccttacttagaagatgctgctggagtcacagctgaggagaggaatactatcaacatggactatcctgggaaagagctaggaagtagatgctgaggtccccatc

SEQ ID NO: 162745 - DNA, 2742 bp, Artificial Sequence
  derived and/or modified sequence
atgggctggggcagcagatgctgctgccccggcagactggacctgctgtgcgtgctggccctgctgggcggctgcctgctgcccgtgtgcagaaccagagtgtacaccaaccactgggccgtgaagatcgccggcggcttccccgaggccaacagaatcgccagcaagtacggcttcatcaacatcggccagatcggcgccctgaaggactactaccacttctaccacagcagaaccatcaagagaagcgtgatcagcagcagaggcacccacagcttcatcagcatggagcccaaggtggagtggatccagcagcaggtggtgaagaagagaaccaagagagactacgacttcagcagagcccagagcacctacttcaacgaccccaagtggcccagcatgtggtacatgcactgcagcgacaacacccacccctgccagagcgacatgaacatcgagggcgcctggaagagaggctacaccggcaagaacatcgtggtgaccatcctggacgacggcatcgagagaacccaccccgacctgatgcagaactacgacgccctggccagctgcgacgtgaacggcaacgacctggaccccatgcccagatacgacgccagcaacgagaacaagcacggcaccagatgcgccggcgaggtggccgccgccgccaacaacagccactgcaccgtgggcatcgccttcaacgccaagatcggcggcgtgagaatgctggacggcgacgtgaccgacatggtggaggccaagagcgtgagcttcaacccccagcacgtgcacatctacagcgccagctggggccccgacgacgacggcaagaccgtggacggccccgcccccctgaccagacaggccttcgagaacggcgtgagaatgggcagaagaggcctgggcagcgtgttcgtgtgggccagcggcaacggcggcagaagcaaggaccactgcagctgcgacggctacaccaacagcatctacaccatcagcatcagcagcaccgccgagagcggcaagaagccctggtacctggaggagtgcagcagcaccctggccaccacctacagcagcggcgagagctacgacaagaagatcatcaccaccgacctgagacagagatgcaccgacaaccacaccggcaccagcgccagcgcccccatggccgccggcatcatcgccctggccctggaggccaaccccttcctgacctggagagacgtgcagcacgtgatcgtgagaaccagcagagccggccacctgaacgccaacgactggaagaccaacgccgccggcttcaaggtgagccacctgtacggcttcggcctgatggacgccgaggccatggtgatggaggccgagaagtggaccaccgtgcccagacagcacgtgtgcgtggagagcaccgacagacagatcaagaccatcagacccaacagcgccgtgagaagcatctacaaggccagcggctgcagcgacaaccccaacagacacgtgaactacctggagcacgtggtggtgagaatcaccatcacccaccccagaagaggcgacctggccatctacctgaccagccccagcggcaccagaagccagctgctggccaacagactgttcgaccacagcatggagggcttcaagaactgggagttcatgaccatccactgctggggcgagagagccgccggcgactgggtgctggaggtgtacgacacccccagccagctgagaaacttcaagacccccggcaagctgaaggagtggagcctggtgctgtacggcaccagcgtgcagccctacagccccaccaacgagttccccaaggtggagagattcagatacagcagagtggaggaccccaccgacgactacggcaccgaggactacgccggcccctgcgaccccgagtgcagcgaggtgggctgcgacggccccggccccgaccactgcaacgactgcctgcactactactacaagctgaagaacaacaccagaatctgcgtgagcagctgcccccccggccactaccacgccgacaagaagagatgcagaaagtgcgcccccaactgcgagagctgcttcggcagccacggcgaccagtgcatgagctgcaagtacggctacttcctgaacgaggagaccaacagctgcgtgacccactgccccgacggcagctaccaggacaccaagaagaacctgtgcagaaagtgcagcgagaactgcaagacctgcaccgagttccacaactgcaccgagtgcagagacggcctgagcctgcagggcagcagatgcagcgtgagctgcgaggacggcagatacttcaacggccaggactgccagccctgccacagattctgcgccacctgcgccggcgccggcgccgacggctgcatcaactgcaccgagggctacttcatggaggacggcagatgcgtgcagagctgcagcatcagctactacttcgaccacagcagcgagaacggctacaagagctgcaagaagtgcgacatcagctgcctgacctgcaacggccccggcttcaagaactgcaccagctgccccagcggctacctgctggacctgggcatgtgccagatgggcgccatctgcaaggacgccaccgaggagagctgggccgagggcggcttctgcatgctggtgaagaagaacaacctgtgccagagaaaggtgctgcagcagctgtgctgcaagacctgcaccttccagggctag

SEQ ID NO: 162746 - DNA, 306 bp, Artificial Sequence
  derived and/or modified sequence
tgccagccctgccacagattctgcgccacctgcgccggcgccggcgccgacggctgcatcaactgcaccgagggctacttcatggaggacggcagatgcgtgcagagctgcagcatcagctactacttcgaccacagcagcgagaacggctacaagagctgcaagaagtgcgacatcagctgcctgacctgcaacggccccggcttcaagaactgcaccagctgccccagcggctacctgctggacctgggcatgtgccagatgggcgccatctgcaaggacgtgagcctgttcagaggcgcctag

SEQ ID NO: 162747 - DNA, 570 bp, Artificial Sequence
  derived and/or modified sequence
atggacagaatgaagaagatcaagagacagctgagcatgaccctgagaggcggcagaggcatcgacaagaccaacggcgcccccgagcagatcggcctggacgagagcggcggcggcggcggcagcgaccccggcgaggcccccaccagagccgcccccggcgagctgagaagcgccagaggccccctgagcagcgcccccgagatcgtgcacgaggacctgaagatgggcagcgacggcgagagcgaccaggccagcgccaccagcagcgacgaggtgcagagccccgtgagagtgagaatgagaaaccacccccccagaaagatcagcaccgaggacatcaacaagagactgagcctgcccgccgacatcagactgcccgagggctacctggagaagctgaccctgaacagccccatcttcgacaagcccctgagcagaagactgagaagagtgagcctgagcgagatcggcttcggcaagctggagacctacatcaagctggacaagctgggcgagggcacctacgccaccgtgtacaagggcaagagcaagctgaccgacaactag

SEQ ID NO: 162748 - DNA, 453 bp, Artificial Sequence
  derived and/or modified sequence
atggacagaatgaagaagatcaagagacagctgagcatgaccctgagaggcggcagaggcatcgacaagaccaacggcgcccccgagcagatcggcctggacgagagcggcggcggcggcggcagcgaccccggcgaggcccccaccagagccgcccccggcgagctgagaagcgccagaggccccctgagcagcgcccccgagatcgtgcacgaggacctgaagatgggcagcgacggcgagagcgaccaggccagcgccaccagcagcgacgaggtgcagagccccgtgagagtgagaatgagaaaccacccccccagaaagatcagcaccgaggacatcaacaagagactgagcctgcccgccgacatcagactgcccgagggctacctggagaagctgaccctgaacagccccatcttcgacaagcccctgagcagaagactgagatag

SEQ ID NO: 162749 - DNA, 462 bp, Artificial Sequence
  derived and/or modified sequence
atggacagaatgaagaagatcaagagacagctgagcatgaccctgagaggcggcagaggcatcgacaagaccaacggcgcccccgagcagatcggcctggacgagagcggcggcggcggcggcagcgaccccggcgaggcccccaccagagccgcccccggcgagctgagaagcgccagaggccccctgagcagcgcccccgagatcgtgcacgaggacctgaagatgggcagcgacggcgagagcgaccaggccagcgccaccagcagcgacgaggtgcagagccccgtgagagtgagaatgagaaaccacccccccagaaagatcagcaccgaggacatcaacaagagactgagcctgcccgccgacatcagactgcccgagggctacctggagaagctgaccctgaacagccccatcttcgacaagcccctgagcagaagactgagaagagtgagctag

SEQ ID NO: 162750 - DNA, 174 bp, Artificial Sequence
  derived and/or modified sequence
atggacagaatgaagaagatcaagagacagctgagcatgaccctgagaggcggcagaggcatcgacaagaccaacggcgcccccgagcagatcggcctggacgagagcggcggcggcggcggcagcgaccccggcgaggcccccaccagagccgcccccggcgagctgagatag

SEQ ID NO: 162751 - DNA, 1347 bp, Artificial Sequence
  derived and/or modified sequence
atggacagaatgaagaagatcaagagacagctgagcatgaccctgagaagcgcccccgagatcgtgcacgaggacctgaagatgggcagcgacggcgagagcgaccaggccagcgccaccagcagcgacgaggtgcagagccccgtgagagtgagaatgagaaaccacccccccagaaagatcagcaccgaggacatcaacaagagactgagcctgcccgccgacatcagactgcccgagggctacctggagaagctgaccctgaacagccccatcttcgacaagcccctgagcagaagactgagaagagtgagcctgagcgagatcggcttcggcaagctggagacctacatcaagctggacaagctgggcgagggcacctacgccaccgtgtacaagggcaagagcaagctgaccgacaacctggtggccctgaaggagatcagactggagcacgaggagggcgccccctgcaccgccatcagagaggtgagcctgctgaaggacctgaagcacgccaacatcgtgaccctgcacgacatcatccacaccgagaagagcctgaccctggtgttcgagtacctggacaaggacctgaagcagtacctggacgactgcggcaacatcatcaacatgcacaacgtgaagctgttcctgttccagctgctgagaggcctggcctactgccacagacagaaggtgctgcacagagacctgaagccccagaacctgctgatcaacgagagaggcgagctgaagctggccgacttcggcctggccagagccaagagcatccccaccaagacctacagcaacgaggtggtgaccctgtggtacagaccccccgacatcctgctgggcagcaccgactacagcacccagatcgacatgtggggcgtgggctgcatcttctacgagatggccaccggcagacccctgttccccggcagcaccgtggaggagcagctgcacttcatcttcagaatcctgggcacccccaccgaggagacctggcccggcatcctgagcaacgaggagttcaagacctacaactaccccaagtacagagccgaggccctgctgagccacgcccccagactggacagcgacggcgccgacctgctgaccaagctgctgcagttcgagggcagaaacagaatcagcgccgaggacgccatgaagcaccccttcttcctgagcctgggcgagagaatccacaagctgcccgacaccaccagcatcttcgccctgaaggagatccagctgcagaaggaggccagcctgagaagcagcagcatgcccgacagcggcagacccgccttcagagtggtggacaccgagttctag

SEQ ID NO: 162752 - DNA, 570 bp, Artificial Sequence
  derived and/or modified sequence
atggacaggatgaaaaagatcaagcgtcagcttagtatgacattgcggggcggaaggggcattgataagactaacggggcgcctgaacagattggcctcgatgaatccggcgggggaggcggctctgaccctggagaagcgcccacgcgagccgccccaggtgagcttcgtagtgcccgcggccccctcagctcagcccctgaaatcgtgcacgaggatcttaagatggggagcgacggagagtctgatcaggccagcgctacctcctcagacgaggtccagtctccagtgagggtgaggatgcgcaaccaccccccgcgcaaaatttctactgaggacatcaacaaaagactgagtcttccggctgatattcgattacccgaagggtaccttgagaagctaactctcaactcgcccatctttgacaagcctctgtctcgacgactgcgccgtgtctcgcttagcgagattggctttggcaaactggaaacatacattaaactcgacaagctcggggaaggaacctacgcgacggtgtataagggaaaaagtaagctgaccgataactag

SEQ ID NO: 162753 - DNA, 453 bp, Artificial Sequence
  derived and/or modified sequence
atggaccgaatgaaaaagatcaaaaggcaactctctatgactctccgcggggggagaggcatcgataagactaacggagctcctgaacagataggactcgacgaatccggtgggggaggggggtcggatcccggcgaagctccaacacgcgcagcccctggtgagcttaggagcgcccgaggccccctgtcatccgctccagaaattgtccatgaggatctaaagatgggcagcgacggagagtcagaccaggctagcgctacctcctcggacgaggtgcagagtcctgtgcgggtgcggatgaggaatcacccaccgaggaagatcagcacagaagacatcaacaaaaggctgtcactccctgcagatatccgactgcccgaaggatatctggagaaactcactctcaattcccccatctttgacaaaccactctcacggaggctccgctag

SEQ ID NO: 162754 - DNA, 462 bp, Artificial Sequence
  derived and/or modified sequence
atggatagaatgaagaagataaagcgtcaattgtctatgaccctaagaggtgggagaggcattgataaaactaacggcgcccctgagcaaataggcctggatgaaagcggtggtggaggggggtcagacccgggcgaggctccaactcgggcagcacctggtgagctccgaagcgccaggggacccttatcctcggcccccgaaatcgttcacgaagacctgaagatgggtagcgacggggagagcgaccaggcatcggccacttcttctgacgaagtgcagtctcccgtgagggtccgaatgcgcaaccatccacctagaaagataagtaccgaggacattaacaagcgcctgtctctgccagcggacattagactcccagaaggctacttggaaaagctgactctgaactcccctatttttgacaaacccctgagccgccggctgcggcgggtttcatag

SEQ ID NO: 162755 - DNA, 174 bp, Artificial Sequence
  derived and/or modified sequence
atggatcgaatgaaaaagattaagaggcagttgagcatgacactgcgcggcggacgaggtatcgataagaccaatggtgcgcctgagcagatcggcctggacgagtcgggaggtggcggaggatccgatcccggagaggcccctacgagagcggcccccggtgagttgcgctag

SEQ ID NO: 162756 - DNA, 1347 bp, Artificial Sequence
  derived and/or modified sequence
atggaccgcatgaagaagattaaacggcagctatctatgacactgcgcagtgcaccagagatcgtccacgaagaccttaagatggggagtgacggcgagtccgatcaagcatcagctacctcttctgatgaggtccagagccccgtccgggtgaggatgcgcaaccatcctccgcggaagatctcaaccgaagatattaacaaaagattgagcttgcccgctgatattcgcttgcccgaaggttacctggagaagctgacgctcaatagccctatctttgacaagcctctttccaggcgcctgcgacgcgtgtcacttagcgaaattggcttcgggaaattagagacatacattaaactcgataagctcggggaggggacatatgcaaccgtctataagggtaagagcaagctgactgataatctcgtggccctgaaggagattcggctggagcacgaagagggcgctccttgtacagccatccgcgaggtcagcctcctcaaagatctcaagcacgccaacattgtgacgctgcacgacatcatccatacagaaaagtccttgacattggtgttcgaatatctcgacaaagaccttaagcagtatctcgatgattgcggcaacatcattaacatgcataacgtgaagctctttctgtttcaactgctccggggtcttgcctattgtcaccgccagaaagtcctacacagagatcttaaaccgcagaacctgctgattaatgaacgtggggagctcaagttggctgactttggtctcgctcgtgcgaagtccatcccaaccaaaacttacagcaacgaggttgtgactctgtggtatcgccctcccgatatcctgctgggaagtactgattactctacccagatcgacatgtggggagtggggtgcatcttttacgaaatggcaaccggcagaccgttattccctggatccaccgtcgaggagcagctgcactttatctttcgaatacttggtactccaacggaggagacatggccaggtatactgagcaacgaggagttcaaaacatacaactaccctaagtacagggccgaggcgttgttatcccatgctccacggttggattccgatggcgccgatctgctcactaagcttctgcagtttgagggacggaaccgcatctcagctgaggatgctatgaaacatcccttctttctgtccctaggcgagcggatccacaaactaccggatactacttcaatatttgctttaaaggagatccagctccagaaagaagccagcctaagaagtagttctatgccagactctggccggcccgccttcagggtcgtagacaccgagttttag

SEQ ID NO: 162757 - DNA, 570 bp, Artificial Sequence
  derived and/or modified sequence
atggacaggatgaagaagatcaagaggcagctgtccatgaccctgcggggcggccggggcatcgacaagaccaatggagcccctgagcagatcggcctggatgagagcggcggcggcggcggcagtgaccccggggaggcccccaccagggctgcccctggagagctgcggagcgcccggggccccctgagcagcgcccctgagatcgtgcatgaggacctgaagatgggcagtgatggagagagtgaccaggccagcgccaccagcagtgatgaggtgcagagccctgtgcgggtgaggatgaggaaccacccccccaggaagatcagcacagaggacatcaacaagaggctgagcctgcctgctgacatccggctgcctgagggctacctggagaagctgaccctgaacagccccatctttgacaagcccctgagccggcggctgcggcgggtgtccctgtctgaaattggatttgggaagctggagacctacatcaagctggacaagctgggggagggcacctacgccaccgtgtacaagggcaagagcaagctgacagacaactag

SEQ ID NO: 162758 - DNA, 453 bp, Artificial Sequence
  derived and/or modified sequence
atggacaggatgaagaagatcaagaggcagctgtccatgaccctgcggggcggccggggcatcgacaagaccaatggagcccctgagcagatcggcctggatgagagcggcggcggcggcggcagtgaccccggggaggcccccaccagggctgcccctggagagctgcggagcgcccggggccccctgagcagcgcccctgagatcgtgcatgaggacctgaagatgggcagtgatggagagagtgaccaggccagcgccaccagcagtgatgaggtgcagagccctgtgcgggtgaggatgaggaaccacccccccaggaagatcagcacagaggacatcaacaagaggctgagcctgcctgctgacatccggctgcctgagggctacctggagaagctgaccctgaacagccccatctttgacaagcccctgagccggcggctgaggtag

SEQ ID NO: 162759 - DNA, 462 bp, Artificial Sequence
  derived and/or modified sequence
atggacaggatgaagaagatcaagaggcagctgtccatgaccctgcggggcggccggggcatcgacaagaccaatggagcccctgagcagatcggcctggatgagagcggcggcggcggcggcagtgaccccggggaggcccccaccagggctgcccctggagagctgcggagcgcccggggccccctgagcagcgcccctgagatcgtgcatgaggacctgaagatgggcagtgatggagagagtgaccaggccagcgccaccagcagtgatgaggtgcagagccctgtgcgggtgaggatgaggaaccacccccccaggaagatcagcacagaggacatcaacaagaggctgagcctgcctgctgacatccggctgcctgagggctacctggagaagctgaccctgaacagccccatctttgacaagcccctgagccggcggctgcggcgggtgtcctag

SEQ ID NO: 162760 - DNA, 174 bp, Artificial Sequence
  derived and/or modified sequence
atggacaggatgaagaagatcaagaggcagctgtccatgaccctgcggggcggccggggcatcgacaagaccaatggagcccctgagcagatcggcctggatgagagcggcggcggcggcggcagtgaccccggggaggcccccaccagggctgcccctggagagctgaggtag

SEQ ID NO: 162761 - DNA, 1347 bp, Artificial Sequence
  derived and/or modified sequence
atggacaggatgaagaagatcaagaggcagctgtccatgaccctgcggagcgcccctgagatcgtgcatgaggacctgaagatgggcagtgatggagagagtgaccaggccagcgccaccagcagtgatgaggtgcagagccctgtgcgggtgaggatgaggaaccacccccccaggaagatcagcacagaggacatcaacaagaggctgagcctgcctgctgacatccggctgcctgagggctacctggagaagctgaccctgaacagccccatctttgacaagcccctgagccggcggctgcggcgggtgtccctgtctgaaattggatttgggaagctggagacctacatcaagctggacaagctgggggagggcacctacgccaccgtgtacaagggcaagagcaagctgacagacaacctggtggccctgaaggagatccggctggagcacgaggagggcgccccctgcacagccatccgggaggtgtccctgctgaaggacctgaagcacgccaacatcgtgaccctgcatgacatcatccacacagagaagagcctgaccctggtgtttgagtacctggacaaggacctgaagcagtacctggatgactgtggcaacatcatcaacatgcacaacgtgaagctgttcctgttccagctgctgcggggcctggcctactgccaccggcagaaggtgctgcaccgggacctgaagccccagaacctgctgatcaatgaaagaggagagctgaagctggccgactttggcctggcccgggccaagagcatccccaccaagacctacagcaatgaggtggtgaccctgtggtacagacctccagacatcctgctgggcagcacagactacagcacccagattgacatgtggggcgtgggctgcatcttctatgagatggccaccggccggcccctcttccctggcagcacagtggaggagcagctgcacttcatcttccgcatcctgggcacccccacagaggagacctggccaggcatcctgagcaatgaggagttcaagacctacaactaccccaagtacagagctgaggccctgctgagccacgccccccggctggacagtgatggagctgacctgctgaccaagctgctgcagtttgagggcaggaaccgcatctctgcagaagatgccatgaagcaccccttcttcctgagcctgggggagcgcatccacaagctgcctgacaccaccagcatctttgccctgaaggagatccagctgcagaaggaggccagcctgcggagcagctccatgccagacagcggccgcccagccttccgggtggtggacacagagttctag

SEQ ID NO: 162762 - DNA, 570 bp, Artificial Sequence
  derived and/or modified sequence
atggaccggatgaagaagatcaagcggcagctgagcatgaccctgaggggagggcggggtattgataagactaacggggcaccagagcaaatcggtctggatgaaagcgggggggggggaggcagcgatcctggggaagcgccaacccgggccgcaccaggggagctgcggtccgctaggggtcccctgtcatccgcacctgaaattgtccacgaggacctgaaaatggggagtgatggggaaagcgatcaggcgagcgccaccagctccgacgaagtacagtcccctgtacgcgtgcggatgcggaaccaccctccacgaaaaatcagcactgaagacatcaataaaagattgagtcttccagcggacattaggctgccagaaggctatcttgaaaagctgacactgaactccccaattttcgataaacctctcagtcgaagattgaggcgggtctcactgagcgaaatcggctttggtaagcttgagacctacattaagttggataagcttggggaagggacatatgctactgtttacaagggtaagtcaaagctcaccgacaattag

SEQ ID NO: 162763 - DNA, 453 bp, Artificial Sequence
  derived and/or modified sequence
atggaccggatgaagaagatcaagcggcagctgagcatgaccctgaggggagggagaggtattgacaaaaccaatggtgcgccagagcagatcggccttgacgagtcaggtggcggcggcggcagcgatccgggtgaagccccaactcgagctgcacccggagaactgcgcagtgctcggggacctctcagctcggccccggagatcgtgcacgaggacctcaagatgggatccgatggggagtccgaccaggcctccgcaacttcaagtgacgaggttcagtcccctgtaagagtccggatgcgtaatcaccctccaagaaaaatatctaccgaggacatcaacaaacggctgtcactgcccgccgatattagactgccagagggctacctcgagaaactcacattgaattcccccatattcgataaacctttgtcaaggagattaagatag

SEQ ID NO: 162764 - DNA, 462 bp, Artificial Sequence
  derived and/or modified sequence
atggaccggatgaagaagatcaagcggcagctgagcatgaccctgcgaggcggacgtggcatcgacaaaactaacggcgcccctgagcagattggcctcgacgaatctggaggaggcggcggaagcgatcccggagaagcccccacaagagccgctccaggcgagctgcgctcagcaaggggcccactgagcagtgccccagagatcgtgcacgaggatttgaagatgggatccgatggtgagtcagaccaggcttctgccacttcctccgatgaggtgcaatcacccgtgagagtcagaatgcgaaatcacccgccccggaagattagcaccgaagacattaacaaaagacttagtctccctgcagacattagactcccagaaggctatcttgaaaagctgactctgaattctcctatcttcgataagcccctctcaaggcgattgcgaagggtatcttag

SEQ ID NO: 162765 - DNA, 174 bp, Artificial Sequence
  derived and/or modified sequence
atggaccggatgaagaagatcaagcggcagctgagcatgaccctgagaggagggcggggcatcgacaaaaccaacggtgctccggagcagattgggcttgacgaatcgggagggggcggaggaagtgatcccggtgaagctccaactcgggccgctcctggggagctacgatag

SEQ ID NO: 162766 - DNA, 1347 bp, Artificial Sequence
  derived and/or modified sequence
atggaccggatgaagaagatcaagcggcagctgagcatgaccctgcggtctgctccagagatcgtacacgaggatctgaaaatgggaagcgatggtgagtctgaccaggcatccgccactagcagcgacgaagtacagtctcctgtacgggtgagaatgcggaatcatccaccccgcaagatttcaacagaggatatcaataagagactgtcattgcctgcagatattaggttacctgagggatatctcgagaagctcaccctgaattctccaatcttcgacaaaccactgagccgcagattgaggcgcgtatcactgtccgagatcgggtttggcaagctcgaaacctacatcaagttggacaagttaggagagggaacttacgccaccgtgtataagggtaaatctaaattaaccgataacttagtggctctcaaagagatcagactggaacatgaggaaggcgccccgtgcactgctatcagagaggtgagtttgctgaaggatctcaagcatgcgaatatcgtcacgctacatgatatcatccataccgaaaaatcgttaacattagtcttcgagtatcttgataaggatctcaaacagtacctggacgattgcgggaacattattaacatgcataacgttaagctgtttctctttcagttactgcgagggctagcctactgtcatcggcagaaggtgctgcaccgcgatctgaaaccacagaacttactcattaacgagcggggagaactgaagctggctgattttgggcttgccagagctaagtcaatccccaccaagacatactccaatgaagtagttacgttgtggtacaggcctccagatattctgttggggtctacagattattcgacacaaattgacatgtggggcgttggctgcattttctatgaaatggccaccggtcgcccacttttcccagggtccacagttgaggagcagctccacttcatcttccggatactgggcacacccaccgaagaaacatggcctggaattcttagtaacgaagaattcaaaacctataattatcccaagtaccgcgcggaggcactgctcagtcatgctcctcgactcgactctgacggtgccgatctcctgactaaactgctccagttcgaggggcgcaatagaatttccgccgaggacgcgatgaaacacccgtttttcctgagcttgggcgagcgtattcataagctcccagacaccacttcaatttttgccctgaaagagatccaactgcagaaggaagcaagtctccgctcgtcttccatgcccgactccggtcgtcctgcttttcgtgtggtggacactgagttttag

SEQ ID NO: 162767 - DNA, 570 bp, Artificial Sequence
  derived and/or modified sequence
atggatcgtatgaagaaaattaagcggcagctgagtatgaccctgcgcggaggtcggggaatagacaagacaaacggggctcctgaacagattgggctggacgagagcggaggaggaggaggttctgaccctggcgaagcacctacccgcgctgctcccggtgagctccgatccgcccgtggcccattgtcctctgcccctgagattgtgcacgaggacctaaaaatgggctcggatggtgaaagcgatcaagcttcagctacctcgagtgatgaggtccagtcccctgtccgggtacggatgcgaaatcaccctccgaggaaaattagcaccgaggacataaacaaaagattatctctccctgcggacatacgcctgccggagggctatctcgagaaactcaccctgaattctcctatatttgataagcctctgtcaagacggcttcgccgtgtgtctctcagtgagatcggcttcggaaagctggagacctatattaagctcgataaattgggggaaggaacctatgctaccgtgtataaaggaaaatccaagctgacagacaattag

SEQ ID NO: 162768 - DNA, 453 bp, Artificial Sequence
  derived and/or modified sequence
atggatcgcatgaaaaaaatcaagcggcagttgagcatgacactgcgcggaggccgaggaattgataagaccaacggtgccccagaacagattggtcttgatgagtccggcggtgggggaggctcggatcctggagaggctcctacgcgagcagctcctggcgagttgcgttccgctcgaggccctttatctagcgctccagaaatcgtacacgaagatctcaaaatgggctctgatggcgagtctgatcaggcaagcgccaccagctccgatgaagttcagagccccgtgcgggtgaggatgagaaaccatcccccaaggaaaatcagcaccgaagacattaacaagcgtctttcactgcccgctgacatcaggcttcccgaaggctaccttgagaagctcactctaaatagcccaatcttcgataaaccactatcacgaaggctgagatag

SEQ ID NO: 162769 - DNA, 462 bp, Artificial Sequence
  derived and/or modified sequence
atggatcgtatgaagaagatcaaaagacagctgagtatgacattacgcggaggaagaggaatcgataaaactaacggcgcacctgaacaaatcggactggatgaaagtgggggaggaggcggaagtgatcccggagaagcccctacccgcgctgctcctggcgagcttcgctcagcacggggacccctttcttccgctcctgaaatagtgcatgaggacttgaagatgggttccgacggcgaaagcgatcaggcatctgcaacttcaagcgatgaggtacaaagccccgtacgcgtgagaatgcggaatcatcctccgaggaaaatttcgactgaggacatcaataaaaggctttccctgccagccgacatcaggctgccagagggctatctcgagaagctgactctgaactcgcccatcttcgataagcctctgtcaagacgcctgcggagggtttcatag

SEQ ID NO: 162770 - DNA, 174 bp, Artificial Sequence
  derived and/or modified sequence
atggaccgcatgaagaagatcaagcggcagctttctatgacgctccgcggtggcagaggcatcgataaaacgaatggcgctcctgagcagattgggcttgacgaaagcggtggcggtggtggtagtgaccctggagaggcgccaacgcgggctgccccaggagagctgcgttag

SEQ ID NO: 162771 - DNA, 1347 bp, Artificial Sequence
  derived and/or modified sequence
atggatcgcatgaagaagattaaacgacaactttcaatgacgttaagatccgctccggagattgtccatgaggatcttaaaatgggaagcgatggtgagagcgatcaggctagcgccacctcatcagacgaggttcaatcgccagtccgcgtccgcatgagaaatcaccccccacgcaagatctcaacagaagacataaacaaacgcctgtcattaccagcggatatcagactacccgaaggatatctggaaaaactcacactgaattctccaatattcgacaagccactatccaggagactgaggagagtgagcctctcagagataggattcggaaaactcgagacctatattaagctggacaagctcggagaaggcacatatgcaactgtttacaaaggcaagagtaagctaacagataaccttgtggcgcttaaagagattcggctggagcacgaggaaggcgctccctgcacggccatccgcgaggtatcactgctgaaggatctgaagcacgccaacatcgtcactctacacgatatcatccacactgagaagtcattaacactagttttcgagtacttagacaaggatctgaaacagtatctggatgactgtggcaacatcatcaacatgcacaatgtcaagctgtttctctttcagcttctacgaggtcttgcctactgccataggcagaaagtcctccatcgagacctgaaaccccaaaacctcctcataaacgagcggggtgagttgaagctcgcagactttggactcgctagagctaaatctattccaaccaagacctatagtaacgaagtggtcaccttatggtatcgaccccctgacatactcctgggctctacagattattccactcagatagatatgtggggggtgggatgtatattctacgagatggctacaggcagacccctgtttcctggctcaactgttgaagagcaactgcatttcatctttcgtatcctcggcacgccgacagaagagacttggcccggtatcctaagtaatgaagagtttaagacttataactatcccaaataccgcgctgaagccctactttctcacgcaccgcgactcgattctgacggtgctgacctattgaccaaacttctgcaattcgaggggaggaatcggatttcagcagaggacgcgatgaagcatccctttttcctgtccctgggtgaacgcatacacaagctgccagacacgaccagcatctttgctttaaaggaaatccagctccagaaagaggcaagcctgaggagtagttctatgccggattcagggaggccggctttccgtgtggtagacactgaattctag

SEQ ID NO: 162772 - protein, 647 aa, Artificial Sequence
  derived and/or modified sequence
MPLVDFFCETCSKPWLVGWWDQFKRMLNRELTHLSEMSRSGNQVSEYISTTFLDKQNEVEIPSPTMKEREKQQAPRPRPSQPPPPPVPHLQPMSQITGLKKLMHSNSLNNSNIPRFGVKTDQEELLAQELENLNKWGLNIFCVSDYAGGRSLTCIMYMIFQERDLLKKFRIPVDTMVTYMLTLEDHYHADVAYHNSLHAADVLQSTHVLLATPALDAVFTDLEILAALFAAAIHDVDHPGVSNQFLINTNSELALMYNDESVLENHHLAVGFKLLQEDNCDIFQNLSKRQRQSLRKMVIDMVLATDMSKHMTLLADLKTMVETKKVTSSGVLLLDNYSDRIQVLRNMVHCADLSNPTKPLELYRQWTDRIMAEFFQQGDRERERGMEISPMCDKHTASVEKSQVGFIDYIVHPLWETWADLVHPDAQEILDTLEDNRDWYYSAIRQSPSPPPEEESRGPGHPPLPDKFQFELTLEEEEEEEISMAQIPCTAQEALTAQGLSGVEEALDATIAWEASPAQESLEVMAQEASLEAELEAVYLTQQAQSTGSAPVAPDEFSSREEFVVAVSHSSPSALALQSPLLPAWRTLSVSEHAPGLPGLPSTAAEVEAQREHQAAKRACSACAGTFGEDTSALPAPGGGGSGGDPT

SEQ ID NO: 162773 - DNA, 1944 bp, Artificial Sequence
  derived and/or modified sequence
atgccactggtggatttcttttgtgaaacctgctccaaaccatggctagtcgggtggtgggatcagtttaaacgtatgctgaatagggagctcacgcatctgtccgagatgtctcgatcagggaaccaagtgtctgagtacatctcaactacatttctggacaagcagaacgaggtggagatccctagcccaactatgaaggaacgcgaaaagcagcaggcaccgagacctaggcctagccagcctccccctcctcctgttccgcacttgcagccgatgtcacaaattacaggtctgaaaaaattgatgcactcaaactcccttaacaactctaacatccccaggttcggagttaaaacagaccaggaagaattgctggcccaggaactagaaaatctcaacaaatggggtcttaatattttttgcgtgagcgattacgccggcgggcggtcactgacttgcataatgtacatgatattccaggagcgcgacctcctcaagaaatttagaattcccgtggatactatggttacctatatgctcaccctggaggatcattaccatgccgatgtcgcatatcataacagtctgcacgcagcggacgtcctgcagagtacccatgtactgctcgctacacctgccctagacgccgtgttcacagatttagagatcttagccgctttattcgccgccgctatccatgatgtagatcatcccggagtatctaaccagtttctgatcaatactaattccgaactcgcactgatgtacaacgacgaaagtgtgctcgaaaatcaccaccttgccgttggattcaagctacttcaggaagataactgcgatatcttccagaacttatccaaacgccagcgtcagtctcttcgtaagatggtgattgacatggtgctggccactgacatgtctaagcacatgaccctactggccgatctcaaaacaatggtcgaaaccaagaaggttaccagtagcggcgtgctcctgctggacaactattcagatcggattcaagtcctccgaaatatggtgcactgtgctgatctgtctaatcctactaagcccttggagctgtaccggcagtggactgatcgcattatggctgagttctttcaacagggagacagagaaagagagaggggcatggagatctcacccatgtgcgataaacacacagcgtcggtcgagaaatcgcaggtcgggttcattgactatatcgtgcatcccttgtgggaaacctgggccgacttggtgcatcccgacgcccaggaaattctggatactctcgaagataaccgagactggtactacagcgcaattcgacagtcacccagccccccacctgaggaggaatccagaggtcctggacacccacctctgccagacaaattccaatttgagctcactctcgaggaagaggaggaagaagagatttcaatggcgcagattccttgcaccgctcaggaagctctcaccgcacagggcttatcgggagtggaggaggccctcgatgcgaccatcgcttgggaagcgtcacctgcccaggagtcactcgaggttatggcgcaggaagcatccctagaggctgaactggaagccgtgtatcttacccagcaagctcagagcaccggaagcgccccagttgctcccgatgaattctcctcacgagaggaattcgtcgtcgccgtaagccatagttctcctagcgccttggctctgcagagtccccttctccccgcctggagaactttgagcgtctcggagcacgcaccgggacttccaggtcttccaagtaccgccgcagaggtcgaggcacagcgagagcatcaggctgccaagagagcctgttccgcgtgtgccggcaccttcggggaggacacttccgcattgccagctccaggcggcggtggttccggaggagatcctacctag

SEQ ID NO: 162774 - DNA, 1944 bp, Artificial Sequence
  derived and/or modified sequence
atgcccctggtggacttcttctgtgagacctgcagcaagccctggctggtgggctggtgggaccagttcaagaggatgctgaaccgggagctgacccacctgtctgagatgagccgcagcggcaaccaggtgtctgagtacatcagcaccaccttcctggacaagcagaatgaggtggagatccccagccccaccatgaaggagcgggagaagcagcaggccccccggccccggcccagccagcccccacctcctcctgtgccccacctgcagcccatgagccagatcaccggcctgaagaagctgatgcacagcaacagcctgaacaacagcaacatcccccgcttcggcgtgaagacagaccaggaggagctgctggcccaggagctggagaacctgaacaagtggggcctgaacatcttctgtgtgtctgactatgccggcggccgcagcctgacctgcatcatgtacatgatcttccaggagcgggacctgctgaagaagttccgcatccctgtggacaccatggtgacctacatgctgaccctggaggaccactaccacgcagatgtggcctaccacaacagcctgcatgctgctgatgtgctgcagagcacccacgtgctgctggccaccccagccctggatgctgtgttcacagacctggagatcctggccgccctgtttgctgctgccatccatgatgtggaccaccctggggtgagcaaccagttcctgatcaacaccaacagcgagctggccctgatgtacaatgatgaatctgtgctggagaaccaccacctggccgtgggcttcaagctgctgcaggaggacaactgtgacatcttccagaacctgagcaagaggcagaggcagagcctgaggaagatggtgattgacatggtgctggccacagacatgagcaagcacatgaccctgctggccgacctgaagaccatggtggagaccaagaaggtgaccagcagtggagtgctgctgctggacaactacagcgaccgcatccaggtgctgaggaacatggtgcactgtgccgacctgagcaaccccaccaagcccctggagctgtaccggcagtggacagaccgcatcatggccgagttcttccagcagggcgaccgggagcgggagcggggcatggagatcagccccatgtgtgacaagcacacagcctctgtggagaagagccaggtgggcttcatcgactacatcgtgcaccccctgtgggagacctgggccgacctggtgcacccagatgcccaggagatcctggacaccctggaggacaacagagactggtactacagcgccatccggcagagccccagccccccacctgaggaggagagccggggccctggccacccccccctgcctgacaagttccagtttgagctgaccctggaggaggaggaggaggaggagatctccatggcccagatcccctgcacagcccaggaggccctgacagcccagggcctgtctggagtggaggaggccctggatgccaccatcgcctgggaggccagccctgcccaggagagcctggaggtgatggcccaggaggccagcctggaggccgagctggaggccgtgtacctgacccagcaggcccagagcactggaagtgcccctgtggccccagatgagttcagcagccgggaggagtttgtggtggccgtgagccacagcagccccagcgccctggccctgcagagccccctgctgcctgcctggaggaccctgtctgtgtctgaacatgcccctggcctgcccggcctgcccagcacagctgctgaggtggaggcccagcgggagcaccaggccgccaagagggcctgcagcgcctgtgccggcacctttggagaggacaccagcgccctgcctgcccctgggggcggcggcagcggcggggaccccacctag

SEQ ID NO: 162775 - DNA, 1944 bp, Artificial Sequence
  derived and/or modified sequence
atgcccctggtggacttcttctgcgagacctgcagcaagccctggctggtgggctggtgggaccagttcaaacgcatgctgaacagggagctaactcacttgtcagagatgagcagatcaggcaaccaggtctctgagtatatctccactacttttctggacaagcagaatgaagtggagatcccgtctccgaccatgaaggagagggagaagcaacaggctccccgccctagaccctcccagccccccccccctccagttccccacctgcagcccatgagtcaaatcactgggttaaaaaagctcatgcatagcaattccctgaataatagtaacattccccgcttcggggttaagacggatcaggaggagctgttggcccaggagcttgaaaaccttaacaagtggggattgaatattttttgtgtgtctgactacgccggaggccggtcactcacttgcattatgtacatgatttttcaggagagggacttgcttaagaaatttcggatccccgtggacaccatggtaacgtatatgctcacccttgaggatcattaccacgcagacgttgcttaccataactctttacacgctgctgatgtgctccaatccactcatgtgttgctggccacccctgctctcgatgctgtgtttacagatctcgaaatcctggccgccctctttgccgcagctattcatgatgtggaccatccaggtgtatcaaatcagttccttatcaatactaattccgaactggcactcatgtacaacgatgagtctgtactggagaaccaccacctggcggtcggatttaagcttcttcaggaagacaactgcgacatattccagaatctttcaaaacggcagcgccaatccttgcggaagatggttatcgacatggtgctggccacggatatgtccaagcatatgaccctcctggctgacttaaaaactatggtcgagaccaaaaaagtcacatcctctggagtgctgctactagataactatagcgatcggattcaagtcctgaggaacatggttcactgcgcagacctgtcaaaccccaccaagcctctggagttgtacagacaatggacggacagaattatggcagaattctttcagcagggcgaccgggaacgcgagcggggaatggaaatctcaccgatgtgcgacaagcacaccgcctctgtcgaaaagagtcaggtaggcttcatcgattacatcgtacaccccctgtgggaaacctgggctgacttagtgcacccggacgcacaggagattttagatactctcgaggataaccgcgattggtattacagcgcgattcgccagtcgcccagcccaccacctgaggaggagagtcgcggtcctggacacccccctctgccggacaagtttcagttcgagctgacgttggaggaggaggaagaagaggaaatcagcatggcccaaattccttgcacagcccaagaggcactcactgcccagggtttaagtggtgttgaggaggccttggatgccaccattgcttgggaggcctctcccgctcaggaaagcctagaagtgatggcccaggaggcttccctggaggctgagctcgaagcggtgtatctcactcagcaggcccagagtacagggagcgccccagtggctcccgatgagtttagctcccgagaggagttcgtggtcgctgtcagccatagcagcccttccgcgctcgccctgcaaagtccactgcttccagcctggcggaccctttcagtgagcgagcacgcccctggacttcccggtctgccaagtacggccgccgaggttgaagcgcaacgggaacaccaggcggctaaacgtgcttgctcagcctgcgccggtacttttggtgaagatactagcgcactcccggctcccggcggggggggatctggtggagacccaacatag

SEQ ID NO: 162776 - DNA, 4259 bp, Artificial Sequence
  derived and/or modified sequence
tccgcagcctcctcctgggacccttgccctgcccccctcccatgggcacggaccccccaccgcctccacccactgccgcgggggggcccgttggggcccagggctggcgggccatgtaaccagggctgctgctgggagcgcggaggggaagggagcccccagccctgctgggccggcccaggcccctccgcggctcccccttccactacccacctgcccggcaccccctccccagtggttgttaaccccgggactccccaagcccagcctctgtgtgcagcagccccaggcgggctaagtctccaagatgcccttggtggatttcttctgcgagacctgctctaagccttggctggtgggctggtgggaccagttcaaaaggatgttgaaccgtgagctcacacacctgtcagaaatgagcaggtccggaaaccaggtctcagagtacatttccacaacattcctggacaaacagaatgaagtggagatcccatcacccacgatgaaggaacgagaaaaacagcaagcgccgcgaccaagaccctcccagccgcccccgccccctgtaccacacttacagcccatgtcccaaatcacagggttgaaaaagttgatgcatagtaacagcctgaacaactctaacattccccgatttggggtgaagaccgatcaagaagagctcctggcccaagaactggagaacctgaacaagtggggcctgaacatcttttgcgtgtcggattacgctggaggccgctcactcacctgcatcatgtacatgatattccaggagcgggacctgctgaagaaattccgcatccctgtggacacgatggtgacatacatgctgacgctggaggatcactaccacgctgacgtggcctaccataacagcctgcacgcagctgacgtgctgcagtccacccacgtactgctggccacgcctgcactagatgcagtgttcacggacctggagattctcgccgccctcttcgcggctgccatccacgatgtggatcaccctggggtctccaaccagttcctcatcaacaccaattcggagctggcgctcatgtacaacgatgagtcggtgctcgagaatcaccacctggccgtgggcttcaagctgctgcaggaggacaactgcgacatcttccagaacctcagcaagcgccagcggcagagcctacgcaagatggtcatcgacatggtgctggccacggacatgtccaagcacatgaccctcctggctgacctgaagaccatggtggagaccaagaaagtgaccagctcaggggtcctcctgctagataactactccgaccgcatccaggtcctccggaacatggtgcactgtgccgacctcagcaaccccaccaagccgctggagctgtaccgccagtggacagaccgcatcatggccgagttcttccagcagggtgaccgagagcgcgagcgtggcatggaaatcagccccatgtgtgacaagcacactgcctccgtggagaagtctcaggtgggttttattgactacattgtgcacccattgtgggagacctgggcggaccttgtccacccagatgcccaggagatcttggacactttggaggacaaccgggactggtactacagcgccatccggcagagcccatctccgccacccgaggaggagtcaagggggccaggccacccacccctgcctgacaagttccagtttgagctgacgctggaggaggaagaggaggaagaaatatcaatggcccagataccgtgcacagcccaagaggcattgactgcgcagggattgtcaggagtcgaggaagctctggatgcaaccatagcctgggaggcatccccggcccaggagtcgttggaagttatggcacaggaagcatccctggaggccgagctggaggcagtgtatttgacacagcaggcacagtccacaggcagtgcacctgtggctccggatgagttctcgtcccgggaggaattcgtggttgctgtaagccacagcagcccctctgccctggctcttcaaagcccccttctccctgcttggaggaccctgtctgtttcagagcatgccccgggcctcccgggcctcccctccacggcggccgaggtggaggcccaacgagagcaccaggctgccaagagggcttgcagtgcctgcgcagggacatttggggaggacacatccgcactcccagctcctggtggcggggggtcaggtggagaccctacctgatccccagacctctgtccctgttcccctccactcctcccctcactcccctgctcccccgaccacctcctcctctgcctcaaagactcttgtcctcttgtccctcctgagaaaaaagaaaacgaaaagtggggtttttttctgttttctttttttcccctttccccctgcccccacccacggggcctttttttggaggtgggggctggggaatgaggggctgaggtcccggaagggattttatttttttgaattttaattgtaacatttttagaaaaagaacaaaaaaagaaaaaaaaaagaaagaaacacagcaactgtagatgctcctgttcctggttcccgctttccacttccaaatccctcccctcaccttcccccactgccccccaagttccaggctcagtcttccagccgcctggggagtctctacctgggcccaagcaggtgtggggcctccttctgggcttttcttctgaatttagaggatttctagaacgtggtcaggaatagccattctaggcggggctggggccagggtggggggcagtcactgtgggaggtcccagctccagcccccctctggtttgctgcctcctctcccctctaaaaaagtcttccgcttgattttgcacaatcccggcgatactcctggcgatactgactagaaagtcagggagctgggggagctgttcactttaggatacgggggtggtatggaagggagcgttcacaccgccagcctcgggcctgggatttgaggagggccctagacctcctccactctccatcccctttcccttccactttgggttcactttgaattttctccgttttttggggcagtggctctgatccactcacccccccgccccccgccccacttctagctgcttctcctcttgtttctgccttaataattcccacggccacaggcaagggggttgcagtggccgcctgcaccttggatgaggcagggccaggcgcccagaacccccatcctggccgcacccccctttccagggtcctccggaccccaccttccacactctgatcacagcccccctaccttttgccctaggaggaagcaataatggtgtataccctcattctcattcctgggcagcccttccttccaccctggcaccaaaataatttctcctccatccgtaccttgcctagcctctccctctcccccagctagtccctgagcaatacggcagacagatgcaagaccatttttctccaagccatgggggactgtttggaaggaaagccccctctctccctcctcccctcgccctcggcctggttctgcagctggaccgacctcattcatcgcctgccccctacccaattctgagcacacggtactgtagcccccagttcctccctagccttccatccctctgtccaccccagggggaggtaaccccgcactcacactcccttgatgctgtctgtacagggttcatattttgtagcgaaagtcgtttttgtcccagccggcgatcggagtgggccttttctttctttttgttcattctttacctttttttcttttctttctttcttttttgtacatactgtaaggttggtttgtaaattattctacggaggcaaaaagggaaaataaaaacttgcccttccctggctgacccagtcgggaaggtagggaaggaggtctcccgttgggagagtctctgttcctgctgtattatacaaactgtaccatagtcctgggaaaagggtggactcaccgctgttgttttatgggaagtcgtgtcatcctaggggttggggctgggcagagcctgtcccctccccccttctccaggagccagggggtgactggagagacagacccacccccaagcagggctcctctccccagggtgagcacaggacctctgtaagctgcttgtgtattgtccactttgacgatcagtcattcggtccgttgatcaataatccttcgatcttgtctccaattaaaccgaggctttcaccg

SEQ ID NO: 162777 - DNA, 1944 bp, Artificial Sequence
  derived and/or modified sequence
atgccactggtagactttttctgtgaaacgtgctccaagccctggctggttggctggtgggatcagtttaagaggatgttgaaccgcgaactgactcatcttagtgagatgagccgctccgggaaccaggtttccgagtacatctccactacctttttggacaaacagaacgaagtggaaatcccgtccccgaccatgaaagagagggaaaagcagcaggctccacgacctcgcccatcacagcctcctccgccacccgtcccccacctgcagcccatgtcccaaattactggacttaaaaagctcatgcattctaacagtcttaacaactcaaacattccgagattcggagtcaagacagatcaagaggaactactggcacaggagctggaaaacctcaataaatggggccttaatatcttctgtgtgagtgactacgccggaggccgttccttaacatgcattatgtatatgatttttcaggagcgtgacctgttgaaaaaatttcgcatcccagtagatactatggtgacgtacatgcttacccttgaggatcactatcacgcagacgtcgcctaccacaattccctgcacgccgctgatgtgcttcagtctacccatgtactccttgctactcctgcactggacgcagtgtttaccgatctagagatcctggctgcactattcgctgcagctattcatgatgtcgaccaccctggagttagcaatcagtttttgatcaacacgaatagcgaactggcactgatgtataatgacgagagtgtcctcgagaaccatcacctcgccgtcggtttcaaattgcttcaggaagataactgtgacatttttcagaacttatcaaagaggcagaggcagagcctgcgaaaaatggttatcgatatggtgttggcaacagacatgtcaaagcacatgaccctgctggccgacctgaaaacaatggttgagacaaagaaggtcacctcctccggcgtgcttctgctcgacaattactccgacaggattcaggtgctaagaaacatggtgcattgtgcggacctgtcgaatcctaccaagccattggagctgtacagacagtggacagataggatcatggccgagttcttccaacaaggtgacagagaaagagagcgcggtatggagataagcccgatgtgcgacaaacacacagcaagtgtagagaagagtcaggtgggctttattgattatatcgtgcatccgctatgggagacttgggcggatctggtgcatccagacgcccaagaaatcttggacacattagaggataacagggactggtattactcagctattaggcagagccccagtccccctccagaagaagagagtagggggccaggccaccctccgttgcccgacaaatttcaattcgagctcacattggaagaagaggaggaggaggaaataagtatggcgcagattccctgtaccgcccaggaggctctcacagctcaggggctttcgggcgtcgaggaagcactggatgcaaccatagcctgggaggcgtccccagctcaggaaagcttggaggtgatggctcaggaggcctccttggaggctgaacttgaggctgtgtatctgacacagcaggcccaatccactggcagcgcaccggtagcgccagatgaatttagtagtcgagaagagtttgttgttgctgtgagtcattccagtccaagtgccctcgcactgcagagccctctgctgccggcatggcggacattgagcgtgagcgaacacgcacctggcctgcccggtctcccctctacagctgccgaggtggaggcgcagcgcgaacaccaggccgctaaaagggcctgctcggcctgcgcagggactttcggagaggatacctctgccctgccagctcctggaggcggtggatcggggggagaccctacgtag

SEQ ID NO: 162778 - DNA, 1944 bp, Artificial Sequence
  derived and/or modified sequence
atgcccctggtggacttcttctgcgagacctgcagcaagccctggctggtgggctggtgggaccagttcaagagaatgctgaacagagagctgacccacctgagcgagatgagcagaagcggcaaccaggtgagcgagtacatcagcaccaccttcctggacaagcagaacgaggtggagatccccagccccaccatgaaggagagagagaagcagcaggcccccagacccagacccagccagcccccccccccccccgtgccccacctgcagcccatgagccagatcaccggcctgaagaagctgatgcacagcaacagcctgaacaacagcaacatccccagattcggcgtgaagaccgaccaggaggagctgctggcccaggagctggagaacctgaacaagtggggcctgaacatcttctgcgtgagcgactacgccggcggcagaagcctgacctgcatcatgtacatgatcttccaggagagagacctgctgaagaagttcagaatccccgtggacaccatggtgacctacatgctgaccctggaggaccactaccacgccgacgtggcctaccacaacagcctgcacgccgccgacgtgctgcagagcacccacgtgctgctggccacccccgccctggacgccgtgttcaccgacctggagatcctggccgccctgttcgccgccgccatccacgacgtggaccaccccggcgtgagcaaccagttcctgatcaacaccaacagcgagctggccctgatgtacaacgacgagagcgtgctggagaaccaccacctggccgtgggcttcaagctgctgcaggaggacaactgcgacatcttccagaacctgagcaagagacagagacagagcctgagaaagatggtgatcgacatggtgctggccaccgacatgagcaagcacatgaccctgctggccgacctgaagaccatggtggagaccaagaaggtgaccagcagcggcgtgctgctgctggacaactacagcgacagaatccaggtgctgagaaacatggtgcactgcgccgacctgagcaaccccaccaagcccctggagctgtacagacagtggaccgacagaatcatggccgagttcttccagcagggcgacagagagagagagagaggcatggagatcagccccatgtgcgacaagcacaccgccagcgtggagaagagccaggtgggcttcatcgactacatcgtgcaccccctgtgggagacctgggccgacctggtgcaccccgacgcccaggagatcctggacaccctggaggacaacagagactggtactacagcgccatcagacagagccccagccccccccccgaggaggagagcagaggccccggccacccccccctgcccgacaagttccagttcgagctgaccctggaggaggaggaggaggaggagatcagcatggcccagatcccctgcaccgcccaggaggccctgaccgcccagggcctgagcggcgtggaggaggccctggacgccaccatcgcctgggaggccagccccgcccaggagagcctggaggtgatggcccaggaggccagcctggaggccgagctggaggccgtgtacctgacccagcaggcccagagcaccggcagcgcccccgtggcccccgacgagttcagcagcagagaggagttcgtggtggccgtgagccacagcagccccagcgccctggccctgcagagccccctgctgcccgcctggagaaccctgagcgtgagcgagcacgcccccggcctgcccggcctgcccagcaccgccgccgaggtggaggcccagagagagcaccaggccgccaagagagcctgcagcgcctgcgccggcaccttcggcgaggacaccagcgccctgcccgcccccggcggcggcggcagcggcggcgaccccacctag

SEQ ID NO: 162779 - protein, 673 aa, Artificial Sequence
  derived and/or modified sequence
MMHVNNFPFRRHSWICFDVDNGTSAGRSPLDPMTSPGSGLILQANFVHSQRRESFLYRSDSDYDLSPKSMSRNSSIASDIHGDDLIVTPFAQVLASLRTVRNNFAALTNLQDRAPSKRSPMCNQPSINKATITEEAYQKLASETLEELDWCLDQLETLQTRHSVSEMASNKFKRMLNRELTHLSEMSRSGNQVSEFISNTFLDKQHEVEIPSPTQKEKEKKKRPMSQISGVKKLMHSSSLTNSSIPRFGVKTEQEDVLAKELEDVNKWGLHVFRIAELSGNRPLTVIMHTIFQERDLLKTFKIPVDTLITYLMTLEDHYHADVAYHNNIHAADVVQSTHVLLSTPALEAVFTDLEILAAIFASAIHDVDHPGVSNQFLINTNSELALMYNDSSVLENHHLAVGFKLLQEENCDIFQNLTKKQRQSLRKMVIDIVLATDMSKHMNLLADLKTMVETKKVTSSGVLLLDNYSDRIQVLQNMVHCADLSNPTKPLQLYRQWTDRIMEEFFRQGDRERERGMEISPMCDKHNASVEKSQVGFIDYIVHPLWETWADLVHPDAQDILDTLEDNREWYQSTIPQSPSPAPDDPEEGRQGQTEKFQFELTLEEDGESDTEKDSGSQVEEDTSCSDSKTLCTQDSESTEIPLDEQVEEEAVGEEEESQPEACVIDDRSPDT

SEQ ID NO: 162780 - DNA, 2037 bp, Artificial Sequence
  derived and/or modified sequence
atgttcatctactccttcaacaagttctttttcaaaacaacacattgctgggccataatatcctttgatgtcgacaacggcaccagcgcgggtaggtcacctctggatccaatgaccagccccggctctggactaatcctccaggcaaacttcgtgcattcacaacgtagagagtctttcctttaccggagcgacagcgattatgatctctcccctaagagcatgagccgtaattcctccatagcctcagatatacacggggacgatctgatcgtcacacccttcgcacaagtcttggcgtccctgcggactgtccgcaataactttgcggcgctaacaaatctgcaagacagagcaccttctaaacgatccccaatgtgtaatcagccttcaatcaacaaggccaccattactgaagaggcctatcagaaactcgccagtgaaactttggaggaacttgattggtgcctcgatcagctagagacactgcagaccagacatagcgtttctgagatggccagcaataaattcaagagaatgctgaatcgagaactgacacacctgtcagagatgagccggagcgggaaccaagtttccgaatttattagtaataccttcctcgataagcaacacgaggtcgagattccctcccctacccagaaggagaaagagaaaaaaaaacgccctatgtcccagatttcaggagtgaagaaactgatgcactccagtagcctgaccaacagctcaattccgcgtttcggggtgaaaacagagcaggaagacgtattggctaaggaactggaggacgttaacaagtgggggctccatgtgtttcgcattgccgagctgagcggaaacagaccccttaccgtaattatgcacacaattttccaagagcgagacctactcaagaccttcaaaatacccgttgacaccctgattacgtaccttatgacactggaagaccactaccacgccgacgtcgcataccacaataacattcatgcagccgacgtggtccagtctacgcacgtcctgctgtccacccccgcactggaggctgtgttcacagacttggagattttggctgccatcttcgcaagtgctattcatgatgtcgatcatccaggcgtgtccaatcagtttctcatcaacactaactctgagctcgcactaatgtacaacgatagctcagtcctggaaaatcaccatcttgccgtgggattcaaactcctgcaggaggaaaattgcgacatattccagaatcttactaaaaaacaacggcagtccttaagaaagatggtcatcgacattgtgctggccaccgacatgagtaagcatatgaacctgctggccgaccttaagactatggtagaaaccaaaaaggtgacctcaagtggtgtgctccttctggacaattatagcgatcggatccaggtgctgcagaatatggtgcattgtgcagacctgtctaatccgacaaagccattacagctctacaggcaatggacggaccgcattatggaggagtttttccgtcaaggagatcgggaacgagaaagggggatggaaatctcaccaatgtgcgacaaacacaatgcctcagtggaaaagtcccaagtcggtttcatagactacattgtgcacccgctctgggaaacctgggcggacttagtccaccccgacgcccaggacatcttggacacgctcgaggataatcgtgaatggtatcagtccactatcccacaaagtccatctcctgcaccggacgatcctgaagaagggcggcaaggacagaccgaaaagttccagtttgaattgacccttgaagaagatggcgagagcgacaccgagaaagattctgggtctcaggtggaggaggacacttcatgctctgactccaagacgctctgcacacaggatagcgaatctaccgaaatccctttagacgagcaagtcgaggaagaagctgtgggcgaggaggaggaatcgcagcctgaggcatgcgtcatcgatgataggagtcctgatacctag

SEQ ID NO: 162781 - DNA, 2022 bp, Artificial Sequence
  derived and/or modified sequence
atgatgcatgtgaataactttccctttcggagacacagctggatttgcttcgatgttgacaatgggacctctgctgggaggagtcccctcgatcctatgacctcccccggatctggcctgattctacaggccaacttcgtccacagccaacgccgcgaaagcttcctctaccgcagtgatagcgattacgatctgagtcctaaatcaatgagcaggaactcatcaatcgcttctgacattcacggtgacgacctcattgtgacgccatttgcgcaggtgctagcttcactacggactgtgaggaataatttcgctgccctcacgaacctgcaggacagggcaccgtcgaaaagaagccccatgtgcaaccaaccaagtattaacaaggccaccatcactgaggaggcctatcaaaaattagcatccgagactcttgaggagctggactggtgtctggaccagttggagacactccagacccgtcactcagtgagcgagatggccagcaacaagtttaagagaatgttgaacagagagttgacgcatttgagcgagatgtctcgctcagggaaccaggtgagcgaattcataagcaacacattcctagacaaacagcacgaagtcgaaattcctagtcctacccagaaggagaaggagaagaaaaagagaccaatgagccagatatctggtgtcaagaagctgatgcactcaagcagcctgactaatagctctattcccaggtttggagtcaagactgagcaggaagatgttttggctaaggagctggaggatgttaataaatggggacttcacgtatttcggatcgcggagctgtccgggaatcggccactgacggtcattatgcacaccatttttcaggagcgtgatctgttgaagacattcaagatccccgtggacacacttatcacgtatctcatgacattagaggatcactaccatgccgatgtagcttatcacaacaacattcacgccgcagacgtcgtccagagcacacacgtactgctctctactcctgccttggaggccgtgttcacagacctcgaaatactggctgcgatatttgcatccgcaatccatgatgttgatcacccgggtgtcagcaatcagttcctcattaacaccaatagcgagctggctctgatgtataatgatagttccgtcttagaaaatcatcacttggctgttggcttcaagctattacaagaagagaactgtgatatctttcagaatcttactaaaaaacaacggcagagcctgagaaagatggtgatcgacatcgtgctggcaacagacatgagcaagcacatgaatctccttgccgatctaaagaccatggtagaaaccaaaaaggtcacctccagcggcgtgctgcttttagataattattccgaccggattcaggtgctgcagaacatggtacattgcgctgacctaagtaatcccacaaagccgcttcagctatatcgtcaatggacagaccggattatggaggagttttttaggcagggagaccgcgagagagagaggggaatggaaattagccctatgtgtgacaagcataacgccagcgttgagaagagccaggtcggcttcatcgactacattgtgcacccactctgggagacctgggccgatctggtgcatcctgatgctcaggatattctggacaccctggaagacaacagagaatggtaccaaagtactattccacaaagtccgtctcctgctcctgatgacccggaagaaggcagacaggggcagactgagaaatttcagttcgagctgactttagaagaggatggcgagtccgatactgaaaaggactccggcagccaggttgaggaagacactagttgcagcgatagtaaaacactctgcactcaggatagcgagtccacagagatccccctcgatgagcaagtagaggaggaggccgtaggcgaggaagaagagtcccagcctgaggcatgtgtgatcgatgatagatccccagatacgtag

SEQ ID NO: 162782 - DNA, 2037 bp, Artificial Sequence
  derived and/or modified sequence
atgttcatctacagcttcaacaagttcttcttcaagaccacccactgctgggccatcatcagctttgatgtggacaatggcaccagcgctggccgcagccccctggaccccatgaccagccctggcagcggcctcatcctgcaggccaactttgtgcacagccagaggcgggagagcttcctgtacagaagtgacagcgactatgacctgagccccaagtccatgagcaggaacagcagcatcgccagtgacatccatggagatgacctgattgtgaccccatttgcccaggtgctggccagcctgaggacagtgaggaacaactttgctgccctgaccaacctgcaggaccgggcccccagcaagaggagccccatgtgcaaccagcccagcatcaacaaggccaccatcacagaggaggcctaccagaagctggccagcgagaccctggaggagctggactggtgcctggaccagctggagaccctgcagaccaggcacagcgtgtctgagatggccagcaacaagttcaagaggatgctgaaccgggagctgacccacctgtctgagatgagccgcagcggcaaccaggtgtctgagttcatcagcaacaccttcctggacaagcagcacgaggtggagatccccagccccacccagaaggagaaggagaagaagaagaggcccatgagccagatcagcggcgtgaagaagctgatgcacagcagcagcctgaccaacagcagcatccccaggtttggagtgaagacagagcaggaggatgtgctggccaaggagctggaggatgtgaacaagtggggcctgcacgtgttcagaattgctgagctgagcggcaaccggcccctgaccgtcatcatgcacaccatcttccaggagcgggacctgctgaagaccttcaagatccctgtggacaccctcatcacctacctgatgaccctggaggaccactaccacgcagatgtggcctaccacaacaacatccacgccgcagatgtggtgcagagcacccacgtgctgctgagcaccccagccctggaggccgtgttcacagacctggagatcctggccgccatctttgccagcgccatccatgatgtggaccaccctggggtgagcaaccagttcctgatcaacaccaacagcgagctggccctgatgtacaatgacagctctgtgctggagaaccaccacctggccgtgggcttcaagctgctgcaggaggagaactgtgacatcttccagaacctgaccaagaagcagaggcagagcctgaggaagatggtgattgacatcgtgctggccacagacatgagcaagcacatgaacctgctggccgacctgaagaccatggtggagaccaagaaggtgaccagcagcggcgtgctgctgctggacaactacagcgaccgcatccaggtgctgcagaacatggtgcactgtgccgacctgagcaaccccaccaagcccctgcagctgtaccggcagtggacagaccgcatcatggaggagttcttccggcagggcgaccgggagcgggagcggggcatggagatcagccccatgtgtgacaagcacaatgcctctgtggagaagagccaggtgggcttcatcgactacatcgtgcaccccctgtgggagacctgggccgacctggtgcacccagatgcccaggacatcctggacaccctggaggacaaccgggagtggtaccagagcaccatcccccagagccccagccctgccccagatgatcctgaggagggccggcagggccagacagagaagttccagtttgagctgaccctggaggaggatggagagagtgacacagagaaggacagcggcagccaggtggaggaggacaccagctgcagcgacagcaagaccctgtgcacccaggacagcgagagcacagagatccccctggatgagcaggtggaggaggaggccgtgggggaggaggaggagagccagcctgaggcctgtgtgattgatgacaggagcccagacacctag

SEQ ID NO: 162783 - DNA, 2022 bp, Artificial Sequence
  derived and/or modified sequence
atgatgcacgtgaacaacttccccttccgccgccacagctggatctgctttgatgtggacaatggcaccagcgctggccgcagccccctggaccccatgaccagccctggcagcggcctcatcctgcaggccaactttgtgcacagccagaggcgggagagcttcctgtacagaagtgacagcgactatgacctgagccccaagtccatgagcaggaacagcagcatcgccagtgacatccatggagatgacctgattgtgaccccatttgcccaggtgctggccagcctgaggacagtgaggaacaactttgctgccctgaccaacctgcaggaccgggcccccagcaagaggagccccatgtgcaaccagcccagcatcaacaaggccaccatcacagaggaggcctaccagaagctggccagcgagaccctggaggagctggactggtgcctggaccagctggagaccctgcagaccaggcacagcgtgtctgagatggccagcaacaagttcaagaggatgctgaaccgggagctgacccacctgtctgagatgagccgcagcggcaaccaggtgtctgagttcatcagcaacaccttcctggacaagcagcacgaggtggagatccccagccccacccagaaggagaaggagaagaagaagaggcccatgagccagatctctggagtgaagaagctgatgcacagcagcagcctgaccaacagcagcatcccccgcttcggcgtgaagacagagcaggaggatgtgctggccaaggagctggaggatgtgaacaagtggggcctgcacgtgttcagaattgctgagctgagcggcaaccggcccctgaccgtcatcatgcacaccatcttccaggagcgggacctgctgaagaccttcaagatccctgtggacaccctcatcacctacctgatgaccctggaggaccactaccacgcagatgtggcctaccacaacaacatccatgctgctgatgtggtgcagagcacccacgtgctgctgagcaccccagccctggaggccgtgttcacagacctggagatcctggccgccatctttgccagcgccatccatgatgtggaccaccctggggtgagcaaccagttcctgatcaacaccaacagcgagctggccctgatgtacaatgacagctctgtgctggagaaccaccacctggccgtgggcttcaagctgctgcaggaggagaactgtgacatcttccagaacctgaccaagaagcagaggcagagcctgaggaagatggtgattgatattgtgctggccacagacatgagcaagcacatgaacctgctggccgacctgaagaccatggtggagaccaagaaggtgaccagcagtggagtgctgctgctggacaactacagcgaccgcatccaggtgctgcagaacatggtgcactgtgccgacctgagcaaccccaccaagcccctgcagctgtaccggcagtggacagaccgcatcatggaggagttcttccggcagggcgaccgggagcgggagcggggcatggagatcagccccatgtgtgacaagcacaatgcctctgtggagaagagccaggtgggcttcatcgactacatcgtgcaccccctgtgggagacctgggccgacctggtgcacccagatgcccaggacatcctggacaccctggaggacaaccgggagtggtaccagagcaccatcccccagagccccagccctgccccagatgatcctgaggagggccggcagggccagacagagaagttccagtttgagctgaccctggaggaggatggagagagtgacacagagaaggacagcggcagccaggtggaggaggacaccagctgcagcgacagcaagaccctgtgcacccaggacagcgagagcacagagatccccctggatgagcaggtggaggaggaggccgtgggggaggaggaggagagccagcctgaggcctgtgtgattgatgacaggagcccagacacctag

SEQ ID NO: 162784 - DNA, 2037 bp, Artificial Sequence
  derived and/or modified sequence
atgttcatctacagcttcaacaagttcttcttcaagaccacccactgctgggcaataattagttttgacgtggataacggcacatcggccggccgttcgcctcttgaccccatgactagcccgggttccgggttgatcttacaggcaaatttcgtccattcacagcggcgggaatcttttctctacagatcagactccgattacgacctgagccctaaatcaatgtcccgtaacagttccatagcaagtgacattcatggcgatgaccttattgtgactcccttcgctcaagtcttagctagcctgaggaccgttagaaacaattttgccgcgctgacaaaccttcaggaccgcgcaccctcgaagaggagcccaatgtgcaatcagcctagcatcaataaagcgacaattaccgaagaagcctaccagaagctggccagcgaaactctcgaggaattagattggtgcctggatcaactggaaaccctacagacccgccatagcgtgtccgagatggctagcaataaatttaaaagaatgctgaatcgagagctcactcacctatcagagatgagccgctccggaaaccaggtgagcgaattcatctcgaacactttcctagacaaacagcatgaggtcgagatcccaagtccaacacaaaaggaaaaagagaaaaagaaacggccaatgtcacagatctccggggtgaagaagctcatgcattcttctagtttgaccaactcatccatacctcgattcggagtcaaaacagagcaagaagacgtcctggcaaaggaattggaagatgtgaacaaatggggtctgcacgtgtttcgcattgctgagctgtctggcaaccggccccttaccgtcataatgcatacgatttttcaagaaagggacctcttgaaaacattcaagatccccgtggacacgttgatcacctacctgatgactctcgaggaccactaccatgccgatgtggcttaccacaacaacatccacgctgctgacgttgtgcagtccactcacgtgctgctgagcaccccagccctagaagccgtgttcacggatttagagatattagccgccatatttgccagcgccatccatgatgtcgaccacccaggcgtatcaaaccagtttctcattaacacaaatagtgaattagcccttatgtacaacgacagctcggtgctagagaaccaccatcttgctgtcggcttcaagctcttacaggaagagaattgtgatatattccagaatctaaccaaaaagcaacggcagagtctccggaaaatggttattgatattgtcctggctaccgacatgagcaagcatatgaatcttctggccgacctcaagacaatggtagaaacaaagaaggtgacctcatcaggcgtgctcctgctcgacaactacagcgatcggatccaagttctacaaaatatggtccattgcgcagatctgagcaacccaaccaaacccctccagctgtatcggcagtggaccgacaggatcatggaggagttcttccggcaaggggatcgcgagcgggaaaggggcatggagatcagcccaatgtgtgacaaacacaatgcaagcgtcgaaaagagccaggtgggatttatagattacattgtgcatcctctgtgggaaacctgggccgatctggtgcaccccgatgcccaggacatcctggacacactagaggacaaccgggagtggtatcagtccaccattcctcagtccccgtcgccagcccccgacgatcctgaagagggtcgacaggggcagaccgagaagtttcaattcgagttgactcttgaagaagatggagagtcagacaccgaaaaagactccgggtcccaagtggaagaggacacgagttgctcagattcaaagaccctgtgtactcaggacagcgagtcaaccgagatcccactggacgaacaggtggaggaggaggccgtcggcgaggaggaggaaagccaacctgaggcctgtgtgatagacgacaggtctcccgatacctag

SEQ ID NO: 162785 - DNA, 2022 bp, Artificial Sequence
  derived and/or modified sequence
atgatgcacgtgaacaacttccccttccggcggcacagctggatctgcttcgatgtcgacaacgggacctccgcaggacgaagcccacttgaccctatgacttcccccggctctggcctgattctgcaggcaaatttcgtgcacagccagcggcgggaaagctttctgtacaggtctgattctgattacgatctgagtcctaagagcatgtctcgcaactctagtatcgctagcgatatccatggggacgacctaattgttactccattcgcgcaggttttggccagtcttaggaccgtccggaacaattttgcggcccttaccaatctgcaggatcgtgctccttcaaagcgctcacccatgtgtaatcagccatctatcaacaaggccaccattaccgaggaagcttatcagaaactagccagcgagacactcgaagaattggactggtgtctcgaccagctggagactctgcagacaagacacagtgtctctgaaatggcgtctaataagttcaagcggatgctgaaccgggaactcactcacttaagtgagatgagcaggtcgggtaatcaggtcagtgaatttattagtaacacctttctggataagcagcacgaagtggaaatcccctcaccaactcaaaaagaaaaggagaagaagaagcgtccaatgagtcagattagtggcgttaaaaagctaatgcattcatcctccctgacaaattcatcaatcccccggttcggcgtgaagacggaacaggaggacgttttggcgaaagagcttgaagatgtcaacaaatggggcctgcacgtatttagaattgccgaactgagtggcaataggcctctcaccgtcatcatgcacaccatattccaagagcgcgacttattaaagaccttcaagatccctgtggacaccttaatcacctacctaatgacattagaggatcattaccacgccgatgtcgcctaccacaataatatacacgcagctgacgttgtccaatctacccatgtgctcctctcgactcctgctcttgaagcagtgttcaccgacctggaaatccttgctgccatcttcgcttcagccatacacgacgtggaccatccaggtgtctccaatcaatttctgattaacaccaattccgagcttgcgctgatgtataatgatagctccgtgctggaaaaccaccatctggccgtaggctttaaactgctacaggaagagaactgtgacatctttcagaacttaacaaagaagcagagacagagtctgagaaaaatggttatagatatcgtcctagcaaccgacatgagtaaacacatgaacctgctcgcagacctgaagacaatggtggaaaccaaaaaggtaacgagctccggtgtcttactgctcgataattattccgatcgcattcaggtcctgcaaaatatggtccattgcgcagacctgtccaatcccacaaaacctctgcaactatatcgccagtggacagatcgaattatggaagaatttttccgccaaggcgatcgcgagagagagagaggcatggaaatttccccgatgtgcgacaaacacaacgcttccgtggagaaaagccaggtgggattcatcgactacatcgtgcatcctctatgggaaacctgggcagacctggtgcaccctgacgctcaggatattctagacacactggaggataatcgggagtggtaccagagcaccatcccccagtcgccatctcctgccccagacgaccccgaggaaggacggcagggccagaccgagaagttccagttcgaactcaccttggaagaggacggagagtcggataccgagaaggacagcggcagtcaggtcgaggaggatacatcctgtagcgatagcaaaacgttgtgtacacaggattctgaatccacggagatacccctggacgaacaggtcgaagaggaggcagtgggtgaggaagaggaatcacagccggaggcctgcgtgattgatgaccgctctcccgacacctag

SEQ ID NO: 162786 - DNA, 7690 bp, Artificial Sequence
  derived and/or modified sequence
ggaaaatattaatgacagcaaaacttgaattcacatgtttatttattctttcaacaagtttttctttaaaaccacacactgctgggctatcataagttttgatgtggacaatggcacatctgcgggacggagtcccttggatcccatgaccagcccaggatccgggctaattctccaagcaaattttgtccacagtcaacgacgggagtccttcctgtatcgatccgacagcgattatgacctctctccaaagtctatgtcccggaactcctccattgccagtgatatacacggagatgacttgattgtgactccatttgctcaggtcttggccagtctgcgaactgtacgaaacaactttgctgcattaactaatttgcaagatcgagcacctagcaaaagatcacccatgtgcaaccaaccatccatcaacaaagccaccataacagaggaggcctaccagaaactggccagcgagaccctggaggagctggactggtgtctggaccagctagagaccctacagaccaggcactccgtcagtgagatggcctccaacaagtttaaaaggatgcttaatcgggagctcacccatctctctgaaatgagtcggtctggaaatcaagtgtcagagtttatatcaaacacattcttagataagcaacatgaagtggaaattccttctccaactcagaaggaaaaggagaaaaagaaaagaccaatgtctcagatcagtggagtcaagaaattgatgcacagctctagtctgactaattcaagtatcccaaggtttggagttaaaactgaacaagaagatgtccttgccaaggaactagaagatgtgaacaaatggggtcttcatgttttcagaatagcagagttgtctggtaaccggcccttgactgttatcatgcacaccatttttcaggaacgggatttattaaaaacatttaaaattccagtagatactttaattacatatcttatgactctcgaagaccattaccatgctgatgtggcctatcacaacaatatccatgctgcagatgttgtccagtctactcatgtgctattatctacacctgctttggaggctgtgtttacagatttggagattcttgcagcaatttttgccagtgcaatacatgatgtagatcatcctggtgtgtccaatcaatttctgatcaatacaaactctgaacttgccttgatgtacaatgattcctcagtcttagagaaccatcatttggctgtgggctttaaattgcttcaggaagaaaactgtgacattttccagaatttgaccaaaaaacaaagacaatctttaaggaaaatggtcattgacatcgtacttgcaacagatatgtcaaaacacatgaatctactggctgatttgaagactatggttgaaactaagaaagtgacaagctctggagttcttcttcttgataattattccgataggattcaggttcttcagaatatggtgcactgtgcagatctgagcaacccaacaaagcctctccagctgtaccgccagtggacggaccggataatggaggagttcttccgccaaggagaccgagagagggaacgtggcatggagataagccccatgtgtgacaagcacaatgcttccgtggaaaaatcacaggtgggcttcatagactatattgttcatcccctctgggagacatgggcagacctcgtccaccctgacgcccaggatattttggacactttggaggacaatcgtgaatggtaccagagcacaatccctcagagcccctctcctgcacctgatgacccagaggagggccggcagggtcaaactgagaaattccagtttgaactaactttagaggaagatggtgagtcagacacggaaaaggacagtggcagtcaagtggaagaagacactagctgcagtgactccaagactctttgtactcaagactcagagtctactgaaattccccttgatgaacaggttgaagaggaggcagtaggggaagaagaggaaagccagcctgaagcctgtgtcatagatgatcgttctcctgacacgtaacagtgcaaaaactttcatgccttttttttttttaagtagaaaaattgtttccaaagtgcatgtcacatgccacaaccacggtcacacctcactgtcatctgccaggacgtttgttgaacaaaactgaccttgactactcagtccagcgctcaggaatatcgtaaccagttttttcacctccatgtcatccgagcaaggtggacatcttcacgaacagcgtttttaacaagatttcagcttggtagagctgacaaagcagataaaatctactccaaattattttcaagagagtgtgactcatcaggcagcccaaaagtttattggacttggggtttctattcctttttatttgtttgcaatattttcagaagaaaggcattgcacagagtgaacttaatggacgaagcaacaaatatgtcaagaacaggacatagcacgaatctgttaccagtaggaggaggatgagccacagaaattgcataattttctaatttcaagtcttcctgatacatgactgaatagtgtggttcagtgagctgcactgacctctacattttgtatgatatgtaaaacagattttttgtagagcttacttttattattaaatgtattgaggtattatatttaaaaaaaactatgttcagaacttcatctgccactggttatttttttctaaggagtaacttgcaagttttcagtacaaatctgtgctacactggataaaaatctaatttatgaattttacttgcaccttatagttcatagcaattaactgatttgtagtgattcattgtttgttttatataccaatgacttccatattttaaaagagaaaaacaactttatgttgcaggaaaccctttttgtaagtctttattatttactttgcattttgtttcactctttccagataagcagagttgctcttcaccagtgtttttcttcatgtgcaaagtgactatttgttctataatacttttatgtgtgttatatcaaatgtgtcttaagcttcatgcaaactcagtcatcagttcgtgttgtctgaagcaagtgggagatatataaatacccagtagctaaaatggtcagtcttttttagatgttttcctacttagtatctcctaataacgttttgctgtgtcactagatgttcatttcacaagtgcatgtctttctaataatccacacatttcatgctctaataatccacacatttcatgctcatttttattgtttttacagccagttatagtaagaaaaaggtttttccccttgtgctgctttataatttagcgtgtgtctgaaccttatccatgtttgctagatgaggtcttgtcaaatatatcactaccattgtcaccggtgaaaagaaacaggtagttaagttagggttaacattcatttcaaccacgaggttgtatatcatgactagcttttactcttggtttacagagaaaagttaaacagccaactaggcagtttttaagaatattaacaatatattaacaaacaccaatacaactaatcctatttggttttaatgatttcaccatgggattaagaactatatcaggaacatccctgagaaacggttttaagtgtagcaactactcttccttaatggacagccacataacgtgtaggaagtcctttatcacttatcctcgatccataagcatatcttgcagaggggaactacttctttaaacacatggagggaaagaagatgatgccactggcaccagagggttagtactgtgatgcatcctaaaatatttattatattggtaaaaattctggttaaataaaaaattagagatcactcttggctgatttcagcaccaggaactgtattacagttttagagattaattcctagtgtttacctgattatagcagttggcatcatggggcatttaattctgactttatccccacgtcagccttaataaagtcttctttaccttctctatgaagactttaaagcccaaataatcatttttcacattgatattcaagaattgagatagatagaagccaaagtgggtatctgacaagtggaaaatcaaacgtttaagaagaattacaactctgaaaagcatttatatgtggaacttctcaaggagcctcctggggactggaaagtaagtcatcagccaggcaaatgactcatgctgaagagagtccccatttcagtcccctgagatctagctgatgcttagatcctttgaaataaaaattatgtctttataactctgatcttttacataaagcagaagaggaatcaactagttaattgcaaggtttctactctgtttcctctgtaaagatcagatggtaatctttcaaataagaaaaaaataaagacgtatgtttgaccaagtagtttcacaagaatatttgggaacttgtttcttttaattttatttgtccctgagtgaagtctagaaagaaaggtaaagagtctagagtttattcctctttccaaaacattctcattcctctcctccctacacttagtatttcccccacagagtgcctagaatcttaataatgaataaaataaaaagcagcaatatgtcattaacaaatccagacctgaaagggtaaagggtttataactgcactaataaagagaggctctttttttttcttccagtttgttggtttttaatggtaccgtgttgtaaagatacccactaatggacaatcaaattgcagaaaaggctcaatatccaagagacagggactaatgcactgtacaatctgcttatccttgcccttctctcttgccaaagtgtgcttcagaaatatatactgctttaaaaaagaataaaagaatatccttttacaagtggctttacatttcctaaaatgccataagaaaatgcaatatctgggtactgtatggggaaaaaaatgtccaagtttgtgtaaaaccagtgcatttcagcttgcaagttactgaacacaataatgctgttttaattttgttttatatcagttaaaattcacaataatgtagatagaacaaattacagacaaggaaagaaaaaacttgaatgaaatggattttacagaaagctttatgataatttttgaatgcattatttattttttgtgccatgcattttttttctcaccaaatgaccttacctgtaatacagtcttgtttgtctgtttacaaccatgtatttattgcaatgtacatactgtaatgttaattgtaaattatctgttcttattaaaacatcatcccatgatgggatggtgttgatatatttggaaactcttggtgagagaatgaatggtgtgtatacatactctgtacatttttcttttctcctgtaatatagtcttgtcaccttagagcttgtttatggaagattcaagaaaactataaaatacttaaagatatataaatttaaaaaaacatagctgcaggtctttggtcccagggctgtgccttaactttaaccaatattttcttctgttttgctgcatttgaaaggtaacagtggagctagggctgggcattttacatccaggcttttaattgattagaattctgccaataggtggattttacaaaaccacagacaacctctgaaagattctgagacccttttgagacagaagctcttaagtacttcttgccagggagcagcactgcatgtgtgatggttgtttgccatctgttgatcaggaactacttcagctacttgcatttgattatttcctttttttttttttttaactcggaaacacaactggggaaatatattctttcccagtgattataaacaatctttttcttttttttaagtccttttggcttctagagctcataggaaaatggacttgatttgaaattggagccagagtttactcgtgttggttatctattcatcagcttcctgacatgttaagagaatacattaaagagaaaatactgttttttaatcctaaaatttttcttccactaagataaaccaaatgtccttacatatatgtaaacccatctatttaaacgcaaaggtgggttgatgtcagtttacatagcagaaagcattcactatcctctaagatttgtttctgcaaaactttcattgctttagaattttaaaatttcaccttgtacaatggccagcccctaaagcaggaaacatttataatggattatatggaaacatcctcccagtacttgcccagcccttgaatcatgtggcttttcagtgaaaggaaagattctttttctaggaaaaatgagcctattttattttattttattttattttttgacacaaactgtagattttagcagccctggcccaaaggaatttgattacttttgttttaaacagtacaaaggggacactataattacaaaaacatccttaactgatttgagttgtttttatttctttggatatattttcagagtggtaaattgtgtgtgagaattacaaatgattattcttttagtggtttcttagcctctcttacagcccacggggatagtactgtacatcaataccttcatatgaaatttttatatgcaatgaaaataaaagcatgggttgattctgcctatttatgactcaatcttttacaaataaaagattattcattttaaattatagttcaatcagcatgtctcttaggatactgaacgtggttgaaatgaaaggatagtgacatcataagttagtactgatattcataaccaaataaagccaacttgagtaattttgctacattaaaaattaccaaaattacttagatggcctataagattaagcatggtgttttctaagcaagctttgaaaggggccttccatacttacttaattgaatattctgggatattgaaaattattcagatacttgacaattatttttggttacctactccgcaaactacaaagttttaaggactcaacaataagttaatgagacacagtgtttgctttcatggagcttacagtctggaggggacaaaggcttaaacaatactcatataattatatatgtgatcagtacaatgaaggagctcagtggggtaaataagcaggaacctgaacttgatctgttccggagggccacagaaggcttccttgaggccttgagaaagtgatttgcatctgagttctgaaggattgtaagaggtaactagggaaaaagttgacaggaagaggaaggggatccagacaagaaacatttgcaaagatcttgaggcataaatgagcttgagacatctggagaaactgaggaaaagtgagagagtaggcagggcctggagccgcagagccattgctaaccatcctgtgtgagatatcccccattctgtagctttattctcataaccctgctcaattttctttataacacttctcacagatttatatacgtgtttgtttttgttatctgtctctcccaccagaccacagctccatgagagcaaggtctttgcttaccaatatatcactagcacttaaaactatgcctggtacacagtaggttcttaatatgtgttgaatatagccatcaaattgatattggatataattcaatctgataagatattttgagatattaaagagtttttaacttgatacc

SEQ ID NO: 162787 - DNA, 3122 bp, Artificial Sequence
  derived and/or modified sequence
caatacttgttgcaataattgcccacgatagctgctcaaacaagagagttggaattcatctgtaaaaatcactacatgtaacgtaggagacaagaaaaatattaatgacagaagatctgcgaacatgatgcacgtgaataattttccctttagaaggcattcctggatatgttttgatgtggacaatggcacatctgcgggacggagtcccttggatcccatgaccagcccaggatccgggctaattctccaagcaaattttgtccacagtcaacgacgggagtccttcctgtatcgatccgacagcgattatgacctctctccaaagtctatgtcccggaactcctccattgccagtgatatacacggagatgacttgattgtgactccatttgctcaggtcttggccagtctgcgaactgtacgaaacaactttgctgcattaactaatttgcaagatcgagcacctagcaaaagatcacccatgtgcaaccaaccatccatcaacaaagccaccataacagaggaggcctaccagaaactggccagcgagaccctggaggagctggactggtgtctggaccagctagagaccctacagaccaggcactccgtcagtgagatggcctccaacaagtttaaaaggatgcttaatcgggagctcacccatctctctgaaatgagtcggtctggaaatcaagtgtcagagtttatatcaaacacattcttagataagcaacatgaagtggaaattccttctccaactcagaaggaaaaggagaaaaagaaaagaccaatgtctcagatcagtggagtcaagaaattgatgcacagctctagtctgactaattcaagtatcccaaggtttggagttaaaactgaacaagaagatgtccttgccaaggaactagaagatgtgaacaaatggggtcttcatgttttcagaatagcagagttgtctggtaaccggcccttgactgttatcatgcacaccatttttcaggaacgggatttattaaaaacatttaaaattccagtagatactttaattacatatcttatgactctcgaagaccattaccatgctgatgtggcctatcacaacaatatccatgctgcagatgttgtccagtctactcatgtgctattatctacacctgctttggaggctgtgtttacagatttggagattcttgcagcaatttttgccagtgcaatacatgatgtagatcatcctggtgtgtccaatcaatttctgatcaatacaaactctgaacttgccttgatgtacaatgattcctcagtcttagagaaccatcatttggctgtgggctttaaattgcttcaggaagaaaactgtgacattttccagaatttgaccaaaaaacaaagacaatctttaaggaaaatggtcattgacatcgtacttgcaacagatatgtcaaaacacatgaatctactggctgatttgaagactatggttgaaactaagaaagtgacaagctctggagttcttcttcttgataattattccgataggattcaggttcttcagaatatggtgcactgtgcagatctgagcaacccaacaaagcctctccagctgtaccgccagtggacggaccggataatggaggagttcttccgccaaggagaccgagagagggaacgtggcatggagataagccccatgtgtgacaagcacaatgcttccgtggaaaaatcacaggtgggcttcatagactatattgttcatcccctctgggagacatgggcagacctcgtccaccctgacgcccaggatattttggacactttggaggacaatcgtgaatggtaccagagcacaatccctcagagcccctctcctgcacctgatgacccagaggagggccggcagggtcaaactgagaaattccagtttgaactaactttagaggaagatggtgagtcagacacggaaaaggacagtggcagtcaagtggaagaagacactagctgcagtgactccaagactctttgtactcaagactcagagtctactgaaattccccttgatgaacaggttgaagaggaggcagtaggggaagaagaggaaagccagcctgaagcctgtgtcatagatgatcgttctcctgacacgtaacagtgcaaaaactttcatgccttttttttttttaagtagaaaaattgtttccaaagtgcatgtcacatgccacaaccacggtcacacctcactgtcatctgccaggacgtttgttgaacaaaactgaccttgactactcagtccagcgctcaggaatatcgtaaccagttttttcacctccatgtcatccgagcaaggtggacatcttcacgaacagcgtttttaacaagatttcagcttggtagagctgacaaagcagataaaatctactccaaattattttcaagagagtgtgactcatcaggcagcccaaaagtttattggacttggggtttctattcctttttatttgtttgcaatattttcagaagaaaggcattgcacagagtgaacttaatggacgaagcaacaaatatgtcaagaacaggacatagcacgaatctgttaccagtaggaggaggatgagccacagaaattgcataattttctaatttcaagtcttcctgatacatgactgaatagtgtggttcagtgagctgcactgacctctacattttgtatgatatgtaaaacagattttttgtagagcttacttttattattaaatgtattgaggtattatatttaaaaaaaactatgttcagaacttcatctgccactggttatttttttctaaggagtaacttgcaagttttcagtacaaatctgtgctacactggataaaaatctaatttatgaattttacttgcaccttatagttcatagcaattaactgatttgtagtgattcattgtttgttttatataccaatgacttccatattttaaaagagaaaaacaactttatgttgcaggaaaccctttttgtaagtctttattatttactttgcattttgtttcactctttccagataagcagagttgctcttcaccagtgtttttcttcatgtgcaaagtgactatttgttctataatac

SEQ ID NO: 162788 - DNA, 2037 bp, Artificial Sequence
  derived and/or modified sequence
atgttcatttactcctttaataaattttttttcaagacaacccattgttgggccatcattagtttcgatgtagataacggaactagcgctggtaggtctccattagaccctatgaccagtccaggcagcggactaattctccaggcgaactttgtgcatagtcaacggcgagaatcgtttctgtatagatccgattcggattacgaccttagccctaaatccatgagccggaatagtagtattgcaagtgacattcacggggatgatctgattgtcactcctttcgctcaggtgctggcatcgttgaggacagtgagaaacaattttgccgcactcacgaatctccaagatagagctcccagtaaaaggtcgccgatgtgtaaccagccgtctatcaataaagcaacgatcaccgaggaagcgtaccagaagctcgcaagcgaaaccctagaagaactcgactggtgcctggaccagcttgagactcttcagacccgtcactcagtgtcagagatggctagcaataagtttaagcgaatgctgaacagggagctcacccatctctctgagatgtctcgcagtggaaaccaggtgagcgagttcataagtaacaccttcctcgacaagcagcatgaggtggaaatcccttcaccaacccagaaggagaaagaaaagaagaaacgaccaatgagccaaatctcaggggttaaaaagctgatgcatagttcctcactgacaaattctagcatccccaggtttggcgtaaaaaccgaacaagaggatgtcctcgccaaagagctggaagacgttaataaatgggggctacacgtcttcagaattgctgaactttcggggaacaggcctctgaccgtgataatgcacacaattttccaggagagagacctgcttaagacattcaaaatccccgtggatacgctgattacttatctgatgaccctggaggaccactatcatgccgacgttgcctatcacaacaacatacacgccgcagacgtcgtgcagagtacacatgtgctcctgtccacccctgcacttgaagccgtgttcactgacctcgaaattttggccgctatcttcgccagtgctattcatgatgtagaccaccccggagtgagtaatcaattcctaatcaataccaactctgagctggcgctgatgtataatgactccagcgtcctggagaaccatcacctggcagtgggtttcaagctgctccaagaagagaactgtgacattttccagaatctcactaaaaagcagaggcagtcactgcgcaagatggtgattgatatagtccttgccaccgatatgagtaagcacatgaacctcctcgccgatctgaagaccatggtggagactaaaaaagtgacaagtagtggcgtccttttacttgacaattacagcgaccgaattcaggtcctgcagaatatggtccattgcgctgatctttccaatcccactaaacctcttcagctttatcggcagtggacagaccggattatggaagaattcttcaggcagggcgatcgggagagagagagaggcatggagatcagtcccatgtgcgacaagcataatgcatcggtcgaaaagtcccaagtcgggttcatcgattatatcgtacaccccctgtgggaaacatgggccgacctggtacatcccgatgcccaggatatactcgacaccttggaagacaatagggaatggtatcagagtactataccccaaagcccttcgccagcccctgatgacccggaggaggggagacaaggacaaacagagaagtttcagttcgaacttactctggaagaggatggtgaatcggacaccgagaaagactcgggtagccaagtggaggaagatactagttgtagcgacagcaagaccctgtgcactcaggactcagagtcaactgaaattccactagacgagcaggtggaagaagaggcagtgggtgaagaagaagaatcacagcccgaggcttgtgtcatcgacgaccgctccccagatacttag

SEQ ID NO: 162789 - DNA, 2022 bp, Artificial Sequence
  derived and/or modified sequence
atgatgcatgttaataacttcccttttaggaggcacagttggatttgtttcgatgttgacaacggaactagcgccggtagatcgccgctggatcccatgactagcccaggcagtggcctaattcttcaagccaattttgtgcactctcagcggagagagtccttcctttaccgttcagatagcgattatgatctctctccgaaatcaatgtctagaaactcttccatcgctagcgatattcacggggacgacctgatcgttacacccttcgcccaagttttagcttcactacgcacagtccgaaacaactttgccgctctcacaaatctacaagacagggctccttccaaacgaagcccaatgtgtaatcagccttctataaataaggccacaataactgaggaggcataccagaaactggcgtccgagaccttggaagagttagattggtgcctggatcagctggagacactccagactcggcacagtgtgtcggagatggcctcaaacaagtttaaacgtatgctgaatagagaactaactcacctctcagaaatgtcacgttcaggaaatcaggtcagtgagtttataagcaacacttttttggacaaacagcatgaggtcgaaataccctctcctacccagaaggagaaagagaaaaagaagaggccaatgagtcagatcagcggcgtgaaaaagctgatgcatagctcctccctgaccaactcctctataccacgctttggagtcaagacagagcaggaagacgtactagctaaggagctcgaggacgtaaataaatgggggctgcacgtgttcagaatcgcagagctgtctgggaatcggcctcttaccgttataatgcataccatattccaggagcgggatctactcaaaacctttaagattcctgtggataccctaatcacttacctgatgacgctagaagaccattaccatgccgatgtggcctaccacaacaacattcatgccgctgatgttgtgcagtcaacgcatgtcctgctctccacacctgctctggaggccgttttcaccgacctggagatcctcgcagccatatttgcctcagcgattcacgacgttgaccaccctggagtttccaatcagttccttatcaatacaaactctgagctggccctgatgtacaacgatagttctgtcttggaaaaccatcatttagctgttgggtttaaactgcttcaggaagaaaactgtgatatctttcaaaacttaactaaaaagcaaaggcagtctctccggaaaatggtcatagatatcgtgcttgccactgacatgtcaaagcatatgaatttgctggcggacttgaagaccatggtcgaaactaagaaggtgacttcctctggcgtgctgctattggataactactccgaccgcattcaggtcttgcaaaacatggttcattgtgctgacctatcaaaccccactaagcctctgcagctgtatcgccagtggaccgatcggatcatggaagaatttttccgccagggagaccgtgaacgcgaaaggggaatggagatttccccaatgtgtgataagcataacgctagtgtggagaaatcacaggtggggttcatcgactacatagtccacccactgtgggagacctgggctgacctggtgcatccagacgcccaggacatcctggacaccctggaggataatcgggaatggtatcaatctaccattccccagagcccttcaccagctcctgatgatcccgaggaagggaggcaaggccaaacagagaagtttcagtttgaactcactctcgaagaggacggcgagtctgataccgaaaaagactccgggagtcaagtggaggaagacacctcatgttccgacagcaagacattgtgcacccaggatagcgaatccaccgaaatcccgctcgacgagcaagttgaggaggaggcagtgggcgaggaagaggagtcgcagcctgaggcttgcgtgattgatgatcgatcccccgatacatag

SEQ ID NO: 162790 - DNA, 2037 bp, Artificial Sequence
  derived and/or modified sequence
atgttcatctacagcttcaacaagttcttcttcaagaccacccactgctgggccatcatcagcttcgacgtggacaacggcaccagcgccggcagaagccccctggaccccatgaccagccccggcagcggcctgatcctgcaggccaacttcgtgcacagccagagaagagagagcttcctgtacagaagcgacagcgactacgacctgagccccaagagcatgagcagaaacagcagcatcgccagcgacatccacggcgacgacctgatcgtgacccccttcgcccaggtgctggccagcctgagaaccgtgagaaacaacttcgccgccctgaccaacctgcaggacagagcccccagcaagagaagccccatgtgcaaccagcccagcatcaacaaggccaccatcaccgaggaggcctaccagaagctggccagcgagaccctggaggagctggactggtgcctggaccagctggagaccctgcagaccagacacagcgtgagcgagatggccagcaacaagttcaagagaatgctgaacagagagctgacccacctgagcgagatgagcagaagcggcaaccaggtgagcgagttcatcagcaacaccttcctggacaagcagcacgaggtggagatccccagccccacccagaaggagaaggagaagaagaagagacccatgagccagatcagcggcgtgaagaagctgatgcacagcagcagcctgaccaacagcagcatccccagattcggcgtgaagaccgagcaggaggacgtgctggccaaggagctggaggacgtgaacaagtggggcctgcacgtgttcagaatcgccgagctgagcggcaacagacccctgaccgtgatcatgcacaccatcttccaggagagagacctgctgaagaccttcaagatccccgtggacaccctgatcacctacctgatgaccctggaggaccactaccacgccgacgtggcctaccacaacaacatccacgccgccgacgtggtgcagagcacccacgtgctgctgagcacccccgccctggaggccgtgttcaccgacctggagatcctggccgccatcttcgccagcgccatccacgacgtggaccaccccggcgtgagcaaccagttcctgatcaacaccaacagcgagctggccctgatgtacaacgacagcagcgtgctggagaaccaccacctggccgtgggcttcaagctgctgcaggaggagaactgcgacatcttccagaacctgaccaagaagcagagacagagcctgagaaagatggtgatcgacatcgtgctggccaccgacatgagcaagcacatgaacctgctggccgacctgaagaccatggtggagaccaagaaggtgaccagcagcggcgtgctgctgctggacaactacagcgacagaatccaggtgctgcagaacatggtgcactgcgccgacctgagcaaccccaccaagcccctgcagctgtacagacagtggaccgacagaatcatggaggagttcttcagacagggcgacagagagagagagagaggcatggagatcagccccatgtgcgacaagcacaacgccagcgtggagaagagccaggtgggcttcatcgactacatcgtgcaccccctgtgggagacctgggccgacctggtgcaccccgacgcccaggacatcctggacaccctggaggacaacagagagtggtaccagagcaccatcccccagagccccagccccgcccccgacgaccccgaggagggcagacagggccagaccgagaagttccagttcgagctgaccctggaggaggacggcgagagcgacaccgagaaggacagcggcagccaggtggaggaggacaccagctgcagcgacagcaagaccctgtgcacccaggacagcgagagcaccgagatccccctggacgagcaggtggaggaggaggccgtgggcgaggaggaggagagccagcccgaggcctgcgtgatcgacgacagaagccccgacacctag

SEQ ID NO: 162791 - DNA, 2022 bp, Artificial Sequence
  derived and/or modified sequence
atgatgcacgtgaacaacttccccttcagaagacacagctggatctgcttcgacgtggacaacggcaccagcgccggcagaagccccctggaccccatgaccagccccggcagcggcctgatcctgcaggccaacttcgtgcacagccagagaagagagagcttcctgtacagaagcgacagcgactacgacctgagccccaagagcatgagcagaaacagcagcatcgccagcgacatccacggcgacgacctgatcgtgacccccttcgcccaggtgctggccagcctgagaaccgtgagaaacaacttcgccgccctgaccaacctgcaggacagagcccccagcaagagaagccccatgtgcaaccagcccagcatcaacaaggccaccatcaccgaggaggcctaccagaagctggccagcgagaccctggaggagctggactggtgcctggaccagctggagaccctgcagaccagacacagcgtgagcgagatggccagcaacaagttcaagagaatgctgaacagagagctgacccacctgagcgagatgagcagaagcggcaaccaggtgagcgagttcatcagcaacaccttcctggacaagcagcacgaggtggagatccccagccccacccagaaggagaaggagaagaagaagagacccatgagccagatcagcggcgtgaagaagctgatgcacagcagcagcctgaccaacagcagcatccccagattcggcgtgaagaccgagcaggaggacgtgctggccaaggagctggaggacgtgaacaagtggggcctgcacgtgttcagaatcgccgagctgagcggcaacagacccctgaccgtgatcatgcacaccatcttccaggagagagacctgctgaagaccttcaagatccccgtggacaccctgatcacctacctgatgaccctggaggaccactaccacgccgacgtggcctaccacaacaacatccacgccgccgacgtggtgcagagcacccacgtgctgctgagcacccccgccctggaggccgtgttcaccgacctggagatcctggccgccatcttcgccagcgccatccacgacgtggaccaccccggcgtgagcaaccagttcctgatcaacaccaacagcgagctggccctgatgtacaacgacagcagcgtgctggagaaccaccacctggccgtgggcttcaagctgctgcaggaggagaactgcgacatcttccagaacctgaccaagaagcagagacagagcctgagaaagatggtgatcgacatcgtgctggccaccgacatgagcaagcacatgaacctgctggccgacctgaagaccatggtggagaccaagaaggtgaccagcagcggcgtgctgctgctggacaactacagcgacagaatccaggtgctgcagaacatggtgcactgcgccgacctgagcaaccccaccaagcccctgcagctgtacagacagtggaccgacagaatcatggaggagttcttcagacagggcgacagagagagagagagaggcatggagatcagccccatgtgcgacaagcacaacgccagcgtggagaagagccaggtgggcttcatcgactacatcgtgcaccccctgtgggagacctgggccgacctggtgcaccccgacgcccaggacatcctggacaccctggaggacaacagagagtggtaccagagcaccatcccccagagccccagccccgcccccgacgaccccgaggagggcagacagggccagaccgagaagttccagttcgagctgaccctggaggaggacggcgagagcgacaccgagaaggacagcggcagccaggtggaggaggacaccagctgcagcgacagcaagaccctgtgcacccaggacagcgagagcaccgagatccccctggacgagcaggtggaggaggaggccgtgggcgaggaggaggagagccagcccgaggcctgcgtgatcgacgacagaagccccgacacctag

SEQ ID NO: 162792 - protein, 858 aa, Artificial Sequence
  derived and/or modified sequence
MGEINQVAVEKYLEENPQFAKEYFDRKLRVEVLGEIFKNSQVPVQSSMSFSELTQVEESALCLELLWTVQEEGGTPEQGVHRALQRLAHLLQADRCSMFLCRSRNGIPEVASRLLDVTPTSKFEDNLVGPDKEVVFPLDIGIVGWAAHTKKTHNVPDVKKNSHFSDFMDKQTGYVTKNLLATPIVVGKEVLAVIMAVNKVNASEFSKQDEEVFSKYLNFVSIILRLHHTSYMYNIESRRSQILMWSANKVFEELTDVERQFHKALYTVRSYLNCERYSIGLLDMTKEKEFYDEWPIKLGEVEPYKGPKTPDGREVNFYKIIDYILHGKEEIKVIPTPPADHWTLISGLPTYVAENGFICNMMNAPADEYFTFQKGPVDETGWVIKNVLSLPIVNKKEDIVGVATFYNRKDGKPFDEHDEYITETLTQFLGWSLLNTDTYDKMNKLENRKDIAQEMLMNQTKATPEEIKSILKFQEKLNVDVIDDCEEKQLVAILKEDLPDPRSAELYEFRFSDFPLTEHGLIKCGIRLFFEINVVEKFKVPVEVLTRWMYTVRKGYRAVTYHNWRHGFNVGQTMFTLLMTGRLKKYYTDLEAFAMLAAAFCHDIDHRGTNNLYQMKSTSPLARLHGSSILERHHLEYSKTLLQDESLNIFQNLNKRQFETVIHLFEVAIIATDLALYFKKRTMFQKIVDACEQMQTEEEAIKYVTVDPTKKEIIMAMMMTACDLSAITKPWEVQSQVALMVANEFWEQGDLERTVLQQQPIPMMDRNKRDELPKLQVGFIDFVCTFVYKEFSRFHKEITPMLSGLQNNRVEWKSLADEYDAKMKVIEEEAKKQEGGAEKAAEDSGGGDDKKSKTCLML

SEQ ID NO: 162793 - DNA, 2577 bp, Artificial Sequence
  derived and/or modified sequence
atgggcgaaattaatcaagtggctgtcgagaagtatctcgaagagaacccacaatttgccaaagagtatttcgaccgaaagttaagagtggaagttctgggcgaaatttttaagaatagccaggttcctgtgcagagctccatgtctttttcagaacttacccaagttgaggagtccgctctgtgcctggaactgctgtggactgtgcaggaggagggcggaactcccgagcagggggtacatcgcgctctgcaacggctcgcccatctgctgcaggcagatagatgcagtatgtttctatgcagatctcgcaatggcattcctgaagtggcgtctagactgttggacgtgacgccaacaagcaagtttgaggacaacttggttggacccgacaaggaagtcgtgtttcccctggacattggtattgtaggctgggccgcacacacaaagaaaacgcataatgtacctgatgttaagaaaaattctcacttcagtgatttcatggacaaacagacaggatatgtgactaaaaatctgcttgcgacccccatcgtcgtggggaaggaggtgctcgcggtgatcatggcggttaataaggttaatgcatccgaattctctaagcaggatgaggaggttttcagcaagtacttgaatttcgtctccatcatcctacgcctgcaccacacttcctacatgtacaacattgagagcagacggtctcaaatacttatgtggtcagccaataaggtctttgaagagctgactgatgtcgaaagacagtttcacaaagccttgtatacagtcagatcataccttaactgtgagcggtattcgataggactgctggacatgactaaggagaaggagttttacgatgagtggcctataaagctcggcgaagttgaaccatacaagggccccaaaacccctgatggacgcgaggtgaatttttacaagatcatcgactacatcctacacggaaaagaggaaattaaggtgataccgaccccacctgcagatcattggacactgatcagcgggctacctacatatgttgcagagaacggattcatctgcaatatgatgaacgccccagctgacgaatactttacatttcagaaaggtccggtcgacgaaacagggtgggtcataaagaacgtgctgagcctgccgattgttaacaaaaaggaagacattgttggtgtggcgacattttataatagaaaggatgggaaaccattcgacgagcacgatgagtacatcaccgagaccctcacccaattcctcggatggtcactgctgaatacagatacttacgataaaatgaacaaattggaaaaccggaaagacatcgcacaagagatgctaatgaaccaaactaaagccacacccgaggagattaaatcgatcttgaagtttcaggagaagctcaacgtggatgtgatcgacgattgcgaggaaaagcagctggtggcgatcctcaaagaggacttgcccgacccccgttccgccgagctctacgaatttcggttctcagattttcctttgacagagcatggcctgattaagtgtgggatccgattattttttgagataaacgtcgtagaaaagttcaaagtcccggtcgaggtcttgacccggtggatgtacactgtcagaaaaggctaccgcgccgtgacataccataattggcggcacggatttaacgtgggtcagacgatgttcaccctgctgatgaccgggcggcttaaaaagtattacacagacctggaagcatttgccatgctcgcagctgccttttgtcatgacatcgaccaccgtggcacgaataatctctaccagatgaaaagtacatctcctctcgctaggctgcacggctcaagcatcctcgaaaggcaccacctggaatattccaaaaccttactgcaagatgaatcattgaacattttccagaacttgaataagcgacagttcgaaacggttatccacctgttcgaagtagctattatcgccacagaccttgccctctatttcaaaaagcggaccatgttccaaaagattgtggatgcctgtgaacagatgcagactgaggaggaggccatcaagtacgttacagtggaccccactaaaaaagagatcattatggccatgatgatgaccgcatgtgacctatcagctattactaaaccctgggaagtgcagagccaggttgcactgatggtggcaaatgaattctgggagcaaggagacttggagagaacagtgttgcagcagcagcctatccccatgatggacagaaacaagagagatgagttgccgaagctgcaggtgggattcatagactttgtctgcactttcgtctacaaggaattttccaggtttcacaaagaaatcacccctatgctttctggcctgcaaaacaaccgtgtggaatggaagagcctggctgatgaatatgatgcgaaaatgaaggttatcgaagaggaggccaaaaagcaggagggcggggcagagaaggcagcggaggactctgggggcggcgacgacaagaagtctaaaacctgcctaatgctgtag

SEQ ID NO: 162794 - DNA, 2577 bp, Artificial Sequence
  derived and/or modified sequence
atgggagagatcaaccaggtggccgtggagaagtacctggaggagaacccccagtttgccaaggagtactttgacaggaagctgcgggtggaggtgctgggggagatcttcaagaacagccaggtgcctgtgcagagctccatgtccttcagcgagctgacccaggtggaggagagcgccctgtgcctggagctgctgtggacagtgcaggaggagggcggcaccccagagcagggcgtgcaccgggccctgcagaggctggcccacctgctgcaggccgaccgctgcagcatgttcctgtgccgcagcagaaatggcatccctgaggtggccagccggctgctggatgtgacccccaccagcaagtttgaggacaacctggtgggccctgacaaggaggtggtgttccccctggacatcggcatcgtgggctgggccgcccacaccaagaagacccacaacgtgcctgatgtgaagaagaacagccacttcagtgacttcatggacaagcagacaggctacgtgaccaagaacctgctggccacccccatcgtggtgggcaaggaggtgctggccgtcatcatggctgtgaacaaggtgaatgccagcgagttcagcaagcaggatgaggaggtgttcagcaagtacctgaactttgtgtccatcatcctgcggctgcaccacaccagctacatgtacaacatcgagagccgccgcagccagatcctgatgtggagcgccaacaaggtgtttgaggagctgacagatgtggagcggcagttccacaaggccctgtacacagtgcgcagctacctgaactgtgagcgctacagcatcggcctgctggacatgaccaaggagaaggagttctatgatgagtggcccatcaagctgggggaggtggagccctacaagggccccaagaccccagatggccgggaggtgaacttctacaagatcatcgactacatcctgcacggcaaggaggagatcaaggtgatccccaccccacctgctgaccactggaccctcatcagcggcctgcccacctacgtggccgagaatggcttcatctgcaacatgatgaatgccccagcagatgagtacttcaccttccagaagggccctgtggatgagaccggctgggtgatcaagaatgtgctgagcctgcccatcgtgaacaagaaggaggacatcgtgggcgtggccaccttctacaacaggaaggatggcaagccctttgatgaacatgatgagtacatcacagagaccctgacccagttcctgggctggagcctgctgaacacagacacctatgacaagatgaacaagctggagaacaggaaggacatcgcccaggagatgctgatgaaccagaccaaggccaccccagaggagatcaagagcatcctgaagttccaggagaagctgaatgtggatgtgattgatgactgtgaggagaagcagctggtggccatcctgaaggaggacctgcctgaccccaggtctgctgagctgtatgagttccgcttcagtgacttccccctgacagaacatggcctcatcaagtgtggcatccgcctcttctttgagatcaacgtggtggagaagttcaaggtgcctgtggaggtgctgacccgctggatgtacacagtgaggaagggctacagagctgtgacctaccacaactggaggcatggcttcaacgtgggccagaccatgttcaccctgctgatgacaggccgcctgaagaagtactacacagacctggaggcctttgccatgctggccgccgccttctgccacgacatcgaccaccggggcaccaacaacctgtaccagatgaagagcaccagccccctggcccggctgcacggcagcagcatcctggagcggcaccacctggagtacagcaagaccctgctgcaggatgagagcctgaacatcttccagaacctgaacaagaggcagtttgagaccgtcatccacctgtttgaggtggccatcatcgccacagacctggccctgtacttcaagaagaggaccatgttccagaagatcgtggatgcctgtgagcagatgcagacagaggaggaggccatcaagtatgtgacagtggaccccaccaagaaggagatcatcatggccatgatgatgacagcctgtgacctgagcgccatcaccaagccctgggaggtgcagagccaggtggccctgatggtggccaatgagttctgggagcagggcgacctggagaggacagtgctgcagcagcagcccatccccatgatggacaggaacaagagagatgagctgcccaagctgcaggtgggcttcatcgactttgtgtgcacctttgtgtacaaggagttcagccgcttccacaaggagatcacccccatgctgagcggcctgcagaacaacagagtggagtggaagagcctggctgatgaatatgatgccaagatgaaggtgattgaggaggaggccaagaagcaggagggcggcgctgagaaggctgctgaggacagcggcggcggagatgacaagaagagcaagacctgcctgatgctgtag

SEQ ID NO: 162795 - DNA, 2577 bp, Artificial Sequence
  derived and/or modified sequence
atgggcgagatcaaccaggtggccgtggagaagtacctggaggagaacccgcagtttgcgaaggagtactttgatcgcaagttgcgtgtagaggtgctaggggaaatcttcaaaaacagccaggtgccagtgcaaagcagcatgagtttcagcgagctcacgcaggtcgaggagtccgcactgtgccttgagctcctttggacagtgcaggaggaaggaggtaccccggagcagggagtgcacagggctctccagcggttggctcacctccttcaagcggatcgctgcagcatgttcctctgcagatcccgcaatggtatccccgaggtggcaagcagactgctcgatgtgacgcccacctcaaagttcgaggataatcttgtaggccctgacaaagaggtggtgttcccccttgacataggcatcgttggctgggccgcgcacacaaagaagactcataacgtgcccgatgtgaagaaaaacagtcattttagcgactttatggacaagcagacaggatatgtaaccaagaaccttttggctacgccaatcgtagttggaaaagaggttttagctgtgatcatggccgttaacaaagtgaacgcttctgagtttagcaaacaggatgaagaagtcttttctaagtaccttaatttcgtgagcattattttaaggctacaccacaccagctatatgtataatatagagtcaaggcgctctcagatcttgatgtggtcagcgaacaaagtcttcgaggaactcaccgatgtagaacggcagtttcataaagctctatatacagtgcgcagttatctgaactgtgagcggtatagcattggccttctggatatgaccaaagagaaagagttttatgacgagtggcctatcaagctcggagaggttgaaccttacaagggcccgaagactcccgacggccgagaagttaacttttacaagatcatagattatattctgcacgggaaagaggagatcaaggtgattcctacgcccccagcggaccactggacacttatttctgggctccctacctatgtggcagaaaatggctttatctgtaatatgatgaacgcccccgccgatgaatacttcaccttccagaagggacccgtggatgaaaccggttgggttataaaaaacgtactgtcgcttcctattgttaataaaaaagaagatatagtgggtgtcgcaaccttctacaatcggaaggatggcaaacctttcgatgagcatgacgagtatatcaccgagactttaacacagtttttggggtggagcctcctgaacaccgatacttatgacaaaatgaacaagctcgagaaccgtaaggacatagctcaggaaatgctgatgaatcagacgaaagcgacccccgaagagatcaagtctatcctgaaatttcaggaaaagttgaatgtcgacgtgatcgatgactgcgaagaaaagcaactggttgccattctgaaggaagatctccccgatccgaggagcgctgagttgtatgaattcaggttcagcgacttcccactcaccgaacacggcctaattaagtgcgggatcagactgttctttgaaataaacgtcgtcgagaagtttaaggtgccagtggaggtccttacaagatggatgtatacggtccgaaagggttacagggcagttacctatcacaattggcggcatgggtttaatgtggggcagacaatgttcaccctcctgatgactggtcgcctaaaaaaatattatacagatttagaggcgtttgcgatgctggccgctgcattttgtcatgacatcgaccatagaggcacaaataatctgtatcagatgaagtctacttctccactggctaggctgcacggctccagcattcttgaaaggcatcatctggaatactctaagacattgttgcaggacgagagcctcaacatcttccagaacctgaataagagacagtttgagacagtaatccacctgttcgaagtggccataatcgccacagacctggccttgtattttaagaagaggacaatgtttcagaaaatagtcgacgcatgtgaacaaatgcaaacagaggaagaggctatcaaatacgtcaccgtggaccccactaaaaaggagattatcatggccatgatgatgaccgcctgcgatctgtccgcaatcaccaagccgtgggaggtccaaagtcaggtggctctgatggtggcaaacgaattttgggaacagggcgatctggagcgcactgtgctacaacaacagccaattcctatgatggaccgcaataaaagagacgaactgccgaagctgcaggtgggattcatcgatttcgtttgcactttcgtctataaggagtttagtcgctttcacaaggagataacccccatgctgtcgggacttcagaacaacagggtggagtggaaatcccttgccgacgaatacgatgcaaaaatgaaagtcatcgaagaggaagctaaaaagcaggaagggggggccgagaaagcagctgaggactccggcggaggcgatgacaagaaaagtaagacgtgcctgatgctttag

SEQ ID NO: 162796 - DNA, 3307 bp, Artificial Sequence
  derived and/or modified sequence
ctttggaagtcctatgagggaccatttacggtttcctcagtaatttccaccaggatgaatttccttctcatcactctgcctcaggtagtgctctgaaggtcgtcctttctgaacaaacgcagcaaagcaagccacaccatgggtgagatcaaccaagttgccgtggagaaatacctggaggagaaccctcagtttgccaaggagtactttgacaggaagttgcgggtggaggtgctgggagaaatcttcaagaacagccaggtgccagtccagtccagcatgtccttctctgagctgacccaggtggaggagtcagccctgtgcttggagctgctgtggaccgtgcaggaggaggggggcaccccagagcagggggttcacagggccctgcagaggctggcccacctgctccaggctgaccgctgcagcatgttcctgtgccggtcccggaacggcatacctgaggtggcctctaggttgctggatgtcacccccacctccaagtttgaggacaacctggtgggccctgacaaagaagttgtgtttccattggacattgggatagtgggttgggctgctcacacgaagaaaactcataatgtcccagatgtgaaaaagaacagccatttttctgacttcatggacaagcaaactgggtatgtcactaagaacctgctggcaaccccgatcgtggtgggcaaggaggttcttgctgtgatcatggcagttaacaaagtaaatgcatctgaattttccaaacaggatgaagaggtcttttccaaatacctcaactttgtgtctatcatcctaaggcttcatcacaccagctacatgtacaatattgaatcccgaagaagccagatccttatgtggtcagccaataaagtatttgaagaactcacagatgttgagcgacagtttcacaaagcgctctacacggttagatcatatctgaactgtgaacgatactccattggactgctggacatgaccaaggagaaggaattctacgatgaatggccaatcaagcttggagaagtagagccttataaaggtccaaagacacctgatggcagggaagtcaacttttataaaatcattgattacattttacatggaaaagaagagatcaaagtgattccgacgcctcctgcagaccactggacactcattagtgggttgccaacatatgttgctgaaaatggatttatctgtaacatgatgaatgcccctgcggatgaatacttcacatttcagaaaggacctgtagacgaaactggttgggtcattaagaatgttttgtccctgcctattgtcaacaagaaagaagatattgtgggagtggctacattttacaacaggaaggatggaaaacctttcgatgagcatgatgaatacattaccgagactctcacacaatttcttggatggtctcttttaaatactgacacctacgataagatgaataagctagaaaacagaaaggacattgctcaggaaatgctcatgaaccaaaccaaagccactcctgaagaaattaagtccattttgaaatttcaagagaagttaaatgttgatgtaattgacgactgtgaagaaaaacaacttgttgcaattttgaaagaggacttgccagacccacgctcagcagaactgtacgaattccgcttcagtgacttcccccttacagagcacggattgattaaatgtggaatacgactgttttttgaaataaatgtggtggagaaattcaaagtacctgtagaggttcttaccagatggatgtacactgtgaggaaagggtaccgagctgtcacttaccacaattggcggcatgggttcaacgtggggcagaccatgtttactttgctgatgacaggaagattaaagaagtactacacagatctcgaagcctttgccatgcttgctgctgctttctgccatgatattgaccacagaggcaccaataatttgtaccagatgaaatccacgtctccattagcaagacttcatggttcttctattttggagaggcaccacctggagtacagtaagactctgttgcaggatgagagtttaaacatcttccagaacctaaataagcggcagtttgaaacagttattcatttgttcgaggtcgcaataatagcaactgacctggctttatatttcaagaagaggaccatgtttcaaaaaattgttgatgcctgtgaacaaatgcaaacggaagaagaagccatcaaatatgtaactgttgatccaaccaagaaagagattatcatggcaatgatgatgacggcatgtgacttgtctgctattaccaagccctgggaggtgcaaagtcaggtagcacttatggttgcaaatgaattttgggaacaaggagatctggagagaacagtgttgcagcaacaacccattcctatgatggacagaaacaaaagagatgaattacctaaacttcaagttggatttattgattttgtttgtacttttgtatataaggagttctcacggtttcacaaagaaatcacacctatgctgagtggtcttcagaataacagagtagaatggaaatcactagctgatgagtatgatgcaaagatgaaggtcattgaagaggaggcaaaaaagcaagaaggaggagccgaaaaagctgctgaagattcaggaggtggtgatgacaaaaagtccaaaacatgtttaatgttgtaatattatctaactggtctaaacttcaaatatcattttacctttgaagaaaaccagaaaacattcaaaagaacttcaacaaatcatcacgtaacaggatcttcagaaaaactaccctgtgactatgaagaaaatatatattgctagcccaaaaatcccaggggcaaaataaagttcaacaaaagtgcaaaatatgacaaaaataggtacatttttggtgccaatttattttaaattaaaaaatatgcaatcctgaaactagtcacaaattcttttttaaaacattaattgtatttatttgctaaggctgctataacaaagtaccacagactgggtgcttaaccaatagaaatgtattttctcaaagtcctgggggctggaagttcaagatcaaggagttggcagggttggtttcttgggaggcctctcaacttggtttgcagatggccatcttctccctgtgtcttcacatggtcttccctctgtgtgtctgtgtcctaatctccttttcttataaggactccagtaggactggattagggcctacccatgtgacctcattttagtcttaattacctcgttaatggccttatct

SEQ ID NO: 162797 - DNA, 2577 bp, Artificial Sequence
  derived and/or modified sequence
atgggggaaatcaatcaagtggccgtagagaaatatcttgaagagaacccacaatttgctaaggagtacttcgacagaaagctgcgcgtagaggtgttgggtgagatcttcaaaaatagtcaggtgcctgtgcagtctagcatgtcctttagcgagctcacccaagtcgaggagagtgcactttgtcttgaactcctgtggaccgtccaggaagaaggaggtacgccggaacagggcgtgcatagagcgctacaacggctcgctcatctcttgcaggcagaccgctgtagcatgtttctctgccgctcaaggaacggtattcccgaagtagcctctaggctgctggacgtaactccaacatcaaagttcgaggataatctcgtaggtcctgacaaggaagtggtgttccctctggacatcgggatagtggggtgggcggcacacacgaagaaaacccacaatgtgcctgatgtcaagaagaactctcacttctccgattttatggacaagcagacgggctatgtgacgaagaaccttctcgcgactcccatcgtggtggggaaggaagtgctggcagtcatcatggccgtgaataaggttaatgcaagcgagttttctaagcaggatgaagaggtcttttccaaatatctgaattttgtctccatcatccttaggctgcatcacacaagctacatgtacaacattgagtcacggaggtcccagatccttatgtggagtgcaaataaggtgttcgaggagctcaccgacgtagagcgccaattccacaaggccctgtacacggtcagatcctacctcaattgtgagaggtacagtattggactgttggatatgactaaggagaaagagttctacgatgaatggcccattaagctgggcgaagttgagccatacaaaggccctaagacacccgatggacgggaagtaaacttttacaagatcatcgattatatcctgcacggtaaagaagaaattaaggtgatccctacccctcctgcagaccattggacccttatcagcggacttcctacatacgtggcagagaacgggtttatatgcaatatgatgaacgctcctgccgatgagtacttcactttccagaagggccctgtagacgagacaggatgggtaataaagaacgtattaagccttccaatcgtcaataagaaagaggacatcgtgggagtggccaccttctataatcgaaaggatgggaaaccatttgatgaacacgatgaatatataactgagacactgacccagtttcttggctggtctctgctgaacaccgacacttacgacaaaatgaataagttagaaaacaggaaagacatcgcccaggaaatgcttatgaatcagactaaggctactcctgaagaaattaagagcatattgaaatttcaagagaagttaaacgtagacgtgatcgatgattgtgaggagaagcaactggttgccatcttaaaggaggatctccccgacccccgatctgccgagctatatgagttccggtttagcgacttccccctgactgaacatggattgattaaatgtggtatccggttattcttcgaaataaatgtggtagagaagttcaaagtcccagtagaggtgctcaccaggtggatgtacacagtgcggaagggatacagggctgtaacgtaccataactggagacacggctttaacgttgggcaaactatgtttaccttgctgatgactggcaggctcaaaaaatattacacggatctggaggcgtttgcgatgctcgctgctgcattttgtcacgacattgaccatcgaggaacaaacaacctatatcagatgaagagcacatcaccgctggccaggcttcatggtagctcaatcctggagcgccaccatctcgaatattcaaagacgttactgcaggacgaaagcctgaatatctttcagaacctgaacaagagacagttcgagactgtgattcacctcttcgaggtggcaatcatcgccacagatttagctctgtacttcaaaaagcgcaccatgttccagaagatagttgacgcctgcgagcagatgcagactgaggaagaggccattaagtatgttactgtcgatccgaccaagaaggaaattataatggctatgatgatgaccgcatgtgacctctctgctattactaagccttgggaggtacagtcccaggttgcgctcatggttgcaaatgaattttgggagcagggcgatttggagcgcacagtcctccagcaacaacccattcctatgatggaccgcaataagcgggatgaactacctaaattgcaggtgggctttattgactttgtgtgtacgttcgtgtacaaggaattttcgcggttccataaagagataacaccaatgctgagtggactccagaataatcgggttgaatggaagtcattggcagatgaatatgatgcgaagatgaaggtaatcgaagaggaggccaaaaagcaggagggcggagcagagaaggcggctgaagactctggaggcggtgatgataagaagagcaaaacctgccttatgctgtag

SEQ ID NO: 162798 - DNA, 2577 bp, Artificial Sequence
  derived and/or modified sequence
atgggcgagatcaaccaggtggccgtggagaagtacctggaggagaacccccagttcgccaaggagtacttcgacagaaagctgagagtggaggtgctgggcgagatcttcaagaacagccaggtgcccgtgcagagcagcatgagcttcagcgagctgacccaggtggaggagagcgccctgtgcctggagctgctgtggaccgtgcaggaggagggcggcacccccgagcagggcgtgcacagagccctgcagagactggcccacctgctgcaggccgacagatgcagcatgttcctgtgcagaagcagaaacggcatccccgaggtggccagcagactgctggacgtgacccccaccagcaagttcgaggacaacctggtgggccccgacaaggaggtggtgttccccctggacatcggcatcgtgggctgggccgcccacaccaagaagacccacaacgtgcccgacgtgaagaagaacagccacttcagcgacttcatggacaagcagaccggctacgtgaccaagaacctgctggccacccccatcgtggtgggcaaggaggtgctggccgtgatcatggccgtgaacaaggtgaacgccagcgagttcagcaagcaggacgaggaggtgttcagcaagtacctgaacttcgtgagcatcatcctgagactgcaccacaccagctacatgtacaacatcgagagcagaagaagccagatcctgatgtggagcgccaacaaggtgttcgaggagctgaccgacgtggagagacagttccacaaggccctgtacaccgtgagaagctacctgaactgcgagagatacagcatcggcctgctggacatgaccaaggagaaggagttctacgacgagtggcccatcaagctgggcgaggtggagccctacaagggccccaagacccccgacggcagagaggtgaacttctacaagatcatcgactacatcctgcacggcaaggaggagatcaaggtgatccccaccccccccgccgaccactggaccctgatcagcggcctgcccacctacgtggccgagaacggcttcatctgcaacatgatgaacgcccccgccgacgagtacttcaccttccagaagggccccgtggacgagaccggctgggtgatcaagaacgtgctgagcctgcccatcgtgaacaagaaggaggacatcgtgggcgtggccaccttctacaacagaaaggacggcaagcccttcgacgagcacgacgagtacatcaccgagaccctgacccagttcctgggctggagcctgctgaacaccgacacctacgacaagatgaacaagctggagaacagaaaggacatcgcccaggagatgctgatgaaccagaccaaggccacccccgaggagatcaagagcatcctgaagttccaggagaagctgaacgtggacgtgatcgacgactgcgaggagaagcagctggtggccatcctgaaggaggacctgcccgaccccagaagcgccgagctgtacgagttcagattcagcgacttccccctgaccgagcacggcctgatcaagtgcggcatcagactgttcttcgagatcaacgtggtggagaagttcaaggtgcccgtggaggtgctgaccagatggatgtacaccgtgagaaagggctacagagccgtgacctaccacaactggagacacggcttcaacgtgggccagaccatgttcaccctgctgatgaccggcagactgaagaagtactacaccgacctggaggccttcgccatgctggccgccgccttctgccacgacatcgaccacagaggcaccaacaacctgtaccagatgaagagcaccagccccctggccagactgcacggcagcagcatcctggagagacaccacctggagtacagcaagaccctgctgcaggacgagagcctgaacatcttccagaacctgaacaagagacagttcgagaccgtgatccacctgttcgaggtggccatcatcgccaccgacctggccctgtacttcaagaagagaaccatgttccagaagatcgtggacgcctgcgagcagatgcagaccgaggaggaggccatcaagtacgtgaccgtggaccccaccaagaaggagatcatcatggccatgatgatgaccgcctgcgacctgagcgccatcaccaagccctgggaggtgcagagccaggtggccctgatggtggccaacgagttctgggagcagggcgacctggagagaaccgtgctgcagcagcagcccatccccatgatggacagaaacaagagagacgagctgcccaagctgcaggtgggcttcatcgacttcgtgtgcaccttcgtgtacaaggagttcagcagattccacaaggagatcacccccatgctgagcggcctgcagaacaacagagtggagtggaagagcctggccgacgagtacgacgccaagatgaaggtgatcgaggaggaggccaagaagcaggagggcggcgccgagaaggccgccgaggacagcggcggcggcgacgacaagaagagcaagacctgcctgatgctgtag

SEQ ID NO: 162799 - protein, 83 aa, Artificial Sequence
  derived and/or modified sequence
MSDNTTLPAPASNQGPTTPRKGPPKFKQRQTRQFKSKPPKKGVKGFGDDIPGMEGLGTDITVICPWEAFSHLELHELAQFGII

SEQ ID NO: 162800 - DNA, 252 bp, Artificial Sequence
  derived and/or modified sequence
atgtcggataacacaacgttaccagcccctgctagtaatcaaggcccgacaacaccacgaaaggggcctccaaaattcaagcagaggcaaacccgacaatttaaatccaaaccccctaagaaaggtgtcaaaggattcggcgacgatattcccggaatggaggggttgggaacagacattacagtgatctgcccatgggaggcttttagtcacctggagctccatgagttggctcaattcggaatcatctag

SEQ ID NO: 162801 - DNA, 252 bp, Artificial Sequence
  derived and/or modified sequence
atgtctgacaacaccaccctgcctgccccagccagcaaccagggccccaccacccccaggaaaggaccacccaagttcaagcagaggcagacccggcagttcaagagcaagccacccaagaagggcgtgaagggctttggagatgacatccctggcatggagggcctgggcacagacatcaccgtcatctgcccctgggaggccttcagccacctggagctgcacgagctggcccagtttggcatcatctag

SEQ ID NO: 162802 - DNA, 252 bp, Artificial Sequence
  derived and/or modified sequence
atgagcgacaacaccaccctgcccgcccccgccagcaaccagggccctacaacccctaggaaaggccccccgaagtttaaacagcggcagactcgccagtttaagagtaaaccacctaagaaaggtgtcaaaggatttggggatgatatccctgggatggagggactcggtaccgacatcactgtcatttgtccatgggaggccttttcccacctcgaattacacgagctcgcgcaattcggcatcatttag

SEQ ID NO: 162803 - DNA, 747 bp, Artificial Sequence
  derived and/or modified sequence
caaagatccttttgtcttttgcaaagaaggcagctgggcagctgataggaacaacattcagctccgaggctgaaagggaaacatcagccgcccggggggagttaaaatgagtgacaacactactctgcctgctccagcttcaaaccagggtcctaccaccccacgcaaaggccctcccaagttcaagcagaggcagactcgccaattcaagagtaaacctccaaagaaaggtgtgaaaggatttggagatgacattccaggaatggaggggctaggaacagatatcacagtgatttgtccatgggaggcattcagccacctggaattgcatgagctcgctcagtttgggattatctgaagtgccagaggttctgccactctcaatgacatctgctgtaattttggttgcttttgccctgttgatctgccggagtcttgaaattcagctgattggaagtggtttctttgactttcaaggtcattccctatcagttactactaagagttctcttactgtcagaatctctcttgcagtacagctcaaaatagtggatgcatttcaaacttgaccaccttttcctaccagctagttagaagtcatcaatatttctctacattttgtttatctgtaagtcctttaaatctatttttgctaggcattcattatgattaatagtagacttttaagacaacatttatgtcactccccacctcctcatatttaataaaggagatatttaccttgaa

SEQ ID NO: 162804 - DNA, 252 bp, Artificial Sequence
  derived and/or modified sequence
atgagtgacaatactactctaccagctcctgcatctaatcaagggcctaccacccccagaaaggggcctcccaagtttaaacagagacagacaaggcagttcaaatccaagcctccaaagaagggcgtcaaggggtttggggatgatatccccggtatggaaggcttgggcaccgacattacagtgatatgtccttgggaggcctttagtcacctggagctccacgaactagctcaatttgggatcatttag

SEQ ID NO: 162805 - DNA, 252 bp, Artificial Sequence
  derived and/or modified sequence
atgagcgacaacaccaccctgcccgcccccgccagcaaccagggccccaccacccccagaaagggcccccccaagttcaagcagagacagaccagacagttcaagagcaagccccccaagaagggcgtgaagggcttcggcgacgacatccccggcatggagggcctgggcaccgacatcaccgtgatctgcccctgggaggccttcagccacctggagctgcacgagctggcccagttcggcatcatctag

SEQ ID NO: 162806 - protein, 925 aa, Artificial Sequence
  derived and/or modified sequence
MERDGCAGGGSRGGEGGRAPREGPAGNGRDRGRSHAAEAPGDPQAAASLLAPMDVGEEPLEKAARARTAKDPNTYKVLSLVLSVCVLTTILGCIFGLKPSCAKEVKSCKGRCFERTFGNCRCDAACVELGNCCLDYQETCIEPEHIWTCNKFRCGEKRLTRSLCACSDDCKDKGDCCINYSSVCQGEKSWVEEPCESINEPQCPAGFETPPTLLFSLDGFRAEYLHTWGGLLPVISKLKKCGTYTKNMRPVYPTKTFPNHYSIVTGLYPESHGIIDNKMYDPKMNASFSLKSKEKFNPEWYKGEPIWVTAKYQGLKSGTFFWPGSDVEINGIFPDIYKMYNGSVPFEERILAVLQWLQLPKDERPHFYTLYLEEPDSSGHSYGPVSSEVIKALQRVDGMVGMLMDGLKELNLHRCLNLILISDHGMEQGSCKKYIYLNKYLGDVKNIKVIYGPAARLRPSDVPDKYYSFNYEGIARNLSCREPNQHFKPYLKHFLPKRLHFAKSDRIEPLTFYLDPQWQLALNPSERKYCGSGFHGSDNVFSNMQALFVGYGPGFKHGIEADTFENIEVYNLMCDLLNLTPAPNNGTHGSLNHLLKNPVYTPKHPKEVHPLVQCPFTRNPRDNLGCSCNPSILPIEDFQTQFNLTVAEEKIIKHETLPYGRPRVLQKENTICLLSQHQFMSGYSQDILMPLWTSYTVDRNDSFSTEDFSNCLYQDFRIPLSPVHKCSFYKNNTKVSYGFLSPPQLNKNSSGIYSEALLTTNIVPMYQSFQVIWRYFHDTLLRKYAEERNGVNVVSGPVFDFDYDGRCDSLENLRQKRRVIRNQEILIPTHFFIVLTSCKDTSQTPLHCENLDTLAFILPHRTDNSESCVHGKHDSSWVEELLMLHRARITDVEHITGLSFYQQRKEPVSDILKLKTHLPTFSQED

SEQ ID NO: 162807 - DNA, 2778 bp, Artificial Sequence
  derived and/or modified sequence
atggaacgggatgggtgcgccggcggcggcagcagagggggagaaggcggcagagcacctagagaaggtcccgcgggaaacggacgcgatagagggaggtcgcacgccgcagaggcccccggtgatcctcaggctgcagcctccttattggctcccatggatgtcggagaggaaccgcttgaaaaagccgctagggcacgtaccgccaaagatccaaacacgtacaaggtgttgtcattggtcctcagtgtctgtgtcctaacaacaattttaggttgcatcttcgggctgaagccttcctgcgccaaggaggtgaaatcctgtaaagggcggtgttttgagcgcacatttggtaattgcagatgcgacgcagcgtgtgtggaactgggaaactgttgtctggactaccaggagacatgcatagaacctgagcacatctggacttgtaataagtttaggtgtggggaaaaaagactgacacggtcgctttgtgcgtgctctgacgattgtaaggacaagggcgattgttgtattaactattcctcagtctgccagggcgagaagtcctgggtggaggagccatgtgagtccattaacgaaccccaatgtccagcaggtttcgagaccccgcctacattgctgtttagcctggatgggttccgggcagaatacctgcacacctggggagggttgttgcctgtcatctctaagctgaagaagtgcggtacctacacgaagaatatgagaccagtctaccctaccaaaacttttcctaaccactatagcatcgtgaccgggctgtacccagagagccacggcattattgataataaaatgtatgatccaaagatgaacgcctccttttccctgaaatctaaagagaagttcaatccggagtggtataaaggggaacctatttgggttactgctaagtatcagggcttgaaatcaggtaccttcttctggcccggctcagacgtggaaattaatggcatttttccagacatctataagatgtataatggctccgtgccattcgaagagcgaattctggcagtgcttcagtggcttcagctccccaaggatgaacggccccatttttatactttatacttggaggagcctgactcatccggccactcttacggcccggttagctccgaagtcatcaaagctctccaaagggttgacggtatggttggtatgctcatggacggcttaaaggagctaaatctgcaccgttgcctgaacctgattctcataagcgatcacgggatggaacagggtagctgtaaaaagtatatctacctgaacaagtacctgggggacgtgaaaaatataaaagtgatatacggcccagccgcccgactccgcccctcggacgtgccggacaagtattacagcttcaattacgagggcattgccagaaacctctcatgtcgtgagccaaaccagcatttcaaaccgtatctaaagcattttcttcctaagagattgcacttcgcgaagagcgacagaattgagccgctcacattctatctggatcctcagtggcagttggccctaaacccgagcgaacggaaatattgcggttctggctttcatgggagcgataatgtcttttccaacatgcaggccctttttgtaggatacggtccaggctttaagcacggtatcgaggcagatacctttgaaaatattgaagtctataatttgatgtgtgacctccttaacctgactccggctcccaacaacgggactcacgggtccctaaatcacttattaaagaatcccgtctatactcctaaacatcctaaggaggtgcatcctctggtgcagtgcccatttaccagaaaccctagggacaatttgggctgttcttgtaatccaagcatccttcccatcgaggactttcagactcagtttaatctcaccgtggcagaagaaaaaataataaaacatgagacactgccctacggaaggccacgagtgctacagaaggagaacaccatatgtctcctgtcccagcatcagttcatgtccggctacagccaggatattcttatgccattatggacctcttatacggttgaccgcaatgactcctttagcactgaagacttctccaattgcctctaccaggacttcaggatacccttgagtccagtacacaagtgcagcttctacaagaacaatactaaggtgagctacggattcctctcccctccacaactgaacaaaaactcatcagggatatacagtgaggctctgctgaccactaatatagtaccaatgtatcaatctttccaggtcatctggagatacttccacgacacactccttagaaagtatgccgaggagcgtaatggtgtgaacgtcgtatctggaccagtctttgacttcgattacgatggacgctgcgactctctggaaaatctgcggcagaaaaggagagtgattagaaaccaggaaatcctgatcccaactcatttcttcattgtactcacctcatgcaaagacaccagccaaacccccctgcattgtgaaaacctggacacattagccttcatcttgccccaccgaaccgataacagcgagagctgcgtccatgggaagcacgactccagttgggtggaggagctcttgatgctgcacagagctcggatcacggatgtggagcacatcacaggactgtcgttctaccagcagcggaaggagccagtgtcagacatacttaagttaaagacacaccttccgacattctcgcaggaggactag

SEQ ID NO: 162808 - DNA, 2778 bp, Artificial Sequence
  derived and/or modified sequence
atggagagagatggctgtgccggcggcggcagcagaggaggagagggcggccgggccccccgggagggccctgctggaaatggccgggaccggggccgcagccacgccgctgaggcccctggggacccccaggccgccgccagcctgctggcccccatggatgtgggggaggagcccctggagaaggccgcccgggccaggacagccaaggaccccaacacctacaaggtgctgagcctggtgctgtctgtgtgtgtgctgaccaccatcctgggctgcatcttcggcctgaagcccagctgtgccaaggaggtgaagagctgcaagggccgctgctttgagaggacctttggaaactgccgctgtgatgctgcctgtgtggagctgggcaactgctgcctggactaccaggagacctgcatcgagcctgagcacatctggacctgcaacaagttccgctgtggggagaagaggctgaccaggagcctgtgtgcctgcagtgatgactgcaaggacaagggggactgctgcatcaactacagctctgtgtgccagggcgagaagtcctgggtggaggagccctgtgagagcatcaatgagccccagtgcccagctggctttgagaccccacccaccctgctcttcagcctggatggcttccgggcagagtacctgcacacctggggcggcctgctgcctgtgatcagcaagctgaagaagtgtggcacctacaccaagaacatgaggcctgtgtaccccaccaagaccttccccaaccactacagcatcgtgacaggcctgtacccagagagccacggcatcatcgacaacaagatgtatgaccccaagatgaatgccagcttcagcctgaagagcaaggagaagttcaaccctgagtggtacaagggggagcccatctgggtgacagccaagtaccagggcctgaagagcggcaccttcttctggccaggcagtgatgtggagatcaatggcatcttcccagacatctacaagatgtacaatggatctgtgccctttgaggagcgcatcctggccgtgctgcagtggctgcagctgcccaaggatgagcggccccacttctacaccctgtacctggaggagccagacagcagcggccacagctatggccctgtgtcctctgaggtgatcaaggccctgcagagggtggatggcatggtgggcatgctgatggatggcctgaaggagctgaacctgcaccgctgcctgaacctgatcctgatcagtgaccacggcatggagcagggcagctgcaagaagtacatctacctgaacaagtacctgggagatgtgaagaacatcaaggtgatctacggccctgctgcccggctgcggcccagtgatgtgcctgacaagtactacagcttcaactatgagggcatcgccaggaacctgagctgccgggagcccaaccagcacttcaagccctacctgaagcacttcctgcccaagaggctgcactttgccaagagtgacagaattgagcccctgaccttctacctggacccccagtggcagctggccctgaaccccagcgagaggaagtactgcggcagcggcttccacggcagtgacaacgtgttcagcaacatgcaggccctgtttgtgggctacggccctggcttcaagcatggaattgaagctgacacctttgaaaatattgaggtgtacaacctgatgtgtgacctgctgaacctgaccccagcccccaacaacggcacccacggcagcctgaaccacctgctgaagaaccctgtgtacacccccaagcaccccaaggaggtgcaccccctggtgcagtgccccttcaccaggaacccccgggacaacctgggctgcagctgcaaccccagcatcctgcccatcgaggacttccagacccagttcaacctgactgtggccgaggagaagatcatcaagcatgagaccctgccctacggccggccccgggtgctgcagaaggagaacaccatctgcctgctgagccagcaccagttcatgagcggctacagccaggacatcctgatgcccctgtggaccagctacacagtggacagaaatgacagcttcagcacagaggacttcagcaactgcctgtaccaggacttccgcatccccctgagccctgtgcacaagtgcagcttctacaagaacaacaccaaggtgtcctatggcttcctgagccccccccagctgaacaagaacagcagcggcatctacagcgaggccctgctgaccaccaacatcgtgcccatgtaccagagcttccaggtgatctggagatacttccatgacaccctgctgaggaaatatgcagaggagagaaatggagtgaatgtggtgtctggccctgtgtttgattttgattatgatggccgctgtgacagcctggagaacctgcggcagaagagaagagtcatccggaaccaggagatcctgatccccacccacttcttcatcgtgctgaccagctgcaaggacaccagccagacccccctgcactgtgagaacctggacaccctggccttcatcctgccccacaggacagacaacagcgagagctgtgtgcacggcaagcatgacagctcctgggtggaggagctgctgatgctgcaccgggcccgcatcacagatgtggagcacatcaccggcctgtccttctaccagcagaggaaggagcctgtgtctgacatcctgaagctgaagacccacctgcccaccttcagccaggaggactag

SEQ ID NO: 162809 - DNA, 2778 bp, Artificial Sequence
  derived and/or modified sequence
atggagcgggacggctgcgccggcggcggcagccggggcggcgagggcggtagagctccccgcgaaggccccgccggaaatggcagggatcgcgggagatcccacgctgcagaggccccgggggacccccaagccgcggccagcctgctcgccccaatggatgtgggtgaagaacccctggagaaagctgcccgggctcgtactgccaaggatcccaacacctacaaggtcttgtcactcgtgctctcagtgtgcgtgctaaccaccatcctcggctgcatctttggtctcaagcctagctgtgcgaaagaggtgaaatcatgcaagggaagatgcttcgagcgcaccttcggaaattgccgctgtgacgccgcctgcgtcgagctaggcaactgctgcctcgactaccaggagacctgcatcgagccagagcacatttggacctgtaacaaatttaggtgtggcgagaagcgcttaactcgctctctgtgcgcctgtagcgacgactgtaaagacaagggtgattgttgtatcaactactcctcggtgtgccagggcgagaaatcctgggtggaggagccctgcgaaagtattaatgaacctcagtgtccggccggatttgagaccccccctactctcttgttttccctcgacggtttccgagccgagtatcttcatacgtggggaggtctcttgcccgtcatctcaaagttaaagaagtgtggcacctacacaaagaacatgaggcccgtctaccccaccaaaacattccctaatcactactcaattgtgacgggactgtatccagagtcccacggcatcatcgataacaagatgtatgaccctaaaatgaatgcctccttcagcctcaaaagcaaggagaagttcaatccagaatggtacaagggggagcctatttgggtgactgccaaataccaggggctgaaatctgggacctttttttggccaggctctgatgtggaaatcaacgggatcttccctgatatatataaaatgtacaacggctctgtccctttcgaggagcgcattttggctgttcttcagtggttgcagctccctaaggatgagcgcccacacttttatacgctgtatctcgaggagccagacagttctggacactcttatgggccagtgagttcagaagtgatcaaggccctgcagagagtggatggaatggtggggatgctaatggatgggctgaaagaactcaacctgcacagatgtttgaacctgatcctcatcagcgaccacggcatggagcaggggagctgcaaaaaatatatctatctcaacaaatatctcggggatgtgaagaacattaaagtgatttatggaccagccgcaaggctgcgcccaagtgacgtgcccgataagtattactcctttaactacgaggggatagcccggaatctttcttgtcgggaaccgaatcagcattttaagccttatctgaaacatttccttcctaaacgactccattttgcaaaaagcgacagaattgagcccctgaccttttatcttgacccccagtggcaactcgccttgaatccatccgaaagaaaatattgtggttctggctttcacgggagcgataatgtgttttccaacatgcaagccctgtttgtaggttatgggccagggttcaaacacggcattgaggctgacactttcgagaacatcgaagtgtataacctgatgtgtgatcttctgaatctgacacccgcaccaaataacggaacacacggtagtctgaatcacctcctgaaaaacccggtttacacccctaaacaccctaaggaagttcaccccctggtccagtgtccgtttaccaggaaccctagggacaacctaggctgctcctgtaacccctccatcctgccaatcgaggactttcagacacagttcaacttgaccgtagccgaggagaagataattaagcacgagaccctgccttacggccgacctagggtccttcagaaagaaaataccatctgtctgctgtctcaacatcagttcatgtcgggttacagtcaggatatccttatgcctctgtggaccagttacacggtagatagaaatgacagtttttcaacagaggatttcagcaactgcctctaccaggattttcggatccccctttcacccgtccacaaatgttccttctataagaataatacaaaagtgagctatggctttctctcacctcctcaactaaataagaacagctccgggatctactctgaagccctgctaacaacaaacatcgtacccatgtatcagagtttccaggtgatctggcgatactttcacgatacacttttgcgcaagtatgccgaggaaagaaatggggtgaacgtggtgtcaggccctgtgtttgatttcgactacgatggtcgatgcgattccctcgagaacctcagacagaagagacgggtgatacgaaatcaggaaatattgatccctacccacttcttcattgtcctgacgagctgcaaagacaccagccagactcccctacattgtgaaaacctcgacacactcgcgtttatcctccctcacagaacggacaatagtgagagctgcgtccatggcaagcacgatagcagttgggtcgaagagcttcttatgttacatcgagcacgaatcaccgatgtcgaacacatcaccggactcagcttttaccaacagcggaaggagcccgtgagcgatatccttaagttgaaaacgcacctgccgaccttctcccaggaggactag

SEQ ID NO: 162810 - DNA, 2778 bp, Artificial Sequence
  derived and/or modified sequence
atggaaagggatggatgtgccggagggggaagtcgaggtggggaggggggacgggcaccaagagagggtccagccggaaacggacgcgatagagggcgaagccacgccgctgaagcgcctggagaccctcaagccgctgcctcgctccttgccccaatggacgtgggggaggaacctctagagaaggcggcaagggccaggaccgctaaagatccgaatacatacaaggtattgtctctcgtactcagtgtgtgcgtgctcacaacaattttaggatgcatttttgggttgaagccttcctgtgccaaggaggtgaagtcatgtaaaggccgttgcttcgagagaactttcggaaattgcaggtgtgatgctgcctgtgtggagctgggcaattgctgcctcgattaccaggagacctgtatcgagccagaacacatttggacatgcaataaatttagatgcggtgagaagcggttgacaagaagcctgtgtgcctgctccgacgattgcaaagataagggggactgctgtataaattatagctcagtatgtcaaggagagaagagttgggtcgaggagccctgtgagtcaattaatgagcctcagtgtcctgcaggcttcgaaacaccccctactttgctcttctccctggacggctttcgagccgaatatctgcacacttggggcggacttctccctgtgatttcaaagctgaagaaatgcggcacctacacaaagaacatgcggcctgtgtacccgactaagacatttccaaatcactactccattgtgaccgggctctatccagaatcacatggaattatagataacaaaatgtatgatcccaagatgaacgctagcttttcccttaaatcaaaggagaaatttaatccagagtggtacaaaggcgagcccatttgggtgactgcaaagtaccaaggtctgaagagtggtaccttcttctggcccggatctgacgtcgagattaacggcatctttcccgacatttataagatgtataatgggtccgtaccattcgaggagagaatactcgcggtgcttcaatggttgcagttacccaaagacgaacggcctcatttctacacattatatctcgaagagcccgatagttcagggcattcttacggcccagtttcttcggaagtcattaaggctcttcagagagtcgacgggatggtgggtatgctcatggacggcctgaaagagctcaacttacaccgttgcctgaaccttatcctgattagcgatcacgggatggaacaaggctcctgcaagaaatatatatatttaaacaagtatctgggggatgttaaaaatatcaaggtaatctatggtccagccgcaaggctgcggccttccgacgttcctgacaagtactacagtttcaattatgagggaatagcccgaaatctgtcctgccgtgagccgaaccaacatttcaagccatacctaaagcacttccttcccaagcgactccattttgccaagtcagatcgcatcgagccattgaccttctatctcgatccgcagtggcagttagctctcaacccaagtgagagaaaatactgtgggtccggattccacggaagcgataatgttttttccaacatgcaggccctgttcgttggttatggtcccggatttaaacacggcatcgaggcggacacctttgaaaacattgaagtgtataatctcatgtgcgatttgcttaatcttacccctgcgccaaataatggcacccatggttccctcaatcaccttctcaaaaaccctgtgtataccccaaagcatccaaaggaagtgcatcctcttgtgcagtgtccattcactcgcaatcccagagataatctggggtgctcatgcaatccatcaatcctgcctatcgaagacttccagacacagttcaatctgaccgtcgctgaagagaaaatcataaaacacgagactctgccttacggccgtcccagggtcctacaaaaagagaacacaatctgcctgctgagccagcaccagttcatgagtggctattctcaggacattctgatgcccctgtggaccagttacactgtggaccgaaatgatagtttcagcaccgaagatttttcaaactgcttgtaccaggatttcagaattcccctcagccccgtgcataagtgtagtttctataaaaacaatacgaaagtgtcttacggttttctgtcccctccacagcttaacaagaattcatccgggatttatagcgaggccctattaaccacgaacatcgtgcctatgtatcaatcttttcaggttatttggcgttacttccacgatacactgttgcgcaaatacgctgaggaacgcaatggagtgaatgtcgtttccggacccgtgtttgactttgattatgatggtcggtgtgactctctggagaatctgaggcagaagagacgggtcatacgcaaccaggaaatcctgatccccacacacttttttattgtcctgacaagctgcaaagacacttcccagacacctctgcattgtgagaacctggataccctggcgtttatattgcctcacaggaccgataacagcgagagctgtgtgcacggcaaacatgacagttcatgggtggaagagctgctcatgttgcaccgagcacgcattaccgatgttgagcacattacgggtttatccttctatcagcagcgcaaggaacctgttagtgacatccttaagctgaagacacacttacccaccttctcccaagaagactag

SEQ ID NO: 162811 - DNA, 2778 bp, Artificial Sequence
  derived and/or modified sequence
atggagagagacggctgcgccggcggcggcagcagaggcggcgagggcggcagagcccccagagagggccccgccggcaacggcagagacagaggcagaagccacgccgccgaggcccccggcgacccccaggccgccgccagcctgctggcccccatggacgtgggcgaggagcccctggagaaggccgccagagccagaaccgccaaggaccccaacacctacaaggtgctgagcctggtgctgagcgtgtgcgtgctgaccaccatcctgggctgcatcttcggcctgaagcccagctgcgccaaggaggtgaagagctgcaagggcagatgcttcgagagaaccttcggcaactgcagatgcgacgccgcctgcgtggagctgggcaactgctgcctggactaccaggagacctgcatcgagcccgagcacatctggacctgcaacaagttcagatgcggcgagaagagactgaccagaagcctgtgcgcctgcagcgacgactgcaaggacaagggcgactgctgcatcaactacagcagcgtgtgccagggcgagaagagctgggtggaggagccctgcgagagcatcaacgagccccagtgccccgccggcttcgagaccccccccaccctgctgttcagcctggacggcttcagagccgagtacctgcacacctggggcggcctgctgcccgtgatcagcaagctgaagaagtgcggcacctacaccaagaacatgagacccgtgtaccccaccaagaccttccccaaccactacagcatcgtgaccggcctgtaccccgagagccacggcatcatcgacaacaagatgtacgaccccaagatgaacgccagcttcagcctgaagagcaaggagaagttcaaccccgagtggtacaagggcgagcccatctgggtgaccgccaagtaccagggcctgaagagcggcaccttcttctggcccggcagcgacgtggagatcaacggcatcttccccgacatctacaagatgtacaacggcagcgtgcccttcgaggagagaatcctggccgtgctgcagtggctgcagctgcccaaggacgagagaccccacttctacaccctgtacctggaggagcccgacagcagcggccacagctacggccccgtgagcagcgaggtgatcaaggccctgcagagagtggacggcatggtgggcatgctgatggacggcctgaaggagctgaacctgcacagatgcctgaacctgatcctgatcagcgaccacggcatggagcagggcagctgcaagaagtacatctacctgaacaagtacctgggcgacgtgaagaacatcaaggtgatctacggccccgccgccagactgagacccagcgacgtgcccgacaagtactacagcttcaactacgagggcatcgccagaaacctgagctgcagagagcccaaccagcacttcaagccctacctgaagcacttcctgcccaagagactgcacttcgccaagagcgacagaatcgagcccctgaccttctacctggacccccagtggcagctggccctgaaccccagcgagagaaagtactgcggcagcggcttccacggcagcgacaacgtgttcagcaacatgcaggccctgttcgtgggctacggccccggcttcaagcacggcatcgaggccgacaccttcgagaacatcgaggtgtacaacctgatgtgcgacctgctgaacctgacccccgcccccaacaacggcacccacggcagcctgaaccacctgctgaagaaccccgtgtacacccccaagcaccccaaggaggtgcaccccctggtgcagtgccccttcaccagaaaccccagagacaacctgggctgcagctgcaaccccagcatcctgcccatcgaggacttccagacccagttcaacctgaccgtggccgaggagaagatcatcaagcacgagaccctgccctacggcagacccagagtgctgcagaaggagaacaccatctgcctgctgagccagcaccagttcatgagcggctacagccaggacatcctgatgcccctgtggaccagctacaccgtggacagaaacgacagcttcagcaccgaggacttcagcaactgcctgtaccaggacttcagaatccccctgagccccgtgcacaagtgcagcttctacaagaacaacaccaaggtgagctacggcttcctgagccccccccagctgaacaagaacagcagcggcatctacagcgaggccctgctgaccaccaacatcgtgcccatgtaccagagcttccaggtgatctggagatacttccacgacaccctgctgagaaagtacgccgaggagagaaacggcgtgaacgtggtgagcggccccgtgttcgacttcgactacgacggcagatgcgacagcctggagaacctgagacagaagagaagagtgatcagaaaccaggagatcctgatccccacccacttcttcatcgtgctgaccagctgcaaggacaccagccagacccccctgcactgcgagaacctggacaccctggccttcatcctgccccacagaaccgacaacagcgagagctgcgtgcacggcaagcacgacagcagctgggtggaggagctgctgatgctgcacagagccagaatcaccgacgtggagcacatcaccggcctgagcttctaccagcagagaaaggagcccgtgagcgacatcctgaagctgaagacccacctgcccaccttcagccaggaggactag

SEQ ID NO: 162812 - DNA, 7442 bp, Artificial Sequence
  derived and/or modified sequence
ccggagcggccggggccacgatggagcgcgacggctgcgcggggggcgggagccgcggcggcgagggcgggcgcgctccccgggagggcccggcggggaacggccgcgatcggggccgcagccacgctgccgaggcgcccggggacccgcaggcggccgcgtccttgctggcccctatggacgtgggggaggagccgctggagaaggcggcgcgcgcccgcactgccaaggaccccaacacctataaagtactctcgctggtattgtcagtatgtgtgttaacaacaatacttggttgtatatttgggttgaaaccaagctgtgccaaagaagttaaaagttgcaaaggtcgctgtttcgagagaacatttgggaactgtcgctgtgatgctgcctgtgttgagcttggaaactgctgtttagattaccaggagacgtgcatagaaccagaacatatatggacttgcaacaaattcaggtgtggtgagaaaaggttgaccagaagcctctgtgcctgttcagatgactgcaaggacaagggcgactgctgcatcaactacagttctgtgtgtcaaggtgagaaaagttgggtagaagaaccatgtgagagcattaatgagccacagtgcccagcagggtttgaaacgcctcctaccctcttattttctttggatggattcagggcagaatatttacacacttggggtggacttcttcctgttattagcaaactaaaaaaatgtggaacatatactaaaaacatgagaccggtatatccaacaaaaactttccccaatcactacagcattgtcaccggattgtatccagaatctcatggcataatcgacaataaaatgtatgatcccaaaatgaatgcttccttttcacttaaaagtaaagagaaatttaatcctgagtggtacaaaggagaaccaatttgggtcacagctaagtatcaaggcctcaagtctggcacatttttctggccaggatcagatgtggaaattaacggaattttcccagacatctataaaatgtataatggttcagtaccatttgaagaaaggattttagctgttcttcagtggctacagcttcctaaagatgaaagaccacacttttacactctgtatttagaagaaccagattcttcaggtcattcatatggaccagtcagcagtgaagtcatcaaagccttgcagagggttgatggtatggttggtatgctgatggatggtctgaaagagctgaacttgcacagatgcctgaacctcatccttatttcagatcatggcatggaacaaggcagttgtaagaaatacatatatctgaataaatatttgggggatgttaaaaatattaaagttatctatggacctgcagctcgattgagaccctctgatgtcccagataaatactattcatttaactatgaaggcattgcccgaaatctttcttgccgggaaccaaaccagcacttcaaaccttacctgaaacatttcttacctaagcgtttgcactttgctaagagtgatagaattgagcccttgacattctatttggaccctcagtggcaacttgcattgaatccctcagaaaggaaatattgtggaagtggatttcatggctctgacaatgtattttcaaatatgcaagccctctttgttggctatggacctggattcaagcatggcattgaggctgacacctttgaaaacattgaagtctataacttaatgtgtgatttactgaatttgacaccggctcctaataacggaactcatggaagtcttaaccaccttctaaagaatcctgtttatacgccaaagcatcccaaagaagtgcaccccctggtacagtgccccttcacaagaaaccccagagataaccttggctgctcatgtaacccttcgattttgccgattgaggattttcaaacacagttcaatctgactgtggcagaagagaagattattaagcatgaaactttaccctatggaagacctagagttctccagaaggaaaacaccatctgtcttctttcccagcaccagtttatgagtggatacagccaagacatcttaatgcccctttggacatcctataccgtggacagaaatgacagtttctctacggaagacttctccaactgtctgtaccaggactttagaattcctcttagtcctgtccataaatgttcattttataaaaataacaccaaagtgagttacgggttcctctccccaccacaactaaataaaaattcaagtggaatatattctgaagctttgcttactacaaatatagtgccaatgtaccagagttttcaagttatatggcgctactttcatgacaccctactgcgaaagtatgctgaagaaagaaatggtgtcaatgtcgtcagtggtcctgtgtttgactttgattatgatggacgttgtgattccttagagaatctgaggcaaaaaagaagagtcatccgtaaccaagaaattttgattccaactcacttctttattgtgctaacaagctgtaaagatacatctcagacgcctttgcactgtgaaaacctagacaccttagctttcattttgcctcacaggactgataacagcgagagctgtgtgcatgggaagcatgactcctcatgggttgaagaattgttaatgttacacagagcacggatcacagatgttgagcacatcactggactcagcttctatcaacaaagaaaagagccagtttcagacattttaaagttgaaaacacatttgccaacctttagccaagaagactgatatgttttttatccccaaacaccatgaatctttttgagagaaccttatattttatatagtcctctagctacactattgcattgttcagaaactgtcgaccagagttagaacggagccctcggtgatgcggacatctcagggaaacttgcgtactcagcacagcagtggagagtgttcctgttgaatcttgcacatatttgaatgtgtaagcattgtatacattgatcaagttcgggggaataaagacagaccacacctaaaactgcctttctgcttctcttaaaggagaagtagctgtgaacattgtctggataccagatatttgaatctttcttactattggtaataaaccttgatggcattgggcaaacagtagacttatagtagggttggggtagcccatgttatgtgactatctttatgagaattttaaagtggttctggatatcttttaacttggagtttcatttcttttcattgtaatcaaaaaaaaaattaacagaagccaaaatacttctgagaccttgtttcaatctttgctgtatatcccctcaaaatccaagttattaatcttatgtgttttctttttaattttttgattggatttctttagatttaatggttcaaatgagttcaactttgagggacgatctttgaatatacttacctattataaaatcttactttgtatttgtatttaaaaaagaaaaatattcctatcctgctcactggtaattaacataggtttaaaatggcttcaaatgtggccctatagacggttaaaattgtaccttatcttggcaaaacttcagagcaccagtcagtgcatgcaaggtgccattttttattgagatgcttagaatgtttctttctgtgcacaagacttaccctaccagcagcagagccattctctgttgagtggttcattttgaagttccacagattgaagagaacatgccaccaatcacctcacatcttcttggtggacatgataaatgacacaatgaacttgatttctttactaccttgactgtagctttttatccctacctgtgaaccttcaaagactgcattaacttttaggctacataggtccaattgaggtataatatcagtacaccaaagatttttatatgtccttcgtgtgaccattcttcaacggcctaagggccagctgcaaagacttttggaaaatacaatttacaactcaaaattatttaataatttaggaagttgctttttttttttttttttttcagtcctgcagtttcctgaagctctgtatatgatatttttttcagcctgcttctctctgttgttcagattaggtaattttattcttctgtctcgaagctcactgattctttattctgtctaatctgttctgctgttgagcccatttattcctgatttttatattttagttattgtatgttttatttctaaaatttccattcagtttttctttatatcttctatttgctgagaatttctgtctctttgctgagactttctacgttttcatttgtttcaagtgcatttatacttgcttgttgaagaatttttatgatggctgctgtaaaatccttatcagataattccaacatctgtcacctcattgtttgcatctactgatggtcttttttccattcggaaacattttcctgtttcttggtgtgtggaatgattttttattgaaacctggatatttttaggtattatgttatgagactatgggtcttatttaaaccttctgctttagccaactttctcagataccaccacagcaggggaattgggagcactgcttcattattaccaggtgtggctaggagtccaggttccccagtcagcctccctttatactgagtaacagggtcccctcattactactgggcaaggtgagaattcagtttcccattaggtctttattgattcttccctggctggaatgtgcagcggcaccttttggtgcaccctgggaatctccactaatgctatgggacagagtgaccaggaagagcttcattacaccaggtgggaatgaaattcccagtagcctacacagccttctccgacaccactctggagttgtattcttccagcacacaaacatacacaatttaactcaaagcatcttagcagagcttaattaaatggatagatgcctgttccctttgctggataccaagaatacaaaagtcagggagttggggcacctctttacagcttggtgagagtgtaagtctggactccccactcagcatttgctggtatgggtggggccatggtgtttttccatggtgtttggttggagtacagccttttttacccttgcttggctacccttttctggtcctttggcaggagagagcaggactctcttagggcttttttttcccctgcatttattgacatttccaggttgctgactttttcagctccaagttggaaatatatgagctgaaaagaaaatgtagggaactcatcacagtgttgttacttgggccccaatgttcctagcctattttctgtctactattcagagtcttgctgtgttttaatataatatccaggatttttatatgcatttagcagaaggatgtctactctgcctttgtagaagtgtctcactgatttttacatatttttccagcacacaaacatacacaatttaactcaaagcatcttagcagagcttaattaaatggatagatgtctgttccctttgctggacgccaagaatacaaaaaagaacaagtgacaattttctctgtcttagggagaagagacagcagaagtgtaaatgatccctaaagagtgatagatgttatcatgaagccacaggaggggtgccaggctgcacaaaagagacactggatgcttcttggtagtagaggcagtggcttcccagccttggggctaaggcttgtagggtgaattggaacttttcagatgagcaaggcaaagaagggaccttctaacattccttggatggaacatttttgacattttcccatttacagctacttatattttctacaagtgtcactgtgaccaacttatgtacacatactttttcttgcttagttataataatctgttcttaaagaaaatgtcagtctctacattctatgctgactgttaaggaaagagcacccacatctgctcctacttagctttttttctgtggttcttacacagtattcctttttttcttttcttgaaagagactcctcctttcttttcttttcttgaaagagttttaaacagataagatggcaaaagtgactgatctctactcccccagtttgaatggtaaatttgaatggtaaattcccatgaacatatatggaaatgtctttatcctactttctccaataaaggctgttcttagcttttcaaatgcaaagtgaaacctttatttatcttgatttcttttttttttttttttttttttttttttttgagatgctctgtcacccaggctggagtgcagtggcaagatcttggctcactgcaagctccgcctcccaggttcacgccattctcctggctcagcctcccgagtaactgggactacaggcacctgccgtcacgcctggctaattttttgtatttttagtagagaatggagtttcaccgtgttagccaggatggtctcgatctcctgaccttgtgatctgcccgcctcggcctcccaaagtgctgggattacaggctcgagccactgcctccagcctatcctgatttctactgtcatgcctcacatcagtccttttttttttttttgagacagagtctcgctctgtggcccaggctagactgcagtggcatgatctcggctcactgcaacctccacctccggggttctagcaattctcctgcctcagcctcctgagtagctgggattataggcgcatgccacacctggctttttgtattttagtggagatggggtttcactgtgttgctcaggctggtcttgatctcctgagctcagacaatccccccgccttggcctcccaaagtgctaggattataggcgagagctgctgtgtgcttcttaagtgaggtaagtaacttccatagaaaatttccatcagttcattcatgaaagaacaaagaacctggcaaaacttaaaaaaacgtttccaagaatcagataaaagaggacaaaccttagggagaagaaggcagctgctcatttccagcaggggaagtagctgcatagagtacaaggactggtaggcctgttggctgttcctgtttaaggagacaagatgggcatggaacagggaccaccccctcctctgggagaagctgttacccccttcacttttcctcctctgtcattacccacaatcactctccttctttgcgctatggtaggtgtttacccatcataggaatgggcatttgaactttgaaactgaatgtggtgattacacttcatgctgaagcttttcacatgagtgctttcataagcattaagtaaaattttataatgactgcagtccaaggacattttccctggtttttggccagtctaaatattgtaagagagagagaagaaaagtgtacggaatataattgtctctaagctaagaaatgtggatgttcaaataaaacatacgtacagaa

SEQ ID NO: 162813 - protein, 915 aa, Artificial Sequence
  derived and/or modified sequence
MARRSSFQSCQIISLFTFAVGVNICLGFTAHRIKRAEGWEEGPPTVLSDSPWTNISGSCKGRCFELQEAGPPDCRCDNLCKSYTSCCHDFDELCLKTARGWECTKDRCGEVRNEENACHCSEDCLARGDCCTNYQVVCKGESHWVDDDCEEIKAAECPAGFVRPPLIIFSVDGFRASYMKKGSKVMPNIEKLRSCGTHSPYMRPVYPTKTFPNLYTLATGLYPESHGIVGNSMYDPVFDATFHLRGREKFNHRWWGGQPLWITATKQGVKAGTFFWSVVIPHERRILTILQWLTLPDHERPSVYAFYSEQPDFSGHKYGPFGPEESSYGSPFTPAKRPKRKVAPKRRQERPVAPPKKRRRKIHRMDHYAAETRQDKMTNPLREIDKIVGQLMDGLKQLKLHRCVNVIFVGDHGMEDVTCDRTEFLSNYLTNVDDITLVPGTLGRIRSKFSNNAKYDPKAIIANLTCKKPDQHFKPYLKQHLPKRLHYANNRRIEDIHLLVERRWHVARKPLDVYKKPSGKCFFQGDHGFDNKVNSMQTVFVGYGSTFKYKTKVPPFENIELYNVMCDLLGLKPAPNNGTHGSLNHLLRTNTFRPTMPEEVTRPNYPGIMYLQSDFDLGCTCDDKVEPKNKLDELNKRLHTKGSTEERHLLYGRPAVLYRTRYDILYHTDFESGYSEIFLMPLWTSYTVSKQAEVSSVPDHLTSCVRPDVRVSPSFSQNCLAYKNDKQMSYGFLFPPYLSSSPEAKYDAFLVTNMVPMYPAFKRVWNYFQRVLVKKYASERNGVNVISGPIFDYDYDGLHDTEDKIKQYVEGSSIPVPTHYYSIITSCLDFTQPADKCDGPLSVSSFILPHRPDNEESCNSSEDESKWVEELMKMHTARVRDIEHLTSLDFFRKTSRSYPEILTLKTYLHTYESEI

SEQ ID NO: 162814 - DNA, 2748 bp, Artificial Sequence
  derived and/or modified sequence
atggcccggagaagcagctttcagagctgccaaataattagcctctttactttcgccgtaggtgttaacatctgcctggggtttacggcgcaccgcatcaagcgcgccgaaggctgggaagagggaccaccgacagtgctgagcgactctccctggacaaatattagcggatcatgcaagggcaggtgcttcgagcttcaagaggcaggtcctcccgattgcaggtgcgacaacctttgcaaaagctacactagctgttgtcacgactttgacgagctgtgcttgaagacagcaagagggtgggagtgtactaaagaccgatgcggcgaagttcgcaacgaggagaacgcatgtcattgctccgaggactgcctggcccgcggtgactgctgtaccaactatcaagtggtgtgcaaaggagaaagccattgggttgacgatgattgcgaggaaataaaagctgcagagtgccctgctggcttcgttcgaccccccctcatcatattcagtgttgatggttttcgcgcctcttatatgaagaagggctctaaagtcatgcccaatatagaaaagcttagatcatgtggcacccacagcccctacatgcgtccagtgtacccaacaaaaaccttcccaaacttatataccctggccaccggcctgtatcctgagtctcatggcattgtcgggaactcaatgtatgacccagtgtttgacgccaccttccatctgcggggacgggaaaagtttaatcatcgctggtggggcggacagccattgtggatcaccgccacaaaacagggtgtaaaggcaggaacctttttctggtcagtggtgatcccacacgagagaagaattcttaccattctgcagtggttgacgctgcccgatcatgaaagacccagtgtgtacgccttctactcagagcagcctgatttttctggacacaagtacggtcctttcggtcccgaagagtccagctatggttcaccgtttactcctgcaaagaggccaaagaggaaggtggctcctaaacgcagacaagaacggcctgttgcccccccgaagaaaagaagacggaaaatccacagaatggaccactatgctgcggagacccgccaggataagatgactaatcctcttcgcgagatagacaagattgtcggtcagctgatggacggccttaagcagctcaagctgcaccggtgtgtgaatgtcatcttcgtgggggaccacggaatggaggacgtcacttgtgatagaaccgagttcctctctaattatctcacaaatgtagacgacattactttagtaccaggtaccctgggccgtatccggtctaaattctcgaacaacgctaaatatgacccgaaagcaattatcgcaaacctgacttgcaaaaaacctgaccagcattttaaaccgtatttgaaacagcacttacccaaacggctgcactacgctaataatcgccggatcgaagacatccacttgctagtggaacgcaggtggcacgtggcacgcaaaccgttagatgtgtataagaaacctagcggcaagtgcttttttcagggggaccatggctttgacaacaaggtgaacagcatgcagacagttttcgtcgggtatggatccacttttaagtataagacaaaggtccccccgttcgagaacattgagctgtataacgtgatgtgtgatctgcttggcctgaagcctgcccccaacaatggaacccacgggtcactgaaccacttattacgcacgaatacctttagacccacaatgccagaggaagtaacaagacctaactaccccggcataatgtatttacagtcagacttcgatctgggatgcacatgcgatgacaaggtcgagccaaaaaataagcttgacgagttaaacaaaaggctgcacaccaagggcagcacagaggagcggcatctgctatacggcaggccggccgtcctttacagaacacgctacgatattctctaccacacagactttgaaagcggttatagcgagatcttcctgatgcccttgtggacatcttatactgtgagtaagcaggcagaggtgagctctgtgccggatcatttgacctcttgtgtgcggcccgatgtcagagtctctccctctttttcccagaattgcctcgcgtacaaaaacgataaacaaatgtcttacggctttttgtttcctccctatctctctagcagccccgaggcgaagtacgatgccttcctggttaccaacatggtccccatgtaccccgcttttaagagggtctggaattacttccagagagttcttgtcaaaaagtacgcatctgagagaaatggagtgaatgtcatttctggacccatatttgattacgattacgatggtcttcatgataccgaggacaagattaaacagtatgtggagggctcaagtattcccgtgcccacacactattactcaattataaccagctgcctggacttcactcagcccgccgacaagtgtgatggtcccttgagcgtctctagctttattttgccgcaccggcccgataatgaggagagttgcaactcatctgaagacgagagcaagtgggtggaagaactcatgaagatgcacacagctcgggtacgagatatcgagcaccttacttccctggacttttttaggaagacaagccgaagctaccctgagattcttactctgaaaacctacctccacacctacgaatcagaaatatag

SEQ ID NO: 162815 - DNA, 2748 bp, Artificial Sequence
  derived and/or modified sequence
atggcccggcgcagcagcttccagagctgccagatcatcagcctcttcacctttgctgtgggcgtgaacatctgcctgggcttcaccgcccaccgcatcaagagagctgagggctgggaggagggccccccaacagtgctgagtgacagcccctggaccaacatcagcggcagctgcaagggccgctgctttgagctgcaggaggccggccccccagactgccgctgtgacaacctgtgcaagagctacaccagctgctgccacgactttgatgagctgtgcctgaagacagcccggggctgggagtgcaccaaggacagatgtggggaggtgagaaatgaagaaaatgcctgccactgcagcgaggactgcctggcccggggggactgctgcaccaactaccaggtggtgtgcaagggggagagccactgggtggatgatgactgtgaggagatcaaggctgctgagtgcccagctggctttgtgcggcccccactcatcatcttctctgtggatggcttccgggccagctacatgaagaagggcagcaaggtgatgcccaacatcgagaagctgcggagctgtggcacccacagcccctacatgaggcctgtgtaccccaccaagaccttccccaacctgtacaccctggccaccggcctgtacccagagagccacggcatcgtgggcaacagcatgtatgaccctgtgtttgatgccaccttccacctgcggggccgggagaagttcaaccaccgctggtggggcggccagcccctgtggatcacagccaccaagcagggcgtgaaggccggcaccttcttctggagcgtggtgatcccccatgagcggcgcatcctgaccatcctgcagtggctgaccctgcctgaccacgagcggcccagcgtgtatgccttctacagcgagcagcctgacttcagcggccacaagtatggcccctttggacctgaggagagcagctatggcagccccttcaccccagccaagaggcccaagaggaaggtggcccccaagaggcggcaggagaggcctgtggccccacccaagaagagaagaaggaagatccacaggatggaccactatgctgctgagacccggcaggacaagatgaccaaccccctgcgggagattgacaagatcgtgggccagctgatggatggcctgaagcagctgaagctgcaccgctgtgtgaatgtcatctttgtgggggaccacggcatggaggatgtgacctgtgacagaacagagttcctgagcaactacctgaccaacgtggatgacatcaccctggtgcccggcaccctgggccgcatccgcagcaagttcagcaacaatgccaagtatgaccccaaggccatcatcgccaacctgacctgcaagaagccagaccagcacttcaagccctacctgaagcagcacctgcccaagaggctgcactacgccaacaacagaagaattgaggacatccacctgctggtggagcggcgctggcacgtggccaggaagcccctggatgtgtacaagaagcccagcggcaagtgcttcttccagggcgaccacggctttgacaacaaggtgaacagcatgcagacagtgtttgtgggctacggcagcaccttcaagtacaagaccaaggtgcccccatttgaaaatattgagctgtacaacgtgatgtgtgacctgctgggcctgaagccagcccccaacaacggcacccacggcagcctgaaccacctgctgcggaccaacaccttccggcccaccatgcctgaggaggtgacccggcccaactacccaggcatcatgtacctgcagagcgactttgacctgggctgcacctgtgatgacaaggtggagcccaagaacaagctggatgagctgaacaagaggctgcacaccaagggcagcacagaggagcggcacctgctgtatggccggcctgctgtgctgtaccgcaccaggtatgacatcctgtaccacacagactttgagagcggctacagcgagatcttcctgatgcccctgtggaccagctacacagtgtccaagcaggccgaggtgtcctctgtgcctgaccacctgaccagctgtgtgcggccagatgtgcgggtgagccccagcttcagccagaactgcctggcctacaagaatgacaagcagatgtcctatggcttcctgtttcctccctacctgagcagcagccctgaggccaagtatgatgccttcctggtgaccaacatggtgcccatgtacccagccttcaagagggtgtggaactacttccagagggtgctggtgaagaagtatgccagcgagagaaatggagtgaatgtcatcagcggccccatctttgattatgactatgatggcctgcatgacacagaggacaagatcaagcagtatgtggagggcagcagcatccctgtgcccacccactactacagcatcatcaccagctgcctggacttcacccagcctgctgacaagtgtgatggccccctgtctgtgtcctccttcatcctgccccacaggccagacaatgaggagagctgcaacagcagtgaagatgagagcaagtgggtggaggagctgatgaagatgcacacagcccgggtgcgggacatcgagcacctgaccagcctggacttcttcaggaagaccagccgcagctacccagagatcctgaccctgaagacctacctgcacacctatgaaagtgagatctag

SEQ ID NO: 162816 - DNA, 2748 bp, Artificial Sequence
  derived and/or modified sequence
atggcccggcggagcagcttccagagctgccagatcatcagcctgtttacctttgccgttggagtgaacatttgcctcggctttactgcgcataggatcaaaagagccgaaggatgggaagagggcccccccaccgtgttgtccgacagcccttggacaaacatatcaggctcctgcaagggtaggtgttttgaattgcaggaagccgggccacctgactgtcgctgtgacaacctctgcaaatcctatacatcctgttgccatgactttgatgaactctgcctgaagacagccaggggatgggagtgcaccaaggacaggtgcggtgaggttcgcaacgaagagaatgcatgccactgctctgaagattgcttagctaggggcgattgctgtaccaactaccaggtggtatgtaagggagaatctcattgggtagacgacgactgcgaagaaattaaagccgctgaatgtcctgccggattcgtcagacctcctctcatcattttttctgtagacggttttcgcgccagttatatgaagaagggtagcaaagtgatgccaaacattgagaagctcagatcatgtggaacccattccccctacatgaggccagtctaccctactaaaacttttcccaacctgtacaccctggctacgggtttgtaccccgagtctcacggcattgtaggcaatagtatgtatgatcctgtcttcgatgccacattccacctcagagggcgggagaagttcaatcatcgatggtggggaggacaaccattgtggatcacggccactaagcaaggggtcaaggccggcacatttttttggtccgtggttattccacacgaacgcaggatcttgaccatattacaatggttaacccttcctgaccatgaacggccctccgtgtacgcattttattctgaacagcccgatttttctggacacaagtacggaccttttggtcctgaggagagcagctacggatcaccctttacacccgccaagcgtccgaaaagaaaggtcgcacctaaacgacgacaggaacggcccgtcgccccgcccaaaaaacggcggcggaagatccaccggatggatcactacgctgcagagacacgccaggacaaaatgacaaatccgctgcgggagatcgacaaaattgttggacagctgatggacggcctgaagcagctgaagctccaccgttgcgtcaatgtcatcttcgtgggcgaccatggcatggaagacgtgacttgtgacaggaccgaattcctgtctaactatctaacgaacgtggatgacattaccctggtgccgggtaccttagggcgtatcaggtctaaatttagtaataatgccaagtatgatcccaaggcaataatcgccaatctgacctgtaaaaagccagaccagcactttaaaccctatctcaagcaacaccttcctaagagattacactatgctaacaacaggcggatagaggatattcatctgctcgtagagagaagatggcatgttgcgaggaagccactggatgtctataaaaaaccttctggaaaatgcttcttccaaggcgaccatggattcgataataaggtcaactcgatgcagaccgttttcgtgggctatggcagcacatttaagtataaaacaaaagtgcctcccttcgaaaacatcgagctctataacgttatgtgcgatctgcttggacttaagcccgctccaaacaacggaacacatggttctcttaaccacctacttaggacgaacacattcagacccaccatgccggaagaggttacccgtcctaattaccctggaatcatgtacctgcagtcggactttgatttgggctgtacctgcgacgataaggtggaacccaaaaacaaactcgatgagctgaacaagcgcttacacaccaagggatcaaccgaagagagacatttgctctatggccggccagcagtgttgtaccgtactcgctacgatatactctaccataccgacttcgaaagcggctactcggagatctttctgatgccactttggaccagctacactgtctccaagcaagctgaggtcagctctgtaccagatcacctcacctcatgcgtaagacccgatgtgagggttagcccttcttttagtcagaactgcctggcttataagaatgataaacaaatgagctacggatttcttttccctccatacctgtcctcctcacctgaggcgaagtatgacgccttcctggtcacaaacatggtcccaatgtaccccgcatttaagagagtctggaactacttccagagggtcttagttaaaaaatatgccagcgaacggaacggcgttaatgttatctctggccccatctttgactacgactacgacgggctccatgacacagaagacaaaatcaaacagtatgtggaagggtcctctatccccgtccccacgcactactattccattatcaccagctgcttggacttcactcagccggccgacaagtgtgacggaccactttccgtctccagctttatcctgccccatcgccctgacaatgaagaatcctgtaacagctccgaggatgaatctaagtgggtggaagagctgatgaagatgcacacagctagggttcgggatatcgagcacttaacatcgttggacttttttcgcaaaactagccggtcgtatccggagattctaacccttaaaacttatctgcatacatatgaatctgagatctag

SEQ ID NO: 162817 - DNA, 2748 bp, Artificial Sequence
  derived and/or modified sequence
atggcacgacgcagcagctttcaaagctgtcagattatttccctgtttaccttcgcagtcggcgtgaatatatgtctgggcttcaccgctcaccgcatcaaacgggcagaggggtgggaagagggccctcctactgtcttatcagatagtccttggaccaacattagtggcagctgtaaagggcgatgctttgagctgcaggaagccggtcccccagactgtagatgtgacaatctgtgcaagtcttacacaagttgttgccatgattttgatgaactgtgtcttaaaacggctcgcggatgggaatgcaccaaagataggtgcggcgaggtgcgaaacgaagaaaatgcctgtcattgctccgaggattgtcttgctcggggagattgttgcaccaactatcaagtagtgtgtaaaggcgagtcacattgggtggatgatgattgcgaggagatcaaggccgcagaatgccccgctgggttcgttcgacccccactcatcatctttagtgtggatggatttcgggcaagctacatgaagaaggggtctaaggtgatgccaaacattgaaaagttgcgctcttgtggcacccacagtccctatatgaggccagtgtatcctactaaaacctttcctaatttgtatacactggctacagggctctacccagagtcacacggcatcgtcgggaactccatgtacgatcccgttttcgacgcaacttttcatctgaggggcagggagaagttcaaccaccgttggtggggaggtcagcccctctggatcacggccaccaagcaaggtgtcaaagctggcacttttttctggagcgtcgtgatcccccatgagagacgcatcctcactatactgcagtggctaacactgcccgaccatgagaggcctagcgtctacgctttttattcggagcagcctgacttcagtggacacaaatatggtccatttggacctgaggaatcaagttacggctctcccttcacccctgcaaagcgccctaaaagaaaagttgcacccaagcggagacaggagcgtcccgtggcgcctccaaagaaaagaaggcggaagattcatagaatggaccattacgctgccgagacccggcaagataaaatgaccaaccctctgcgcgagatagacaaaatagttggacaactcatggatgggcttaagcagctgaagctgcatcgctgtgtcaacgtcatttttgtgggtgaccatggaatggaagacgtgacctgtgataggacagagttccttagtaattacctgaccaacgtggacgacatcacactggtgcctggcacgctgggcagaatcagatctaagttctcaaacaatgccaaatatgatcccaaagccatcattgcaaatcttacctgcaagaaaccggatcaacactttaagccctacctgaagcagcatttacctaagcggctgcattatgccaacaatcgacgtattgaagacatacatttactggttgaaagacgctggcacgttgcgaggaagccattggatgtgtacaaaaaaccaagtggcaagtgtttttttcagggagaccatggatttgacaacaaagtaaactcaatgcagactgtcttcgtgggttatggcagtacctttaagtataagacaaaggtgcctccgtttgaaaatattgaactatacaacgtcatgtgcgaccttttgggcctgaaaccggctccaaacaatggcacacacggctccctgaaccatctgctacggacgaacacctttaggcccacaatgcctgaagaagtcacccggcctaattatcccggaattatgtacctgcagagtgacttcgatctgggttgtacttgcgatgataaagtagaacccaagaataagttagatgaacttaataagcggttacacacaaaggggagcacagaggagcgccacctgctctacggaagaccagcagtgctctataggacccgatacgacattctctaccacactgacttcgagtcaggatacagcgagattttcctcatgccactgtggacctcgtacactgtgtcaaaacaagccgaggtttcatcggttcctgatcatttaacaagttgtgtcaggccggacgtcagagtgagtccttcgttttctcagaattgcttggcctacaaaaacgataagcagatgtcttacggtttcttgttccccccttatctttctagcagccccgaggcaaagtacgatgcattcctggtgacaaacatggtcccaatgtaccctgccttcaagagagtgtggaattatttccagagagtactggtcaaaaaatacgcaagcgaaaggaacggggttaacgttataagtggccctatctttgactacgattacgacggactccacgatacagaggacaaaatcaagcaatacgtggaaggctcctctatcccagtgccaactcactactattccatcatcactagctgtctcgacttcacacaacccgctgataaatgtgacggtccactgtctgtcagctctttcattctgccgcatagacccgacaacgaggagtcttgcaacagctcagaagacgaatccaagtgggtggaggagctcatgaaaatgcatactgccagggtgcgggatatagagcatttgacttctcttgactttttcagaaaaaccagcagaagttacccggaaattttaaccctgaagacttacttgcacacttacgaatctgagatctag

SEQ ID NO: 162818 - DNA, 2748 bp, Artificial Sequence
  derived and/or modified sequence
atggccagaagaagcagcttccagagctgccagatcatcagcctgttcaccttcgccgtgggcgtgaacatctgcctgggcttcaccgcccacagaatcaagagagccgagggctgggaggagggcccccccaccgtgctgagcgacagcccctggaccaacatcagcggcagctgcaagggcagatgcttcgagctgcaggaggccggcccccccgactgcagatgcgacaacctgtgcaagagctacaccagctgctgccacgacttcgacgagctgtgcctgaagaccgccagaggctgggagtgcaccaaggacagatgcggcgaggtgagaaacgaggagaacgcctgccactgcagcgaggactgcctggccagaggcgactgctgcaccaactaccaggtggtgtgcaagggcgagagccactgggtggacgacgactgcgaggagatcaaggccgccgagtgccccgccggcttcgtgagaccccccctgatcatcttcagcgtggacggcttcagagccagctacatgaagaagggcagcaaggtgatgcccaacatcgagaagctgagaagctgcggcacccacagcccctacatgagacccgtgtaccccaccaagaccttccccaacctgtacaccctggccaccggcctgtaccccgagagccacggcatcgtgggcaacagcatgtacgaccccgtgttcgacgccaccttccacctgagaggcagagagaagttcaaccacagatggtggggcggccagcccctgtggatcaccgccaccaagcagggcgtgaaggccggcaccttcttctggagcgtggtgatcccccacgagagaagaatcctgaccatcctgcagtggctgaccctgcccgaccacgagagacccagcgtgtacgccttctacagcgagcagcccgacttcagcggccacaagtacggccccttcggccccgaggagagcagctacggcagccccttcacccccgccaagagacccaagagaaaggtggcccccaagagaagacaggagagacccgtggccccccccaagaagagaagaagaaagatccacagaatggaccactacgccgccgagaccagacaggacaagatgaccaaccccctgagagagatcgacaagatcgtgggccagctgatggacggcctgaagcagctgaagctgcacagatgcgtgaacgtgatcttcgtgggcgaccacggcatggaggacgtgacctgcgacagaaccgagttcctgagcaactacctgaccaacgtggacgacatcaccctggtgcccggcaccctgggcagaatcagaagcaagttcagcaacaacgccaagtacgaccccaaggccatcatcgccaacctgacctgcaagaagcccgaccagcacttcaagccctacctgaagcagcacctgcccaagagactgcactacgccaacaacagaagaatcgaggacatccacctgctggtggagagaagatggcacgtggccagaaagcccctggacgtgtacaagaagcccagcggcaagtgcttcttccagggcgaccacggcttcgacaacaaggtgaacagcatgcagaccgtgttcgtgggctacggcagcaccttcaagtacaagaccaaggtgccccccttcgagaacatcgagctgtacaacgtgatgtgcgacctgctgggcctgaagcccgcccccaacaacggcacccacggcagcctgaaccacctgctgagaaccaacaccttcagacccaccatgcccgaggaggtgaccagacccaactaccccggcatcatgtacctgcagagcgacttcgacctgggctgcacctgcgacgacaaggtggagcccaagaacaagctggacgagctgaacaagagactgcacaccaagggcagcaccgaggagagacacctgctgtacggcagacccgccgtgctgtacagaaccagatacgacatcctgtaccacaccgacttcgagagcggctacagcgagatcttcctgatgcccctgtggaccagctacaccgtgagcaagcaggccgaggtgagcagcgtgcccgaccacctgaccagctgcgtgagacccgacgtgagagtgagccccagcttcagccagaactgcctggcctacaagaacgacaagcagatgagctacggcttcctgttccccccctacctgagcagcagccccgaggccaagtacgacgccttcctggtgaccaacatggtgcccatgtaccccgccttcaagagagtgtggaactacttccagagagtgctggtgaagaagtacgccagcgagagaaacggcgtgaacgtgatcagcggccccatcttcgactacgactacgacggcctgcacgacaccgaggacaagatcaagcagtacgtggagggcagcagcatccccgtgcccacccactactacagcatcatcaccagctgcctggacttcacccagcccgccgacaagtgcgacggccccctgagcgtgagcagcttcatcctgccccacagacccgacaacgaggagagctgcaacagcagcgaggacgagagcaagtgggtggaggagctgatgaagatgcacaccgccagagtgagagacatcgagcacctgaccagcctggacttcttcagaaagaccagcagaagctaccccgagatcctgaccctgaagacctacctgcacacctacgagagcgagatctag

SEQ ID NO: 162819 - DNA, 3233 bp, Artificial Sequence
  derived and/or modified sequence
cgtgaaggcaaagagaacacgctgcaaaaggctttccaagaatcctcgacatggcaaggaggagctcgttccagtcgtgtcagataatatccctgttcacttttgccgttggagtcaatatctgcttaggattcactgcacatcgaattaagagagcagaaggatgggaggaaggtcctcctacagtgctatcagactccccctggaccaacatctccggatcttgcaagggcaggtgctttgaacttcaagaggctggacctcctgattgtcgctgtgacaacttgtgtaagagctataccagttgctgccatgactttgatgagctgtgtttgaagacagcccgtggctgggagtgtactaaggacagatgtggagaagtcagaaatgaagaaaatgcctgtcactgctcagaggactgcttggccaggggagactgctgtaccaattaccaagtggtttgcaaaggagagtcgcattgggttgatgatgactgtgaggaaataaaggccgcagaatgccctgcagggtttgttcgccctccattaatcatcttctccgtggatggcttccgtgcatcatacatgaagaaaggcagcaaagtcatgcctaatattgaaaaactaaggtcttgtggcacacactctccctacatgaggccggtgtacccaactaaaacctttcctaacttatacactttggccactgggctatatccagaatcacatggaattgttggcaattcaatgtatgatcctgtatttgatgccacttttcatctgcgagggcgagagaaatttaatcatagatggtggggaggtcaaccgctatggattacagccaccaagcaaggggtgaaagctggaacattcttttggtctgttgtcatccctcacgagcggagaatattaaccatattgcagtggctcaccctgccagatcatgagaggccttcggtctatgccttctattctgagcaacctgatttctctggacacaaatatggccctttcggccctgaggagagtagttatggctcaccttttactccggctaagagacctaagaggaaagttgcccctaagaggagacaggaaagaccagttgctcctccaaagaaaagaagaagaaaaatacataggatggatcattatgctgcggaaactcgtcaggacaaaatgacaaatcctctgagggaaatcgacaaaattgtggggcaattaatggatggactgaaacaactaaaactgcatcggtgtgtcaacgtcatctttgtcggagaccatggaatggaagatgtcacatgtgatagaactgagttcttgagtaattacctaactaatgtggatgatattactttagtgcctggaactctaggaagaattcgatccaaatttagcaacaatgctaaatatgaccccaaagccattattgccaatctcacgtgtaaaaaaccagatcagcactttaagccttacttgaaacagcaccttcccaaacgtttgcactatgccaacaacagaagaattgaggatatccatttattggtggaacgcagatggcatgttgcaaggaaacctttggatgtttataagaaaccatcaggaaaatgctttttccagggagaccacggatttgataacaaggtcaacagcatgcagactgtttttgtaggttatggctcaacatttaagtacaagactaaagtgcctccatttgaaaacattgaactttacaatgttatgtgtgatctcctgggattgaagccagctcctaataatgggacccatggaagtttgaatcatctcctgcgcactaataccttcaggccaaccatgccagaggaagttaccagacccaattatccagggattatgtaccttcagtctgattttgacctgggctgcacttgtgatgataaggtagagccaaagaacaagttggatgaactcaacaaacggcttcatacaaaagggtctacagaagagagacacctcctctatgggcgacctgcagtgctttatcggactagatatgatatcttatatcacactgactttgaaagtggttatagtgaaatattcctaatgccactctggacatcatatactgtttccaaacaggctgaggtttccagcgttcctgaccatctgaccagttgcgtccggcctgatgtccgtgtttctccgagtttcagtcagaactgtttggcctacaaaaatgataagcagatgtcctacggattcctctttcctccttatctgagctcttcaccagaggctaaatatgatgcattccttgtaaccaatatggttccaatgtatcctgctttcaaacgggtctggaattatttccaaagggtattggtgaagaaatatgcttcggaaagaaatggagttaacgtgataagtggaccaatcttcgactatgactatgatggcttacatgacacagaagacaaaataaaacagtacgtggaaggcagttccattcctgttccaactcactactacagcatcatcaccagctgtctggatttcactcagcctgccgacaagtgtgacggccctctctctgtgtcctccttcatcctgcctcaccggcctgacaacgaggagagctgcaatagctcagaggacgaatcaaaatgggtagaagaactcatgaagatgcacacagctagggtgcgtgacattgaacatctcaccagcctggacttcttccgaaagaccagccgcagctacccagaaatcctgacactcaagacatacctgcatacatatgagagcgagatttaactttctgagcatctgcagtacagtcttatcaactggttgtatatttttatattgtttttgtatttattaatttgaaaccaggacattaaaaatgttagtattttaatcctgtaccaaatctgacatattatgcctgaatgactccactgtttttctctaatgcttgatttaggtagccttgtgttctgagtagagcttgtaataaatactgcagcttgagtttttagtggaagcttctaaatggtgctgcagatttgatatttgcattgaggaaatattaattttccaatgcacagttgccacatttagtcctgtactgtatggaaacactgattttgtaaagttgcctttatttgctgttaactgttaactatgacagatatatttaagccttataaaccaatcttaaacataataaatcacacattcagtttt

SEQ ID NO: 162820 - protein, 387 aa, Artificial Sequence
  derived and/or modified sequence
MTRDEALPDSHSAQDFYENYEPKEILGRGVSSVVRRCIHKPTSQEYAVKVIDVTGGGSFSPEEVRELREATLKEVDILRKVSGHPNIIQLKDTYETNTFFFLVFDLMKRGELFDYLTEKVTLSEKETRKIMRALLEVICTLHKLNIVHRDLKPENILLDDNMNIKLTDFGFSCQLEPGERLREVCGTPSYLAPEIIECSMNEDHPGYGKEVDMWSTGVIMYTLLAGSPPFWHRKQMLMLRMIMSGNYQFGSPEWDDYSDTVKDLVSRFLVVQPQNRYTAEEALAHPFFQQYLVEEVRHFSPRGKFKVIALTVLASVRIYYQYRRVKPVTREIVIRDPYALRPLRRLIDAYAFRIYGHWVKKGQQQNRAALFENTPKAVLLSLAEEDY

SEQ ID NO: 162821 - DNA, 1164 bp, Artificial Sequence
  derived and/or modified sequence
atgacacgggatgaggcccttcccgactctcattctgcacaggatttctatgagaattacgaacccaaagagatcttggggagaggggtgtccagtgtcgtgcgacgttgtattcataaaccaacttcccaggagtacgcagtcaaggtcatagatgtaaccggcgggggatcattcagccccgaagaggtgagggagttaagagaggccaccctcaaggaggttgatatactacggaaggtctccggacaccccaacattatccagctaaaggatacctatgagacaaacaccttcttcttcttggtgttcgatctgatgaaaagaggggaactgttcgattatctgacagaaaaggtgacgctatccgagaaagaaactaggaaaattatgcgcgccctcctcgaggtgatctgtactctgcacaagctcaatattgtgcatcgggacttgaagcctgagaatatcttgctcgacgacaacatgaacatcaagctgaccgacttcggattttcttgccagctggagcctggggagagactgcgtgaggtgtgcggaaccccctcatatctggctcctgagattatcgaatgctcaatgaacgaggatcatcccgggtacggaaaggaggtcgatatgtggtccacaggcgtcattatgtacacactcctcgccgggtctccacccttctggcaccgcaagcagatgctgatgttacgcatgatcatgagtggcaactatcaatttgggtctcctgagtgggacgactacagcgacactgttaaggatcttgtgtcacggttccttgtcgtccagccgcagaaccggtacacggctgaagaagccctcgcacatcccttttttcaacagtatctggttgaggaagtgcggcacttttctcctcgcggtaagtttaaggtgattgcactgacggtgctggcttcagttcggatctactatcagtatcgtagggtgaaaccagtgaccagagagatcgttatcagagatccgtacgccctgagaccactcagacgcttaattgacgcttacgcatttcgcatttacgggcactgggtcaaaaagggccagcaacaaaatagggccgcgttattcgagaatacgcccaaggcagtgctgctttccctggctgaggaagattattag

SEQ ID NO: 162822 - DNA, 1164 bp, Artificial Sequence
  derived and/or modified sequence
atgaccagagatgaggccctgcctgacagccacagcgcccaggacttctatgagaactatgagcccaaggagatcctgggccggggcgtgtcctctgtggtgcggcgctgcatccacaagcccaccagccaggagtatgctgtgaaggtgattgatgtgactggaggcggcagcttcagccctgaggaggtgcgggagctgcgggaggccaccctgaaggaggtggacatcctgaggaaggtgtctggccaccccaacatcatccagctgaaggacacctatgagaccaacaccttcttcttcctggtgtttgacctgatgaagagaggagagctgtttgactacctgacagagaaggtgaccctgtctgagaaggagaccaggaagatcatgagggccctgctggaggtgatctgcaccctgcacaagctgaacatcgtgcaccgggacctgaagccagagaacatcctgctggatgacaacatgaacatcaagctgacagactttggcttcagctgccagctggagcctggagagcggctgcgggaggtgtgtggcacccccagctacctggcccctgagatcattgaatgttccatgaatgaagaccaccctggctacggcaaggaggtggacatgtggagcactggagtcatcatgtacaccctgctggccggcagcccccccttctggcacaggaagcagatgctgatgctgaggatgatcatgagcggcaactaccagtttggcagccctgagtgggatgactacagcgacacagtgaaggacctggtgagccgcttcctggtggtgcagccccagaaccgctacacagctgaggaggccctggcccaccccttcttccagcagtacctggtggaggaggtgcgccacttcagcccccggggcaagttcaaggtgattgccctgactgtgctggcctctgtgcgcatctactaccagtacagaagagtgaagcctgtgacccgggagatcgtcatccgggacccctatgccctgcggcccctgcggcggctgattgatgcctatgccttccgcatctacggccactgggtgaagaagggccagcagcagaacagagctgccctgtttgagaacacccccaaggctgtgctgctgagcctggccgaggaggactactag

SEQ ID NO: 162823 - DNA, 1164 bp, Artificial Sequence
  derived and/or modified sequence
atgacccgggacgaggccctgcccgacagccacagcgcccaggacttctatgaaaactacgagcccaaagaaatactcggaagaggcgtatctagtgtggtacgacgctgtatacacaaaccaactagccaggagtacgcagttaaggtaatcgatgtgacaggcggcggcagcttctcacctgaagaggtgagggaactccgggaagccaccctaaaagaagtggatatcctccgcaaggtatccgggcatcccaacatcatacagctcaaagatacgtatgaaaccaacaccttctttttcctcgtgtttgaccttatgaagcgaggagaactgttcgattacctgacagaaaaggtcacattgtccgagaaggagaccaggaaaatcatgcgcgcgcttttggaagtcatctgcacactgcacaaattgaacatagtgcaccgcgaccttaagccagagaacattctgcttgacgacaacatgaatatcaaactcacagactttgggtttagttgtcagctggaacctggcgagagacttagggaggtgtgtggaacaccgagttatcttgcacccgaaattatcgaatgctctatgaacgaagatcaccccgggtatggtaaagaggtagacatgtggtctacgggagtgatcatgtatacccttctggcaggctccccccctttctggcacagaaagcagatgctgatgttgagaatgatcatgtctggcaactatcagtttggctcaccagagtgggatgactactcagacaccgtcaaagatctcgtgtcaaggtttctggtcgtgcagccccagaaccggtacactgcagaggaggcgctggctcacccatttttccaacaatatctggttgaagaagtgagacatttctcacctcgcggcaagtttaaggtgattgcgttgacagtactggcaagcgtgaggatttactatcagtaccgaagggtcaagcctgtcactagggagatagttatcagggatccctatgctttgcggcccctccggcgcctcatcgatgcatacgcatttaggatctatggacattgggttaaaaaaggccagcaacagaaccgcgccgccctgtttgaaaatactcctaaagcggtgcttctgagcttagcggaagaggattactag

SEQ ID NO: 162824 - DNA, 1431 bp, Artificial Sequence
  derived and/or modified sequence
acgttagcctccggtcatcaaatagcaaaacccaaaacaacagcagatgatatcttccaagtgtctgctcgggacacggcttcagccctctgtggtcccctctccccggggggctttgggattcttgtcaagctccttcaagagcctgcaagcacttaaccagccacccagagttccctcactgaagatctgagcatgacccgggacgaggcactgccggactctcattctgcacaggacttctatgagaattatgagcccaaagagatcctgggcaggggcgttagcagtgtggtcaggcgatgcatccacaagcccacgagccaggagtacgccgtgaaggtcatcgacgtcaccggtggaggcagcttcagcccggaggaggtgcgggagctgcgagaagccacgctgaaggaggtggacatcctgcgcaaggtctcagggcaccccaacatcatacagctgaaggacacttatgagaccaacactttcttcttcttggtgtttgacctgatgaagagaggggagctctttgactacctcactgagaaggtcaccttgagtgagaaggaaaccagaaagatcatgcgagctctgctggaggtgatctgcaccttgcacaaactcaacatcgtgcaccgggacctgaagcccgagaacattctcttggatgacaacatgaacatcaagctcacagactttggcttttcctgccagctggagccgggagagaggctgcgagaggtctgcgggacccccagttacctggcccctgagattatcgagtgctccatgaatgaggaccacccgggctacgggaaagaggtggacatgtggagcactggcgtcatcatgtacacgctgctggccggctccccgcccttctggcaccggaagcagatgctgatgctgaggatgatcatgagcggcaactaccagtttggctcgcccgagtgggatgattactcggacaccgtgaaggacctggtctcccgattcctggtggtgcaaccccagaaccgctacacagcggaagaggccttggcacaccccttcttccagcagtacttggtggaggaagtgcggcacttcagcccccgggggaagttcaaggtgatcgctctgaccgtgctggcttcagtgcggatctactaccagtaccgccgggtgaagcctgtgacccgggagatcgtcatccgagacccctatgccctccggcctctgcgccggctcatcgacgcctacgctttccgaatctatggccactgggtgaagaaggggcagcagcagaaccgggcagcccttttcgagaacacacccaaggccgtgctcctctccctggccgaggaggactactgaggggctggccagtcagggagggctagggggcaggtggggaggggaagccatggaaatacaagtcaaaggggt

SEQ ID NO: 162825 - DNA, 1566 bp, Artificial Sequence
  derived and/or modified sequence
gatgatatcttccaagtgtctgctcgggacacggcttcagccctctgtggtcccctctccccggggggctttgggattcttgtcaagctccttcaagagcctgcaagcacttaaccagccacccagagttccctcactgaagatctgagcatgacccgggacgaggcactgccggactctcattctgcacaggacttctatgagaattatgagcccaaagagatcctgggcaggggcgttagcagtgtggtcaggcgatgcatccacaagcccacgagccaggagtacgccgtgaaggtcatcgacgtcaccggtggaggcagcttcagcccggaggaggtgcgggagctgcgagaagccacgctgaaggaggtggacatcctgcgcaaggtctcagggcaccccaacatcagatgaagagaggggagctctttgactacctcactgagaaggtcaccttgagtgagaaggaaaccagaaagatcatgcgagctctgctggaggtgatctgcaccttgcacaaactcaacatcgtgcaccgggacctgaagcccgagaacattctcttggatgacaacatgaacatcaagctcacagactttggcttttcctgccagctggagccgggagagaggctgcgagaggtctgcgggacccccagttacctggcccctgagattatcgagtgctccatgaatgaggaccacccgggctacgggaaagaggtggacatgtggagcactggcgtcatcatgtacacgctgctggccggctccccgcccttctggcaccggaagcagatgctgatgctgaggatgatcatgagcggcaactaccagtttggctcgcccgagtgggatgattactcggacaccgtgaaggacctggtctcccgattcctggtggtgcaaccccagaaccgctacacagcggaagaggccttggcacaccccttcttccagcagtacttggtggaggaagtgcggcacttcagcccccgggggaagttcaaggtgatcgctctgaccgtgctggcttcagtgcggatctactaccagtaccgccgggtgaagcctgtgacccgggagatcgtcatccgagacccctatgccctccggcctctgcgccggctcatcgacgcctacgctttccgaatctatggccactgggtgaagaaggggcagcagcagaaccgggcagcccttttcgagaacacacccaaggccgtgctcctctccctggccgaggaggactactgaggggctggccagtcagggagggctagggggcaggtggggaggggaagccatggaaatacaagtcaaaggggtgagatgcgtgcaggcctctgcagaaggagcacttggccctggccaggaacccctggaactgaggccacgatcccctctcaaaggctgtgcacaagggaagtgggtgttcccaccacacagcaatacctgcaggctggggcaggccctgggtgggcagagatcacacgtggcctgagaaccaggaaccccctgctcctctacttcctagatgagccaccatctccatttctcttta

SEQ ID NO: 162826 - DNA, 1164 bp, Artificial Sequence
  derived and/or modified sequence
atgacccgagacgaagccctgcccgattcccattcagcccaagatttctatgaaaattacgagcctaaagagatactgggtcgcggtgtctcaagcgttgtgcggaggtgcattcataaacccacttcccaggaatacgccgtgaaggttatcgacgtgactgggggaggctccttctcacccgaggaagttcgggaactccgtgaggcaaccttaaaggaagtcgatatcctcagaaaggtgagcggccacccaaatatcatccagcttaaagatacctacgagaccaatacctttttctttctggttttcgatcttatgaagagaggagagttgttcgattacctaactgaaaaggtgaccctgagcgaaaaggaaacacggaaaattatgagggctcttcttgaagtcatctgcaccttgcacaaactcaatatagtccaccgtgatctgaaacccgagaatattcttctggatgataacatgaacataaaactgaccgactttggcttctcttgccagctcgagccaggggagagactgcgcgaagtctgcggcactccaagctatctggcccctgagatcattgaatgttctatgaatgaagatcacccgggatatggcaaggaggtggatatgtggtcaacaggagtaatcatgtacaccttattggctggatcaccacccttctggcacagaaagcagatgctgatgttaaggatgatcatgtctggaaactaccagttcggcagtcctgaatgggatgactattcagacacagtcaaggatctcgtatctcggtttcttgtggttcagccacagaaccggtatactgccgaggaagctctggcccaccccttttttcagcagtatctggtggaggaggtccgccactttagcccccgagggaagtttaaggtgatcgccctcaccgttctggcctctgtgcgcatttattatcagtatcgccgagtcaagcccgttacacgcgaaatcgtgattagggatccatacgcactccgtcccctgaggcgactcatagatgcatacgcttttcgcatctacggacactgggtgaaaaagggacagcagcagaacagagcggcactgtttgaaaacacaccgaaagctgtgctgctcagcttagccgaggaagactattag

SEQ ID NO: 162827 - DNA, 1164 bp, Artificial Sequence
  derived and/or modified sequence
atgaccagagacgaggccctgcccgacagccacagcgcccaggacttctacgagaactacgagcccaaggagatcctgggcagaggcgtgagcagcgtggtgagaagatgcatccacaagcccaccagccaggagtacgccgtgaaggtgatcgacgtgaccggcggcggcagcttcagccccgaggaggtgagagagctgagagaggccaccctgaaggaggtggacatcctgagaaaggtgagcggccaccccaacatcatccagctgaaggacacctacgagaccaacaccttcttcttcctggtgttcgacctgatgaagagaggcgagctgttcgactacctgaccgagaaggtgaccctgagcgagaaggagaccagaaagatcatgagagccctgctggaggtgatctgcaccctgcacaagctgaacatcgtgcacagagacctgaagcccgagaacatcctgctggacgacaacatgaacatcaagctgaccgacttcggcttcagctgccagctggagcccggcgagagactgagagaggtgtgcggcacccccagctacctggcccccgagatcatcgagtgcagcatgaacgaggaccaccccggctacggcaaggaggtggacatgtggagcaccggcgtgatcatgtacaccctgctggccggcagcccccccttctggcacagaaagcagatgctgatgctgagaatgatcatgagcggcaactaccagttcggcagccccgagtgggacgactacagcgacaccgtgaaggacctggtgagcagattcctggtggtgcagccccagaacagatacaccgccgaggaggccctggcccaccccttcttccagcagtacctggtggaggaggtgagacacttcagccccagaggcaagttcaaggtgatcgccctgaccgtgctggccagcgtgagaatctactaccagtacagaagagtgaagcccgtgaccagagagatcgtgatcagagacccctacgccctgagacccctgagaagactgatcgacgcctacgccttcagaatctacggccactgggtgaagaagggccagcagcagaacagagccgccctgttcgagaacacccccaaggccgtgctgctgagcctggccgaggaggactactag

SEQ ID NO: 162828 - protein, 338 aa, Artificial Sequence
  derived and/or modified sequence
MEQLRAAARLQIVLGHLGRPSAGAVVAHPTSGTISSASFHPQQFQYTLDNNVLTLEQRKFYEENGFLVIKNLVPDADIQRFRNEFEKICRKEVKPLGLTVMRDVTISKSEYAPSEKMITKVQDFQEDKELFRYCTLPEILKYVECFTGPNIMAMHTMLINKPPDSGKKTSRHPLHQDLHYFPFRPSDLIVCAWTAMEHISRNNGCLVVLPGTHKGSLKPHDYPKWEGGVNKMFHGIQDYEENKARVHLVMEKGDTVFFHPLLIHGSGQNKTQGFRKAISCHFASADCHYIDVKGTSQENIEKEVVGIAHKFFGAENSVNLKDIWMFRARLVKGERTNL

SEQ ID NO: 162829 - protein, 238 aa, Artificial Sequence
  derived and/or modified sequence
MRDVTISKSEYAPSEKMITKVQDFQEDKELFRYCTLPEILKYVECFTGPNIMAMHTMLINKPPDSGKKTSRHPLHQDLHYFPFRPSDLIVCAWTAMEHISRNNGCLVVLPGTHKGSLKPHDYPKWEGGVNKMFHGIQDYEENKARVHLVMEKGDTVFFHPLLIHGSGQNKTQGFRKAISCHFASADCHYIDVKGTSQENIEKEVVGIAHKFFGAENSVNLKDIWMFRARLVKGERTNL

SEQ ID NO: 162830 - DNA, 1017 bp, Artificial Sequence
  derived and/or modified sequence
atggagcagcttagagccgcagcgcgcctccaaattgtgctgggccatctgggcagaccatccgccggcgcggtggttgcgcacccaacaagtggtaccatttcatctgccagctttcacccccagcagttccaatacaccctggataataatgtcctcacactggagcagaggaagttctacgaagagaacgggttcctagtgattaagaatctggtgccggacgctgacattcaacgcttccgtaacgagttcgaaaagatttgccgtaaggaggtcaaacccttgggactgaccgtgatgagagacgtaactatttcaaaatcagaatatgcgccaagtgaaaaaatgattaccaaggtgcaggattttcaagaggataaggaactgtttaggtattgcacgctgccggagattctgaaatatgtagagtgcttcacagggccgaacatcatggcgatgcatactatgctcataaataagcctcctgacagcgggaaaaaaacctcccgccaccccctgcaccaggatcttcattattttccattcaggcccagcgacctgatcgtttgcgcctggaccgccatggagcacatttcccggaataatggatgtctggttgtcctgcccgggacgcacaaggggtcactaaaaccccatgattatcccaagtgggaaggtggagtgaacaaaatgtttcatggcatccaggattatgaagagaataaggcaagagtgcatctggtgatggagaaaggagatactgtgttttttcatcctctgctaatacacgggtcaggccaaaataagacacaggggttccgaaaggcaatctcctgccacttcgcaagcgccgactgccactatattgacgttaaaggcacttcccaagaaaatatcgaaaaggaagttgtcggtatagcccacaaatttttcggcgccgaaaactccgtcaatctgaaggatatttggatgttcagggcacggcttgttaagggagagcgaactaatctgtag

SEQ ID NO: 162831 - DNA, 1017 bp, Artificial Sequence
  derived and/or modified sequence
atggagcagctgcgggctgctgcccggctgcagatcgtgctgggccacctgggccggcccagcgctggagctgtggtggcccaccccaccagcggcaccatcagcagcgccagcttccacccccagcagttccagtacaccctggacaacaacgtgctgaccctggagcagaggaagttctatgaagaaaatggcttcctggtgatcaagaacctggtgcctgatgctgacatccagcgcttcagaaatgaatttgagaagatctgcaggaaggaggtgaagcccctgggcctgactgtgatgagagatgtgaccatcagcaagtcagaatatgcccccagcgagaagatgatcaccaaggtgcaggacttccaggaggacaaggagctgttccgctactgcaccctgcctgagatcctgaagtatgtggagtgcttcaccggccccaacatcatggccatgcacaccatgctgatcaacaagcccccagattctgggaagaagaccagccgccaccccctgcaccaggacctgcactacttccccttccggcccagcgacctgattgtgtgtgcctggacagccatggagcacatcagcagaaataatggctgcctggtggtgctgcccggcacccacaagggcagcctgaagccccatgactaccccaagtgggagggcggcgtgaacaagatgttccacggcatccaggactatgaggagaacaaggcccgggtgcacctggtgatggagaagggggacacagtgttcttccaccccctgctgatccacggcagcggccagaacaagacccagggcttcaggaaggccatcagctgccactttgccagcgctgactgccactacattgatgtgaagggcaccagccaggagaacatcgagaaggaggtggtgggcatcgcccacaagttcttcggggctgaaaattctgtgaacctgaaggacatctggatgttccgggcccggctggtgaagggggagaggaccaacctgtag

SEQ ID NO: 162832 - DNA, 1017 bp, Artificial Sequence
  derived and/or modified sequence
atggagcagctgcgggccgccgcccggctgcagatcgtgctgggccatcttggtcgcccttccgccggcgccgtagtggcccatcctacctctggaacgatctcctccgccagttttcacccacaacagttccagtacacgctggacaacaatgtcttgactcttgaacagaggaagttctatgaggagaacggattcctcgtgattaaaaacctggttccagatgcagacatccagcgcttcagaaacgagttcgaaaagatttgtcgcaaggaagttaaaccgttgggcttaactgttatgcgggatgtgactatctctaagagcgaatatgcccccagcgaaaagatgattaccaaggtgcaagattttcaagaagacaaggagctgtttcggtattgcactctgccggagatattgaagtacgtggagtgctttacgggaccgaacatcatggctatgcacacaatgctgatcaataaacctccggacagtggaaaaaagacatctagacatcctctccaccaggacctccactactttccattcagaccttctgacctgatcgtgtgtgcatggactgcaatggagcatatttccaggaacaatggctgcctggtggtccttccagggacccacaaagggagtctgaagccacacgactacccgaagtgggaagggggcgttaacaaaatgttccatggaatccaggactatgaagagaataaggctagagtgcacctcgtgatggagaagggtgacaccgttttcttccatcccttacttatccatggatctgggcaaaataagacacaaggcttccgcaaagccatctcatgccattttgctagtgccgattgccactacatcgacgtcaaaggaacaagccaggagaacattgaaaaagaggtagtcggaatcgctcataagttctttggggccgaaaactccgtgaacctcaaagatatctggatgttccgtgctagactggtcaagggtgagagaaccaacctgtag

SEQ ID NO: 162833 - DNA, 1577 bp, Artificial Sequence
  derived and/or modified sequence
gcccgctgggctaaatggggcagaggccgggaggggtgggggttccccgcgccgcagccatggagcagcttcgcgccgccgcccgtctgcagattgttctgggccacctcggccgcccctcggccggggctgtcgtagctcatcccacttcagggactatttcctctgccagtttccatcctcaacaattccagtatactctggataataacgttctaaccctggaacagagaaaattttatgaagaaaatgggtttctagtaatcaaaaatcttgtacctgatgccgatattcaacgctttcggaatgagtttgaaaaaatctgcagaaaggaggtgaaaccattaggattaacagtaatgagagatgtgaccatttcgaaatccgaatatgctccaagtgagaagatgatcacgaaggtccaggatttccaggaagataaggagctcttcagatactgcactctccccgagattctgaaatatgtggagtgcttcactggacctaatattatggccatgcacacaatgttgataaacaaacctccagattctggcaagaagacgtcccgtcaccccctgcaccaggacctgcactatttccccttcaggcccagcgatctcatcgtttgcgcctggacggcgatggagcacatcagccggaacaacggctgtctggttgtgctcccaggcacacacaagggctccctgaagccccacgattaccccaagtgggaggggggagttaacaaaatgttccacgggatccaggactacgaggaaaacaaggcccgggtgcacctggtgatggagaagggcgacactgttttcttccatcctttgctcatccacggatctggtcagaataaaacccagggattccggaaggcaatttcctgccatttcgccagtgccgattgccactacattgacgtgaagggcaccagtcaagaaaacatcgagaaggaagttgtaggaatagcacataaattctttggagctgaaaatagcgtgaacttgaaggatatttggatgtttcgagctcgacttgtgaaaggagaaagaaccaatctttgaaatagccatctgctataactctttcaacagaaaaccaaaaccaaacgaaatgtctaaggaaaatgttttcttaatgagatgatgtaaccttttctatcacttgttaaaagcagaaaacatgtatcaggtacttaattgcatagagttagttttgcagcacaatggtgttgctttaatggaaaaaaaaaacagtaaaagtgaaatattactgttttaaggaaaactaatttagggtggcagccaataaaggtggttggtgtctaatttaagtgttaaatcaatttctttcattcagttagctctttacccaagaagaagtgaatgatttggagcttagggtatgttttgtatcccctttctgataaacccattccctaccaattttatgtcataagagatttttttcccccaaatctagaacaatgtataatacattcacatctagtcaagggcataggaacggtgtcatggagtccaaataaagtggatattcctgctcgg

SEQ ID NO: 162834 - DNA, 1732 bp, Artificial Sequence
  derived and/or modified sequence
cggccgccctggggtcggggcaattgccgcgttgccctgccctccgggatccctgggggcctctgctcctctctttgtggagacgtcgtttcaccggcggcgcgtgaccccggcagctgtccagagacccagagatgtccaatcacaggcgcacggtgcacaggcgcgcagggctgcctggaaccggcccaggcaggcagtgaccgggacctctccggaggggagaggacggtgccctcccgggcaggagctggccaggcaggcgctgcccagggcggcctccctgctggactacggcattgccactgagttatataaagacactatttggggaaggacagcgggtatactctggataataacgttctaaccctggaacagagaaaattttatgaagaaaatgggtttctagtaatcaaaaatcttgtacctgatgccgatattcaacgctttcggaatgagtttgaaaaaatctgcagaaaggaggtgaaaccattaggattaacagtaatgagagatgtgaccatttcgaaatccgaatatgctccaagtgagaagatgatcacgaaggtccaggatttccaggaagataaggagctcttcagatactgcactctccccgagattctgaaatatgtggagtgcttcactggacctaatattatggccatgcacacaatgttgataaacaaacctccagattctggcaagaagacgtcccgtcaccccctgcaccaggacctgcactatttccccttcaggcccagcgatctcatcgtttgcgcctggacggcgatggagcacatcagccggaacaacggctgtctggttgtgctcccaggcacacacaagggctccctgaagccccacgattaccccaagtgggaggggggagttaacaaaatgttccacgggatccaggactacgaggaaaacaaggcccgggtgcacctggtgatggagaagggcgacactgttttcttccatcctttgctcatccacggatctggtcagaataaaacccagggattccggaaggcaatttcctgccatttcgccagtgccgattgccactacattgacgtgaagggcaccagtcaagaaaacatcgagaaggaagttgtaggaatagcacataaattctttggagctgaaaatagcgtgaacttgaaggatatttggatgtttcgagctcgacttgtgaaaggagaaagaaccaatctttgaaatagccatctgctataactctttcaacagaaaaccaaaaccaaacgaaatgtctaaggaaaatgttttcttaatgagatgatgtaaccttttctatcacttgttaaaagcagaaaacatgtatcaggtacttaattgcatagagttagttttgcagcacaatggtgttgctttaatggaaaaaaaaaacagtaaaagtgaaatattactgttttaaggaaaactaatttagggtggcagccaataaaggtggttggtgtctaatttaagtgttaaatcaatttctttcattcagttagctctttacccaagaagaagtgaatgatttggagcttagggtatgttttgtatcccctttctgataaacccattccctaccaattttatgtcataagagatttttttcccccaaatctagaacaatgtataatacattcacatctagtcaagggcataggaacggtgtcatggagtccaaataaagtggatattcctgctcggacaa

SEQ ID NO: 162835 - DNA, 1017 bp, Artificial Sequence
  derived and/or modified sequence
atggagcagctccgcgcagcagcacggctgcagatcgttcttgggcacctgggaaggccttccgctggggcagtggtggctcaccccacgagcggcacaatctcttctgcctcatttcacccacagcagtttcaatataccctggataataatgtgctgactcttgaacagcgcaagttttatgaagagaatggcttcctggtaattaaaaatctggtgccagatgcggacatccagagattccgaaacgaatttgagaaaatatgtcgtaaagaggtgaagccattagggctaactgtaatgagagacgttacaatctctaagagcgaatacgccccttcagagaaaatgattacaaaggtgcaagatttccaggaggataaggaactgttccgctactgcactctgcctgaaatacttaaatatgtggagtgctttacgggacctaatattatggcgatgcacacaatgttaattaacaaaccacccgacagcgggaagaagacaagccgacacccgttgcatcaagacctgcactacttcccgtttagaccaagcgacctcattgtctgtgcatggaccgctatggaacacatctctaggaacaatgggtgtctcgtggtgctgcctggcacacacaaaggatcacttaaaccccatgattaccccaaatgggagggcggtgtaaacaaaatgttccatggcattcaggactacgaagagaataaagccagagttcatcttgtgatggagaagggcgacacagtattttttcaccccttgctgatccacggctctggtcagaacaagacccagggttttcgtaaggctataagctgccacttcgcctccgccgattgccactatatcgatgtcaagggcacctcacaagaaaacatagagaaggaggtggttgggatcgcccacaagtttttcggagctgaaaattctgtgaacctgaaggatatctggatgtttagggctcgcctagtaaaaggcgagcgcacaaatctgtag

SEQ ID NO: 162836 - DNA, 1017 bp, Artificial Sequence
  derived and/or modified sequence
atggagcagctgagagccgccgccagactgcagatcgtgctgggccacctgggcagacccagcgccggcgccgtggtggcccaccccaccagcggcaccatcagcagcgccagcttccacccccagcagttccagtacaccctggacaacaacgtgctgaccctggagcagagaaagttctacgaggagaacggcttcctggtgatcaagaacctggtgcccgacgccgacatccagagattcagaaacgagttcgagaagatctgcagaaaggaggtgaagcccctgggcctgaccgtgatgagagacgtgaccatcagcaagagcgagtacgcccccagcgagaagatgatcaccaaggtgcaggacttccaggaggacaaggagctgttcagatactgcaccctgcccgagatcctgaagtacgtggagtgcttcaccggccccaacatcatggccatgcacaccatgctgatcaacaagccccccgacagcggcaagaagaccagcagacaccccctgcaccaggacctgcactacttccccttcagacccagcgacctgatcgtgtgcgcctggaccgccatggagcacatcagcagaaacaacggctgcctggtggtgctgcccggcacccacaagggcagcctgaagccccacgactaccccaagtgggagggcggcgtgaacaagatgttccacggcatccaggactacgaggagaacaaggccagagtgcacctggtgatggagaagggcgacaccgtgttcttccaccccctgctgatccacggcagcggccagaacaagacccagggcttcagaaaggccatcagctgccacttcgccagcgccgactgccactacatcgacgtgaagggcaccagccaggagaacatcgagaaggaggtggtgggcatcgcccacaagttcttcggcgccgagaacagcgtgaacctgaaggacatctggatgttcagagccagactggtgaagggcgagagaaccaacctgtag

SEQ ID NO: 162837 - protein, 427 aa, Artificial Sequence
  derived and/or modified sequence
MHLIDYLLLLLVGLLALSHGQLHVEHDGESCSNSSHQQILETGEGSPSLKIAPANADFAFRFYYLIASETPGKNIFFSPLSISAAYAMLSLGACSHSRSQILEGLGFNLTELSESDVHRGFQHLLHTLNLPGHGLETRVGSALFLSHNLKFLAKFLNDTMAVYEAKLFHTNFYDTVGTIQLINDHVKKETRGKIVDLVSELKKDVLMVLVNYIYFKALWEKPFISSRTTPKDFYVDENTTVRVPMMLQDQEHHWYLHDRYLPCSVLRMDYKGDATVFFILPNQGKMREIEEVLTPEMLMRWNNLLRKRNFYKKLELHLPKFSISGSYVLDQILPRLGFTDLFSKWADLSGITKQQKLEASKSFHKATLDVDEAGTEAAAATSFAIKFFSAQTNRHILRFNRPFLVVIFSTSTQSVLFLGKVVDPTKP

SEQ ID NO: 162838 - DNA, 1284 bp, Artificial Sequence
  derived and/or modified sequence
atgcatctgattgactacctgctgctgttgctcgtaggactgctggcattatcccacggacagctgcacgttgagcacgacggcgagtcttgctctaacagtagtcatcaacagatcttggagactggcgaagggagcccttccctcaagattgccccagcaaatgccgactttgctttccgattttattatctcatcgccagtgaaacacctggtaagaacatattcttctctccactttctatctcagctgcctacgcgatgctgtcccttggcgcttgttcccatagtcgatctcagatcttagaaggcctcgggtttaacctgactgagttatctgaatccgacgtgcatagagggttccagcatctactgcatacccttaatctgcctggtcatggactggagacgagagtaggttccgccttatttctgagccacaacctgaaatttctggccaaatttttgaatgataccatggctgtctacgaagccaagctcttccataccaacttctacgataccgtgggtacgatccagctcattaacgatcacgtgaagaaggaaactcgaggcaaaattgttgatcttgtgtccgaactaaaaaaggatgtccttatggtgctggtcaattacatttactttaaagccctgtgggaaaaaccattcatctcatctcgcaccacacccaaggatttctacgtggatgagaacaccacagtcagagtacccatgatgcttcaggatcaggagcaccactggtacttacacgaccggtaccttccctgttctgtgttgaggatggattacaaaggcgacgcaactgtgttttttatcttgcccaatcagggtaaaatgagagagatagaggaagtgctgacccccgagatgttaatgagatggaacaatcttttgagaaaacggaacttctataagaaactggagctccacttgcccaagttttccatcagtgggtcatatgtcctcgaccagatcctcccaagactggggttcacagatctgtttagcaagtgggcggacctgagtggaataacgaagcaacagaaactggaagccagtaaatcattccacaaagccacactcgatgtggacgaagccggcaccgaagccgcagccgccacgagcttcgccatcaaatttttttctgcccaaaccaaccgtcacatactgcggttcaacaggccctttctcgtagtgatattctctacctctactcagagtgttctgttcctcggcaaagtagtggatccaactaagccctag

SEQ ID NO: 162839 - DNA, 1284 bp, Artificial Sequence
  derived and/or modified sequence
atgcacctgattgattaccttctgctattactcgtgggcctgctagccctgtcccatggtcagctgcatgtggaacacgacggggagagctgttccaatagcagtcaccaacagatcctggaaactggggaagggagcccatctttgaagatcgcgcctgctaacgccgactttgcgtttcgattctattacctgatagctagcgagacacccggcaagaacatctttttcagtccgctctctatcagcgccgcctatgccatgctctctctgggggcttgttcccactcacgcagtcagatcttggaaggactaggatttaatttaactgagctcagcgagagcgacgtacacagaggcttccagcatctactccacacactgaacctgcctggtcatggcctggagacccgtgtcgggagtgctttgttcctttcccacaacctgaaattcctggccaagtttctcaacgatacaatggcagtctatgaggccaaattgttccacaccaatttctacgatacagtcggtacaattcaactcatcaacgaccatgtgaaaaaagaaacacgcggaaaaatcgtggacctcgtcagcgagctaaaaaaagatgtgttgatggtcctggtgaattatatatatttcaaggccttgtgggagaagccttttatttcctcacgtactactccaaaagatttctatgtcgatgaaaacacaactgtaagggttccaatgatgctgcaggaccaggaacatcactggtacctccatgacagatacttaccgtgcagcgtcctccgcatggactacaagggcgatgccacagttttctttattctgccaaaccagggcaagatgagggaaattgaggaggtcctgaccccagaaatgctgatgcgctggaataatctgctccgaaaacgcaatttttacaaaaagttggaactacatctcccaaaattttcgatcagcggtagttatgttctggaccaaattcttccacgccttggcttcacggacctgttcagcaagtgggcagaccttagcggcataaccaagcagcaaaagctcgaggcctcgaagagcttccacaaagcgacactggacgttgatgaagcgggaacggaagccgccgctgctacttcatttgctataaagttcttctcggcccaaacaaatcgacacatccttcgattcaatcgcccgttcctggtggtgattttctcaacatcaacccagagcgtgctgtttctcggtaaggtagtcgatccaacaaagccctag

SEQ ID NO: 162840 - DNA, 1284 bp, Artificial Sequence
  derived and/or modified sequence
atgcatctgattgattatctccttctgctgctcgtgggcctgcttgccttgtcccacggccagctccatgttgagcacgatggggagtcttgctctaatagttcacaccagcagattcttgagactggcgagggctctcctagtctgaaaatagcccctgccaacgcagattttgccttccgcttttactacttaattgctagtgagacccccgggaaaaatattttcttctccccactgtcaatcagtgccgcgtacgccatgctttctcttggagcctgtagccactcaaggtctcagatccttgaaggtctggggttcaacttgacggagttgtccgagtctgacgtgcaccgtggtttccagcatctgctccacactctcaatctcccgggccacggcctcgagacaagggtggggtctgccctgtttctgtcccataatcttaaattcttagcaaagttcctgaacgacacaatggcagtatatgaggcaaagctcttccacactaatttctacgacacagtcgggacaatccagcttattaacgaccacgtgaaaaaggagactcgaggaaaaatcgtggacttggtgtcagagctgaaaaaggacgtccttatggtccttgtgaattacatctactttaaagccctgtgggagaaaccatttatctcctcccgtacgacgcctaaggatttttacgtggacgaaaacaccacagtgagagtacctatgatgctacaggaccaagaacatcactggtacctccatgataggtacctcccgtgtagcgtcctgaggatggactataagggcgatgctactgtcttcttcatactgcctaatcaggggaaaatgagggagatcgaagaagttctcacacccgaaatgcttatgagatggaacaacctgttgcgaaaacgtaacttttataaaaaactggagctgcatctgcctaaattcagcatttccgggtcttacgttctcgaccaaattctcccacgacttggcttcacagacctgttcagtaagtgggcagacctttccggtataaccaagcaacagaaacttgaggcatcgaaatcctttcataaggctaccctggacgtcgatgaggccggcaccgaggctgccgccgctacttccttcgcaatcaaattcttctcagctcaaacgaacaggcacatcttaagattcaatcgaccgttcttggtcgtcattttttctacctctacacaatccgtactgttcctgggtaaagtggtggatcccacgaaaccatag

SEQ ID NO: 162841 - DNA, 1284 bp, Artificial Sequence
  derived and/or modified sequence
atgcacctgattgactacctgctgctgctgctggtgggcctgctggccctgagccacggccagctgcacgtggagcatgatggagagagctgcagcaacagcagccaccagcagatcctggagaccggggagggcagccccagcctgaagatcgccccagccaatgctgactttgccttccgcttctactacctgattgccagcgagaccccaggcaagaacatcttcttcagccccctgagcatctctgctgcctatgccatgctgagcctgggcgcctgcagccacagccgcagccagatcctggagggcctgggcttcaacctgacagagctgtctgagagtgatgtgcaccggggcttccagcacctgctgcacaccctgaacctgcccggccacggcctggagaccagggtgggcagcgccctcttcctgagccacaacctgaagttcctggccaagttcctgaatgacaccatggctgtgtatgaggccaagctgttccacaccaacttctatgacacagtgggcaccatccagctgatcaatgaccacgtgaagaaggagacccggggcaagatcgtggacctggtgtctgagctgaagaaggatgtgctgatggtgctggtgaactacatctacttcaaggccctgtgggagaagcccttcatcagcagcaggaccacccccaaggacttctacgtggatgagaacaccaccgtgcgggtgcccatgatgctgcaggaccaggagcaccactggtacctgcatgaccgctacctgccctgcagcgtgctgaggatggactacaagggagatgccaccgtcttcttcatcctgcccaaccagggcaagatgagagaaattgaggaggtgctgaccccagagatgctgatgcgctggaacaacctgctgaggaagaggaacttctacaagaagctggagctgcacctgcccaagttcagcatcagcggcagctatgtgctggaccagatcctgccccggctgggcttcacagacctcttcagcaagtgggccgacctgagcggcatcaccaagcagcagaagctggaggccagcaagagcttccacaaggccaccctggatgtggatgaagctggaacagaagctgctgctgccaccagctttgccatcaagttcttcagcgcccagaccaacagacacatcctgcgcttcaaccggcccttcctggtggtgatcttcagcaccagcacccagagcgtgctcttcctgggcaaggtggtggaccccaccaagccctag

SEQ ID NO: 162842 - DNA, 1284 bp, Artificial Sequence
  derived and/or modified sequence
atgcacctgatcgactacctgctgctgctgctggtgggcctgctggctctgagccacggccagctgcacgtcgaacatgatggcgagagttgttctaactcctcccaccagcagattctcgagaccggcgaaggatcaccgagtctgaaaatagctcccgctaatgccgacttcgcttttagattttattatttaattgcgtccgagacccccggcaagaacatcttcttctctcctttatccatatctgctgcctatgccatgctgtcactcggggcttgttctcattcacgaagccagatcctggaggggctgggattcaacctgacagagctgtcggagtccgacgtacatcgaggcttccagcatctgcttcacactctcaatctgcccggacacgggttagagaccagggtgggaagtgcactgttcctgtctcacaacctgaaattcctcgctaagttcctcaacgacactatggctgtgtacgaagctaagctgtttcacacaaatttttatgatacagtaggcacgatacagttgatcaacgaccacgtgaagaaggaaacacgcggcaagatcgttgacctcgttagtgaactgaagaaggacgtgctgatggtactggtcaattacatatactttaaggcactgtgggaaaagccttttatcagctcacggacaacccccaaagacttttacgttgatgagaacacgacagttagggttccgatgatgttgcaggaccaggagcatcactggtaccttcacgaccggtatctgccatgttccgtgctgcgcatggactataaaggcgatgcgacagtgttctttatcctgcccaatcagggtaagatgcgcgaaatcgaagaagtgctcacacctgagatgctaatgcgttggaataatctcctgaggaagcgaaacttctacaaaaagctagagttacacctgcctaagttcagtatttccgggagctacgtactcgaccagatcttaccaaggctgggcttcactgacctcttcagtaagtgggcggacctgagtggcatcacaaagcaacaaaaactcgaagcatcgaaaagtttccacaaagcaacactcgatgtggacgaagccgggaccgaggccgccgccgctacctctttcgccatcaagttcttttcagcgcagactaacaggcacatcttgaggtttaaccggccttttttggtcgtgatttttagcaccagtacccagagtgtgcttttcctgggcaaggttgtggaccccacaaaaccttag

SEQ ID NO: 162843 - DNA, 1284 bp, Artificial Sequence
  derived and/or modified sequence
atgcacctgatcgactacctgctgctgctgctggtgggcctgctggctcttagccacggacagctccacgtcgagcacgacggagaatcttgttctaattcctctcaccaacagatacttgagacaggagaaggatctccaagcctgaagatcgcacccgctaacgccgatttcgcctttcggttttattacctgatcgccagtgagacaccaggaaagaacatatttttcagtcccctgagcatcagcgccgcctatgccatgctgagtctgggcgcgtgtagccactcacggtcacagatacttgaggggctggggttcaacctcaccgagctgagcgaatcagatgtccaccgcggatttcagcacctgctacatacattaaacttgcccggtcacgggctagaaaccagggtcggatccgcattgtttttgtcacataacctcaaatttcttgccaagttcctcaacgacacaatggcagtatatgaggccaagctgttccacactaacttctacgatacagttggtacaatccagttaattaatgaccatgttaaaaaagaaacaaggggcaaaatcgtggatttggtgagtgagcttaaaaaggacgtcctgatggtactcgtgaactatatttactttaaagcactgtgggaaaagcctttcatctcttcccggactacccccaaggatttctatgtggatgagaataccactgtccgggtgccaatgatgttacaggaccaggaacaccactggtacctccacgacaggtacctgccatgcagtgtcctgagaatggactacaaaggtgatgccacagtgttttttatcctgcccaaccaggggaagatgagagaaatcgaagaagttttaacgccggagatgttgatgcggtggaacaacttattgcggaaaaggaacttttacaaaaagcttgagctacatctgcctaagttttccatctccggaagctacgtgctggaccagatcttgcctaggcttggttttactgatctctttagtaaatgggctgacctttcaggaattacaaaacagcagaagctggaggccagcaaatccttccacaaggctacgttggacgtggacgaagcgggtaccgaagcggctgctgcaacttcgtttgcaattaagtttttttccgcacagaccaataggcacattttacgcttcaataggcccttcttagttgtcattttctccaccagcacgcagagcgtcctttttctgggaaaagtggtcgacccaaccaaaccctag

SEQ ID NO: 162844 - DNA, 1284 bp, Artificial Sequence
  derived and/or modified sequence
atgcacctgatcgactacctgctgctgctgctggtgggcctgctggccctcagccatggccagttgcacgttgagcatgacggggagtcttgcagtaacagcagccaccagcagattctggagaccggcgagggctcccccagcctaaagatagcccctgctaatgcagatttcgcctttcgcttctactacctgattgcgtccgaaacgccgggaaagaacattttctttagccccctctcaatatctgccgcctacgctatgctaagcttgggtgcttgcagccattctagatctcagatcctcgaaggcctgggctttaatctgacagagttatccgaatctgatgttcaccgcgggttccaacatttattgcatacgcttaatctgcccggccacggactggaaacgagagtgggctccgcccttttcctctcacacaatctgaagtttctggccaaatttctaaacgacaccatggctgtctatgaagcaaagctcttccatactaatttttatgatacggtaggcactatccagctgattaatgatcacgttaagaaggagacgcggggtaagatagtagacttggtgtctgaactgaaaaaagacgtcctgatggtgctggtaaactacatttactttaaggccttgtgggagaagccttttatctccagtcggacaacacctaaagacttctatgtcgatgaaaacactacagtgagagtccctatgatgctgcaagaccaagaacatcactggtacctgcatgaccgatacttaccttgttccgtgttgcggatggactataaaggagacgctacggtgttcttcatcttgcccaatcagggaaagatgcgggagatcgaggaggtcctgacccccgaaatgctgatgaggtggaacaacttgctgcgaaagagaaatttctacaaaaaactggagcttcaccttcctaagttttctatcagcggcagttatgtgctggatcaaatccttcctagactggggttcacagatctatttagcaaatgggcggatttatccggcataacaaaacagcagaagctggaggcgtccaaaagtttccacaaggccacccttgatgtggacgaggccggaaccgaagctgccgccgccacttcgttcgcaatcaagttcttctcggcccagactaaccgacacattctcaggttcaaccgaccattcttagtggtgatcttcagtacaagtacccagagtgtcctgttcctcggtaaagtcgttgatccaaccaaaccctag

SEQ ID NO: 162845 - DNA, 1284 bp, Artificial Sequence
  derived and/or modified sequence
atgcacctcatcgattatctcttgctgctgcttgtgggtcttctggccctttctcacggacagctccacgtcgagcacgatggggagagttgtagtaacagtagccaccagcaaatcctggaaaccggtgagggttcaccttcattgaagattgcccctgcaaacgccgatttcgctttccggttctattacttaatcgcttcagaaactccgggaaagaacatttttttttccccattgtcaatcagtgcagcctacgcgatgctgagtctgggggcatgcagccattctcggtcacagattcttgaggggttaggattcaacctcaccgagctgagtgaatccgatgttcacaggggatttcagcatctgcttcacaccctgaatttacctgggcacggcctggaaacgagagtcggatccgcacttttcctgagccacaacctcaagtttttagccaagttcctgaacgacaccatggccgtgtatgaggcgaagctgttccacacaaatttttacgatacggtggggaccatacaactgatcaatgaccacgtgaagaaagagaccagaggtaaaatcgtcgacctggtcagtgagctcaaaaaggacgtgttaatggtgctggttaattacatttatttcaaagcgctttgggagaagcctttcatcagctcgcggaccacacccaaggacttttacgtggatgaaaacacaaccgtgagagttcccatgatgcttcaagaccaggagcatcattggtatctgcacgaccggtacttgccctgtagcgtacttcgaatggactacaaaggggacgccacagtgttctttatactgcctaatcagggtaaaatgcgagagatcgaagaagtactaactcccgagatgctcatgagatggaataaccttttgagaaagaggaatttctacaagaaattggagcttcacctcccaaaattcagcatctcaggtagctacgtgctggaccagatccttccaaggctggggtttactgatctgttctcaaaatgggcagatctcagcggtattacgaaacagcagaagctcgaagcttctaagtcatttcacaaagccactcttgacgtggatgaggccggaaccgaggcggctgcggctacttcctttgctatcaagtttttttccgcccagaccaataggcatattctgcgcttcaatagaccgttcctagtggtaattttctctactagtacccaatccgtcttattcttggggaaggttgtggatcccaccaagccatag

SEQ ID NO: 162846 - DNA, 1284 bp, Artificial Sequence
  derived and/or modified sequence
atgcacctcatcgactatcttctactgctgctggtggggctgctcgccctgtctcatggccaactgcacgtggagcacgatggcgagagttgtagtaatagctcccatcagcaaattcttgagactggcgaaggaagcccaagtctcaaaatagctcctgccaatgctgacttcgctttccggttttactatttaatcgcctccgagaccccgggtaagaatattttcttctcccctctgtctattagtgcagcctacgctatgctttccctgggtgcatgcagtcactctaggtcgcaaatcttagaaggcctaggatttaacctgacagagctcagcgagtcagatgttcacagaggctttcagcacctcttacacaccctgaacttgccaggccatgggcttgaaacccgtgtaggcagcgccctgtttctgagccacaatctcaagtttctggcaaagtttctgaatgatactatggcagtgtacgaagcaaagctgttccacaccaacttctatgacactgtgggaactatccaactgatcaacgaccacgtgaagaaagagacacggggaaaaattgtggacctggtgtccgaactcaaaaaagacgtattaatggtactcgtgaattatatctactttaaggcgttgtgggaaaagccattcatctcctctagaacgacccccaaggatttctatgtggacgaaaatacgacggtgagggtgcccatgatgctgcaggatcaggaacaccactggtacttacacgataggtacctcccatgttccgtcctccgaatggattataagggtgatgctaccgtcttctttatcctccctaatcagggcaaaatgcgggaaatagaggaggttctaacaccagaaatgctaatgcgatggaacaacttgctacgcaaaaggaacttttacaaaaaactagagctccacctgcctaagttctctatctccggatcgtacgtgcttgatcaaatcctgccacgcctgggcttcacagatttgttcagcaagtgggctgatctgtccggtataacaaagcagcagaaattggaggcaagcaagtcattccacaaggccaccctagacgtcgacgaggcaggaacagaggctgccgctgccacgtctttcgccataaagtttttctctgcccagaccaatcgacatatcttgcgcttcaaccggccatttttggtggtgatcttctccacttccactcagagtgtcttgttcctggggaaggtggtggacccaacaaaaccgtag

SEQ ID NO: 162847 - DNA, 1284 bp, Artificial Sequence
  derived and/or modified sequence
atgcatctgattgattacctgctcctgttgttggtgggcctgctagctttgagccatggacagttacacgttgagcacgacggagaaagctgcagcaatagttcccaccagcagatactagagaccggcgaaggctctcccagcctcaagatcgctcctgcaaacgctgatttcgctttccgcttctactacttgatcgcaagtgagacaccgggaaaaaacatcttcttttccccattaagtatttccgctgcctatgcaatgctttctttaggcgcatgctctcactcccgctctcaaatcctggaggggctaggcttcaacctgacagagctgagcgaaagcgacgttcatcgtggctttcagcatctgctgcacacccttaacttacccggacatggcctagagactagggtcggatctgcactctttctcagtcacaatctgaagtttcttgccaaatttttgaacgacactatggccgtgtacgaggcgaaactcttccacactaatttttatgacacagttggcaccattcaactgattaatgaccatgtgaagaaagaaacccgtggaaagattgttgatttggtctcagaactgaaaaaggacgtcctaatggtattggtgaattatatttactttaaagcactatgggaaaagccttttatttccagcaggacaactccaaaagatttttatgttgatgaaaatactacagttagagtaccaatgatgttgcaggaccaggagcatcattggtacctgcatgatcgttacctgccatgttctgtcttacgtatggactataagggagatgcgacagtgttctttatattgccaaatcagggtaagatgcgcgaaatcgaggaggtgctgactcccgaaatgctcatgcgttggaacaacctgcttaggaaaagaaacttttacaaaaagcttgaacttcacttgcccaagtttagcatatctggcagttacgtcctggaccagattctgcctaggttaggcttcactgatctgttttctaaatgggccgacctctccggcattacaaaacagcaaaaattggaggccagcaaatcgttccataaagccacgttggatgttgatgaagcaggaaccgaagctgccgcagccacttctttcgctattaagtttttcagtgcacagaccaataggcatatccttagatttaacaggccgttcttagttgtaatcttcagcacttctacacaaagtgtgctctttctgggtaaggtggtcgaccctacaaagccatag

SEQ ID NO: 162848 - DNA, 1284 bp, Artificial Sequence
  derived and/or modified sequence
atgcacctgatcgactacctgctgctgctgctggtgggcctgctggccctgagccacggccagctgcacgtggagcacgacggcgagagctgcagcaacagcagccaccagcagatcctggagaccggcgagggcagccccagcctgaagatcgcccccgccaacgccgacttcgccttcagattctactacctgatcgccagcgagacccccggcaagaacatcttcttcagccccctgagcatcagcgccgcctacgccatgctgagcctgggcgcctgcagccacagcagaagccagatcctggagggcctgggcttcaacctgaccgagctgagcgagagcgacgtgcacagaggcttccagcacctgctgcacaccctgaacctgcccggccacggcctggagaccagagtgggcagcgccctgttcctgagccacaacctgaagttcctggccaagttcctgaacgacaccatggccgtgtacgaggccaagctgttccacaccaacttctacgacaccgtgggcaccatccagctgatcaacgaccacgtgaagaaggagaccagaggcaagatcgtggacctggtgagcgagctgaagaaggacgtgctgatggtgctggtgaactacatctacttcaaggccctgtgggagaagcccttcatcagcagcagaaccacccccaaggacttctacgtggacgagaacaccaccgtgagagtgcccatgatgctgcaggaccaggagcaccactggtacctgcacgacagatacctgccctgcagcgtgctgagaatggactacaagggcgacgccaccgtgttcttcatcctgcccaaccagggcaagatgagagagatcgaggaggtgctgacccccgagatgctgatgagatggaacaacctgctgagaaagagaaacttctacaagaagctggagctgcacctgcccaagttcagcatcagcggcagctacgtgctggaccagatcctgcccagactgggcttcaccgacctgttcagcaagtgggccgacctgagcggcatcaccaagcagcagaagctggaggccagcaagagcttccacaaggccaccctggacgtggacgaggccggcaccgaggccgccgccgccaccagcttcgccatcaagttcttcagcgcccagaccaacagacacatcctgagattcaacagacccttcctggtggtgatcttcagcaccagcacccagagcgtgctgttcctgggcaaggtggtggaccccaccaagccctag

SEQ ID NO: 162849 - DNA, 1197 bp, Artificial Sequence
  derived and/or modified sequence
atgaactggcacttgcctctttttctgctcgcttccgtgactctgcctagtatttgctcacattttaacccactgagcctggaggaactcggatctaacaccggcatccaggtgttcaaccagatagtcaaaagtaggccacatgacaatatcgtcattagccctcatggcattgctagtgtgttgggaatgttgcagctgggggctgacggaagaaccaaaaagcaactcgccatggttatgcgctatggcgtgaatggtgttggtaaaattcttaaaaaaattaacaaagcaattgtgtccaagaaaaataaggacattgttactgttgctaatgctgtctttgtaaaaaacgcgtctgagatcgaagtgcccttcgttaccaggaacaaagatgtctttcagtgtgaggtgcggaacgtgaattttgaggatcccgcgtctgcctgtgacagtatcaacgcatgggtgaagaatgaaacgcgggacatgattgataatcttttgtctcctgacctcatcgacggtgtgttaacacggctggttctggtgaacgcagtctactttaaggggctatggaaaagcaggtttcagcccgagaataccaagaagagaacgtttgtggccgcagacggaaagtcatatcaggtcccaatgctggcccagctaagcgtgttcaggtgcgggtcaacatctgcccccaacgatctgtggtataactttatagaacttccatatcacggcgagagcatcagcatgctgatcgcgctgcctacagaaagtagcacccccctctcggctattatcccacacattagtacgaaaactatcgattcttggatgtctataatggttccaaagagagtgcaggtcatcctcccgaaattcacagctgtggctcaaaccgacctcaaggagccactgaaggttctgggcattactgatatgttcgattcttcaaaggccaattttgccaagatcacaaccggatctgaaaaccttcacgtgagtcacattctccagaaagccaagatcgaggtatctgaggacgggactaaagcctctgcagccacgactgctattctgatcgcccggagctcaccgccttggttcatcgtcgataggcctttcctgttctttatccgccataatccgaccggcgcagtgctctttatgggacagattaataagccctag

SEQ ID NO: 162850 - DNA, 1197 bp, Artificial Sequence
  derived and/or modified sequence
atgaactggcacctgcccctcttcctgctggcctctgtgaccctgcccagcatctgcagccacttcaaccccctgagcctggaggagctgggcagcaacacaggcatccaggtgttcaaccagatcgtgaagagccggccccatgacaacatcgtcatcagcccccacggcatcgcctctgtgctgggcatgctgcagctgggcgcagatggccgcaccaagaagcagctggccatggtgatgagatatggagtgaatggagtgggcaagatcctgaagaagatcaacaaggccatcgtgtccaagaagaacaaggacatcgtgacagtggccaatgctgtgtttgtgaagaatgccagcgagattgaggtgccctttgtgaccaggaacaaggatgtgttccagtgtgaggtgagaaatgtgaactttgaggaccctgccagcgcctgtgacagcatcaatgcctgggtgaagaatgagacccgggacatgattgacaacctgctgagcccagacctgattgatggagtgctgacccggctggtgctggtgaatgctgtgtacttcaagggcctgtggaagagccgcttccagcctgagaacaccaagaagaggacctttgtggccgcagatggcaagagctaccaggtgcccatgctggcccagctgagcgtcttccgctgtggcagcaccagcgccccaaatgacctgtggtacaacttcatcgagctgccctaccatggagagagcatctccatgctgattgccctgcccacagagagcagcacccccctgagcgccatcatcccccacatcagcaccaagaccatcgacagctggatgagcatcatggtgcccaagagggtgcaggtgatcctgcccaagttcaccgctgtggcccagacagacctgaaggagcccctgaaggtgctgggcatcacagacatgtttgacagcagcaaggccaactttgccaagatcaccactggaagtgagaacctgcacgtgagccacatcctgcagaaggccaagattgaggtgtctgaagatggcaccaaggccagcgctgccaccacagccatcctgattgcccggagcagccccccctggttcatcgtggaccggcccttcctgttcttcatccgccacaaccccaccggggctgtgctcttcatgggccagatcaacaagccctag

SEQ ID NO: 162851 - DNA, 1197 bp, Artificial Sequence
  derived and/or modified sequence
atgaactggcacctgcccctgttcctgctggccagcgtgaccctgcccagtatctgttctcattttaatcccttgtctttagaggagcttggctctaacactggaattcaggtatttaaccagatcgttaaaagcagaccccatgacaatatagtgatatcgcctcacggcatcgcctcagtgttgggcatgctgcagctgggggcagatggccggactaagaaacagctggccatggttatgcgctatggtgttaacggcgtgggcaaaatactgaagaaaattaacaaggcaattgtgtctaagaagaataaggacattgtgaccgtggcaaacgccgtattcgtgaagaacgcaagcgagatcgaggtgccttttgttacgagaaacaaggatgtgtttcagtgcgaggtgagaaatgtcaattttgaggacccggccagcgcctgcgactccattaatgcctgggtcaaaaacgaaacgcgtgatatgatcgacaaccttctgtcccccgacctgatagatggggtgctaactagactggtgttagtgaacgccgtttactttaaagggttatggaaatcacgattccaacctgaaaacacaaaaaaacggaccttcgtcgcagcggatggaaaatcataccaggtacctatgctcgcccagctgtccgtattcaggtgcggatctacttctgcacctaacgatttgtggtacaattttatcgaactgccctatcacggcgagtccatttcgatgcttatagcactgcccacggaatcctcaacaccgctgagtgcaataattcctcatatatcaaccaaaaccatcgactcttggatgtcaatcatggtgccaaagagagtccaggtcattcttcccaaattcacggcggtagctcaaacagatttgaaagagcctctgaaggtgctcggaattactgacatgttcgacagcagcaaagcaaatttcgccaagattaccacaggatccgaaaatctacatgtgtcacatattctgcagaaggccaagatagaagtcagtgaagatggcacaaaggccagcgccgcaactacggctattctgatcgccagaagtagccctccctggtttatcgtggacaggcctttcttatttttcatccgtcacaatcccacgggggccgtactcttcatgggacaaataaacaaaccttag

SEQ ID NO: 162852 - DNA, 1197 bp, Artificial Sequence
  derived and/or modified sequence
atgaactggcacctccctctgttcttactggcttctgtgacactgccttccatttgtagccactttaacccactgagcctcgaagaactgggttctaatacaggaattcaagtgtttaaccagatcgtgaaatcacgacctcacgacaacatcgtcatttcacctcacggcattgccagcgtactcgggatgctgcaactgggcgctgatggacgcacgaagaagcagctcgcgatggtgatgcggtatggggtcaatggcgtaggcaagatactcaagaaaatcaacaaggcaattgtcagcaagaagaataaagatatagttaccgtggctaacgctgtttttgttaagaacgctagtgagatcgaggtccctttcgtcacccgtaacaaagatgtgtttcagtgcgaagtgcgcaacgtgaattttgaggaccctgcctccgcatgcgactctatcaatgcctgggtaaaaaatgaaacgcgagacatgatcgataacttattgtctccggacctaatcgacggagtcttaactaggctagtattagtgaatgctgtgtattttaaaggcctgtggaagagtcgttttcagcccgagaatacaaagaaaagaacctttgtggccgctgacggcaagagctatcaggtgcccatgcttgcccaactgagcgtgtttcgctgcgggtccaccagtgcccctaacgatctctggtacaacttcatcgagcttccttaccacggtgagtcaattagtatgctaatcgccctgcccacagagtctagtactccattgtccgcaatcatacctcatatctcaactaaaacaatagattcctggatgtcaatcatggtccccaagcgcgtgcaagttatactgccaaaattcaccgctgttgcgcagacagacctgaaggagccccttaaggtcctaggaataaccgatatgttcgatagtagcaaggccaatttcgcgaagatcactacgggctccgaaaacttacacgtatctcacatcctgcagaaggccaagattgaagtgagcgaagacggaaccaaagctagcgcagctaccactgcgattctcatcgcgcgaagttccccaccctggttcattgtcgatcgtccattcctcttcttcattcgacataaccctactggcgctgtgttgtttatgggccaaataaataagccctag

SEQ ID NO: 162853 - DNA, 1197 bp, Artificial Sequence
  derived and/or modified sequence
atgaattggcacctaccgctcttcctgctggcctccgtgactctacccagcatatgctcacactttaatcctctcagcttggaagaactgggatccaacacagggatacaagtttttaaccaaattgtaaagtcccgccctcacgataacattgttatcagtccccatggaatcgcctcagttttaggtatgttacaactcggagccgacgggagaaccaagaagcagctggctatggtcatgaggtatggtgttaacggagtgggaaagattctgaagaagattaacaaagcgattgtttccaagaaaaacaaggacatcgtgaccgttgccaatgctgttttcgtaaagaacgcaagcgaaattgaggttccatttgtcaccagaaataaagacgtctttcaatgcgaggtacggaacgtgaattttgaagatcccgcctcagcctgtgacagcatcaacgcttgggtgaagaatgaaaccagggatatgattgacaaccttctgagtccagatttgattgacggggtgctcactcgcctggtccttgtgaatgctgtgtactttaagggactctggaagagtagatttcagcccgaaaacacaaagaaacgcacattcgtcgccgctgacggtaaatcgtatcaggtgcctatgctggcccagctgagcgtttttcgctgcggcagcactagcgccccaaacgacctttggtataacttcatagagctgccttaccatggggagagtatcagcatgttaattgcattgcctacagaaagctcgaccccactgtccgccattattccccatatttccacaaaaaccattgattcatggatgtccatcatggttccgaagagagtccaggtcattcttccaaagttcaccgcagtggctcagaccgatctcaaagaacccctgaaggtgcttggaattaccgacatgtttgacagtagcaaagcgaatttcgcaaaaatcaccactggatcagagaatctccacgtgtcccatattctccaaaaggctaagattgaagtgagcgaagatggcaccaaggcttccgctgccaccaccgccatcctgatcgcaagatcgtcccccccttggtttatcgtggaccgtccttttctgttttttattagacataaccctacaggagccgtcttgtttatggggcagatcaacaaaccctag

SEQ ID NO: 162854 - DNA, 1197 bp, Artificial Sequence
  derived and/or modified sequence
atgaactggcatctccccctatttttattggcatccgtgacacttccgtccatatgttcccactttaatcctctcagccttgaggaattaggctctaataccggaattcaggtgttcaatcagattgtcaagtcacggcctcatgacaacatagtgatctcacctcacggtatcgccagcgtgcttggaatgctacagttgggcgctgatgggagaactaaaaagcagttggccatggttatgcggtatggtgtgaacggggtaggcaaaattctaaaaaaaatcaacaaggcaatagtgagcaagaaaaataaagatattgtcaccgtggccaacgctgttttcgtcaaaaacgcatccgagattgaagtgccattcgttacgaggaataaagacgtttttcagtgcgaagtacgaaacgtgaacttcgaagaccccgcctccgcctgtgattctatcaacgcctgggtgaaaaacgagactagggatatgattgataacctactgtcaccggatttaatcgacggggtgctgaccagactcgtattagtgaatgctgtttatttcaaaggactgtggaaatctcggttccaacctgaaaacacaaagaaacgcacctttgtggcagcagacggcaaatcgtatcaagtgccaatgctcgcacagctctctgtgttccgctgtgggagtacatccgcaccaaacgacttatggtacaacttcatcgaactgccataccacggagaaagcatctctatgctgatcgcccttcccaccgagtcttccacccccctttccgccatcatccctcacatctctaccaaaacaattgactcttggatgagtatcatggtgcccaaacgagttcaagtcatacttccaaagtttacagcagtcgcccaaaccgatttaaaagagccactgaaagtgcttggaatcacagatatgtttgatagcagtaaagcaaattttgccaagattactacaggctcagaaaatctacatgtctctcatatccttcagaaggccaaaattgaagtatctgaggatggtaccaaggcatccgctgctacgaccgccattttgatagctcgctccagccctccttggttcattgttgatcgcccgtttctgttctttattcgtcacaatccaacgggagccgttttgtttatggggcagatcaataagccgtag

SEQ ID NO: 162855 - DNA, 1197 bp, Artificial Sequence
  derived and/or modified sequence
atgaactggcacctgcccctgttcctgctggccagcgtgaccctgcccagcatctgcagccacttcaaccccctgagcctggaggagctgggcagcaacaccggcatccaggtgttcaaccagatcgtgaagagcagaccccacgacaacatcgtgatcagcccccacggcatcgccagcgtgctgggcatgctgcagctgggcgccgacggcagaaccaagaagcagctggccatggtgatgagatacggcgtgaacggcgtgggcaagatcctgaagaagatcaacaaggccatcgtgagcaagaagaacaaggacatcgtgaccgtggccaacgccgtgttcgtgaagaacgccagcgagatcgaggtgcccttcgtgaccagaaacaaggacgtgttccagtgcgaggtgagaaacgtgaacttcgaggaccccgccagcgcctgcgacagcatcaacgcctgggtgaagaacgagaccagagacatgatcgacaacctgctgagccccgacctgatcgacggcgtgctgaccagactggtgctggtgaacgccgtgtacttcaagggcctgtggaagagcagattccagcccgagaacaccaagaagagaaccttcgtggccgccgacggcaagagctaccaggtgcccatgctggcccagctgagcgtgttcagatgcggcagcaccagcgcccccaacgacctgtggtacaacttcatcgagctgccctaccacggcgagagcatcagcatgctgatcgccctgcccaccgagagcagcacccccctgagcgccatcatcccccacatcagcaccaagaccatcgacagctggatgagcatcatggtgcccaagagagtgcaggtgatcctgcccaagttcaccgccgtggcccagaccgacctgaaggagcccctgaaggtgctgggcatcaccgacatgttcgacagcagcaaggccaacttcgccaagatcaccaccggcagcgagaacctgcacgtgagccacatcctgcagaaggccaagatcgaggtgagcgaggacggcaccaaggccagcgccgccaccaccgccatcctgatcgccagaagcagccccccctggttcatcgtggacagacccttcctgttcttcatcagacacaaccccaccggcgccgtgctgttcatgggccagatcaacaagccctag

SEQ ID NO: 162856 - DNA, 1218 bp, Artificial Sequence
  derived and/or modified sequence
atggacactatatttctctggtccttgttattacttttcttcgggtcacaggcctctagatgttccgcccagaagaacacagagttcgcggtggatctctatcaagaggtaagtttgagtcacaaagataacatcatcttctccccactaggcatcacacttgtgctggagatggtgcagctcggggcaaaaggaaaagcacaacagcaaatccgacagactcttaaacagcaggagactagcgcaggtgaggagtttttcgtcctcaagtccttcttttccgctatatctgaaaaaaagcaagagtttaccttcaacctggctaatgcactctatctgcaagaaggattcactgtcaaagaacagtatttacacgggaacaaggagtttttccagtccgctattaagctggttgactttcaagatgcaaaggcctgcgccgagatgatctctacctgggtcgaaagaaagacagatggcaaaattaaggatatgttctcgggagaagagtttggtccacttacgagactagttctcgtcaacgccatttacttcaagggggactggaaacaaaagttccgaaaggaagacacgcaacttatcaattttactaagaaaaatgggagcaccgttaaaattccaatgatgaaagcccttttacgaaccaaatatgggtacttcagcgaaagcagcctcaactaccaggtactcgagctttcatataagggagacgagttctcacttataatcattcttccagccgaggggatggatattgaggaagtcgagaaactcatcaccgcgcagcaaatactcaaatggctttccgaaatgcaagaggaagaggtcgagatatcactccctaggtttaaagttgagcagaaagtggacttcaaagatgtgctgtattcactcaatatcacagagatcttttcagggggttgtgatctgagtggtattacagactcctctgaagtatatgtgtctcaggtgactcagaaggtcttctttgaaataaatgaagacggctccgaagccgctacatccacagggattcacatccctgtcatcatgagcttagcccagtctcagtttatcgctaaccatcccttcttgttcattatgaagcataatccaacagagagcatcctcttcatggggagggtgacaaaccccgatacacaggagatcaagggcagggatttagactccttgtag

SEQ ID NO: 162857 - DNA, 1218 bp, Artificial Sequence
  derived and/or modified sequence
atggacacaatatttctgtggtctttgctgctacttttcttcgggtctcaggcttcaagatgttctgcccagaaaaacaccgaatttgccgtggacctgtatcaggaagtgagcctttcacataaggacaatatcatcttctcacctcttggaattacgctggtcctggagatggtccagctcggcgctaaaggtaaggctcaacagcagatcaggcagaccttaaagcagcaagagacctcagctggtgaggagttcttcgtgctgaagagcttttttagcgcaatctccgagaagaagcaggaatttacgttcaatctggccaatgctctgtacctccaggagggatttacagttaaggaacagtatctgcacgggaataaagaattcttccagtcagctatcaaactcgtggactttcaggacgccaaggcttgcgcagagatgataagcacatgggtcgagcgcaagaccgacgggaaaatcaaagatatgttctctggcgaagagtttgggcctcttaccagactcgtcctggttaatgcaatttacttcaaaggagactggaaacaaaagtttagaaaagaggacacccagctcataaattttacaaaaaaaaatggcagcaccgtcaagatccctatgatgaaggccctcttacgaacaaagtacgggtatttctctgaatcgtctttgaactaccaggtcctggagcttagctacaagggagacgaattctctctgattatcatccttcccgcagagggaatggatatcgaggaggtggagaagctgataaccgcacaacagattctgaagtggctgtccgaaatgcaggaagaagaagtggagatttctctgcccagattcaaagtggagcagaaggttgacttcaaagatgtgctgtacagtttaaatattaccgagattttcagcggcggatgcgaccttagtgggatcaccgattcctccgaagtgtacgtcagtcaagtgacccagaaggtgttttttgagattaacgaagacggatcagaagcggcaactagtacaggcatccatatacccgtcatcatgagcctggcccaatctcaatttattgcgaaccacccatttctgtttatcatgaagcacaacccaactgagtccatcctgttcatgggaagggtaaccaatcccgatacgcaggaaattaaagggagagacctagattctctctag

SEQ ID NO: 162858 - DNA, 621 bp, Artificial Sequence
  derived and/or modified sequence
atggacacgatcttcctctggagcctgctgcttctgttctttggttctcaggcatctcgttgctcagcccagaaaaatactgagtttgcggttgacctctaccaggaggtgagtctttcccataaggacaacatcatcttttctccactgggtattactctggtgttagaaatggtgcaacttggcgcaaagggaaaagctcagcagcaaatccgacagacgttgaaacagcaggagacatctgccggagaggaattcttcgtactcaaatcatttttcagcgctatcagcgagaagaaacaagagttcacttttaacctggctaatgcgctgtaccttcaggaagggtttaccgtgaaagagcagtaccttcacggcaacaaggagttcttccagtcagcgattaagctcgttgatttccaggatgccaaagcctgcgccgagatgatctcaacgtgggtcgagaggaaaaccgacggtaaaattaaggacatgttttccggagaggagttcgggcctctgacccgactggtgttagtgaacgccatttactttaagggtgactggaaacagaaattccgaaaggaggacacccagctcattaacttcacaaagaagtag

SEQ ID NO: 162859 - DNA, 1218 bp, Artificial Sequence
  derived and/or modified sequence
atggacactatcttcttgtggagcctgctgttactgttttttggttctcaagcctcccgctgctcagctcaaaagaacactgaatttgccgtggatctttatcaggaggtgtcactgtcccacaaagacaatataatcttctccccgcttggaataacgttggtccttgagatggtgcagctgggcgcaaaaggaaaagctcagcagcagattcgccagacactgaagcaacaagagacctcagccggtgaagagtttttcgtgctgaagtcttttttctctgcaatctcagaaaaaaagcaggagtttacattcaatctggccaatgctctgtacctgcaggagggcttcaccgtcaaagagcaatatttgcacggcaataaggagttctttcagtctgcaattaagctcgtggacttccaagatgccaaggcttgtgccgagatgataagcacttgggtcgaacgaaagactgacggtaaaattaaagacatgtttagtggtgaagaatttggacccctcacccgcctggtgcttgtgaatgcaatttactttaagggagactggaagcagaagttccgcaaagaagatactcaactaatcaactttactaaaaaaaatggctcaacagtgaagattcccatgatgaaagccctgcttcgcacgaaatacggttacttcagcgagtcaagcttgaactaccaggttctggagctgtcatacaaaggcgacgaattttcgcttattatcattctccctgcagagggaatggacattgaagaggtcgaaaagttgattacggcccagcagatcctgaaatggctgtctgagatgcaggaggaggaggtggagatctctctgcctaggttcaaggtcgaacaaaaggtggactttaaagacgtgttatatagtctgaacatcaccgagattttttccggaggttgtgacctctcaggcatcacagacagttccgaggtgtatgttagtcaagtgacccagaaggtgtttttcgaaatcaacgaggacgggagtgaggctgctaccagcacaggtattcatatccccgtgataatgagcctggctcagtcacagttcatcgcaaatcacccattcctgttcatcatgaaacataaccccaccgagtcgattctgttcatgggacgagtgactaacccggatacacaggagataaagggccgagacttggattccctctag

SEQ ID NO: 162860 - DNA, 1218 bp, Artificial Sequence
  derived and/or modified sequence
atggatactatcttcctgtggagtctcctgctcctgttcttcggttctcaggcctctcgctgctccgcacagaaaaatacggaatttgcagtagatttgtaccaggaggtaagcctcagccacaaggataacataatctttagccctttaggaattactctggttctggaaatggtacagttgggtgctaagggaaaagcacagcaacagatccggcagactcttaagcagcaggagacttccgccggagaagagtttttcgtacttaagtctttcttttcagctatatctgagaagaaacaggaatttacattcaacttagccaacgcattgtacttgcaggagggcttcactgtgaaggaacagtacttacacgggaacaaggaattctttcaaagcgccataaaactggtggactttcaagatgcgaaagcttgcgcagagatgatctccacttgggtagaaagaaagacagatgggaaaatcaaagatatgttttcaggcgaagagttcgggcctctgacaaggctggtactggttaacgctatatacttcaaaggtgactggaagcagaagttcaggaaagaagacacccagttgataaactttacaaagaaaaatggatctaccgtgaagattcctatgatgaaggcgttgcttagaaccaagtacggatacttctccgagtctagcttgaattatcaggttctggagctctcttataagggggacgagttctccctgataattatactcccggcagaggggatggacattgaggaggttgagaagctcatcaccgcccagcagatcttaaagtggctctcagaaatgcaggaggaggaggtagagatatcactccccaggttcaaggtggaacagaaagttgacttcaaggatgtgctgtactctctcaacatcaccgagattttttctggtggctgcgacctatccgggataacagactcctccgaggtctacgtctcacaggtcacccaaaaggtcttctttgaaattaatgaggacggcagcgaggccgctacaagcaccgggatccacatacctgtgattatgagtctagcccaatcacagttcatcgctaatcatcccttccttttcatcatgaaacataacccaaccgagtctattctgtttatgggaagagttacgaaccctgatacccaggaaataaagggtcgggacctggattccctgtag

SEQ ID NO: 162861 - DNA, 1218 bp, Artificial Sequence
  derived and/or modified sequence
atggacaccatcttcctttggtcattgctcctcctgttttttggttcccaggcaagccgctgctcagcacagaagaacaccgaattcgcagtggatctgtatcaggaagtctcactctctcataaggataacataattttctctccgctcggtatcacactcgtcttagaaatggtacagttaggagcaaaaggtaaagcacagcagcagattcgacagacgctcaagcaacaggagacatccgctggggaggaattctttgtgctaaagtcgtttttctctgccattagcgagaaaaaacaggagttcacttttaacctggccaacgccctgtatttacaggaggggttcacagtcaaggagcagtatttacatggtaacaaggagttcttccaatccgctatcaagctagtggactttcaggacgcaaaagcatgtgctgagatgatttccacttgggtggaacgtaagaccgacggaaagataaaggatatgttttccggagaagagtttggcccacttacccggttggttctcgtcaacgccatttactttaaaggagattggaaacagaaatttaggaaggaagacactcaattgatcaatttcacaaaaaagaacggcagtactgtaaagatacctatgatgaaggccctcttgaggacaaaatacggctacttttcagaaagcagcttaaactatcaggtactcgagctaagctataagggggatgaattcagcttaattattatactccctgccgagggaatggacatcgaagaggtcgagaagcttatcaccgctcagcagattctgaaatggttaagtgagatgcaggaagaggaagtagaaatctcccttccaaggttcaaagtggagcaaaaggtagacttcaaggatgtgttgtatagccttaacataaccgaaatttttagtgggggatgtgaccttagtggtattaccgacagctctgaagtttatgtgagccaggtgacccaaaaagtattctttgaaattaatgaagatggttccgaggctgctacatctactggaatccatatccccgtgatcatgtccctcgcgcagtcacagtttatcgcaaatcacccatttctgttcataatgaagcacaatccgaccgagtctatcctctttatgggacgagtcaccaatccagatactcaggagatcaaaggacgcgacctcgacagtctatag

SEQ ID NO: 162862 - DNA, 1218 bp, Artificial Sequence
  derived and/or modified sequence
atggacacgatttttctgtggtcacttctactgttgtttttcggaagccaagcatcacgttgtagcgctcagaagaatactgaattcgccgtggatctttatcaggaggtgagcctgtctcataaagacaacatcatcttctccccactggggattacactggtgctggagatggtgcaactgggagccaagggaaaagcacagcaacagattagacaaactttaaagcaacaggaaaccagcgccggagaggaattcttcgtactcaagtccttttttagtgccatcagcgagaagaagcaggaattcacttttaatctggctaacgccctatatctgcaggaggggttcactgtgaaagagcagtacctacacggtaataaggagttcttccagagcgcaatcaagctcgtggattttcaagacgctaaggcctgtgcggagatgatctctacttgggttgagaggaagacagacggcaagatcaaggatatgttctcaggggaggaattcggccctctgacccgattagtcctcgttaacgcaatttactttaagggtgattggaaacagaaattccgcaaagaagacacccagctgataaattttacaaagaaaaacggctctaccgtgaagatccctatgatgaaagctttactaagaaccaagtatgggtatttctctgagtcatccttgaactaccaggtcctggagctttcctataaaggcgatgagttcagccttattatcatactgccagctgaaggtatggatattgaggaggtagagaagctgataactgcccaacagattttgaaatggctcagtgagatgcaggaggaagaagtcgagataagcctgcctagatttaaagtcgagcaaaaggtggacttcaaagatgtattgtacagtttgaatatcaccgaaatattctcaggaggatgtgatctcagcggcatcaccgatagttcagaagtgtatgtatcccaggtcacgcagaaggtgttctttgaaataaacgaagacgggtctgaggccgcaacctctactggcatccacatccccgtaatcatgtcactggcacaatctcagttcatcgctaatcatccttttctgttcataatgaagcacaacccaaccgaatccatcctttttatggggagagtcacaaaccccgacactcaggagattaagggcagagatttagactccctgtag

SEQ ID NO: 162863 - DNA, 621 bp, Artificial Sequence
  derived and/or modified sequence
atggatacgatcttcttgtggagccttttgttactcttcttcggttcgcaagcatcccgttgttccgcgcagaagaacaccgaatttgcagtagacttgtatcaggaggtctctctatcccacaaagacaacattatcttctcccccctcggaatcacattggtgttagagatggtccaactgggcgctaaggggaaggctcagcagcaaatcaggcaaacccttaaacagcaggagacttcagcgggggaagaatttttcgtgctgaagtcattcttctcagccatcagtgaaaaaaaacaggaattcacattcaatctagctaacgcactttatcttcaggaaggtttcacagtcaaggagcagtacctgcatggcaataaggagttttttcagtccgctatcaaacttgtcgactttcaggatgcaaaggcctgtgccgagatgattagtacttgggtggaacgcaaaactgacggcaaaatcaaagacatgtttagtggcgaagaattcggtcctctcacacggctagtcctggtcaatgccatctactttaaaggagactggaaacagaaattccgcaaggaagatactcaactgattaactttacgaagaagtag

SEQ ID NO: 162864 - DNA, 1218 bp, Artificial Sequence
  derived and/or modified sequence
atggacaccatcttcctgtggtctcttcttctcttattcttcggatctcaagccagcaggtgctctgcccaaaaaaacaccgagtttgcagtggacttgtatcaagaagtatcactgtcccataaagataacatcatatttagccccctgggtatcactctggtgctcgaaatggtgcagctgggcgcaaaaggcaaggcgcaacagcagataagacagacgctcaaacaacaggagacgtccgcaggcgaggagtttttcgttctgaagtcgttcttctctgctatttccgagaaaaaacaagaatttaccttcaacctggcgaatgctctgtacctgcaggaaggttttacagttaaggaacagtatctgcacggcaataaggagtttttccagtccgccatcaaattagtggactttcaggacgctaaggcttgcgccgaaatgatatccacctgggttgagagaaagactgatgggaagattaaggatatgttctcaggggaagaatttgggcctctgaccaggttagtgttggttaacgctatttattttaaaggagactggaaacagaaatttcgaaaggaggacacacaactgataaactttactaagaaaaatggctctaccgttaagattcctatgatgaaagcgctgctgcggaccaaatatggatacttctcagagagtagcctgaattatcaagtgttagagctttcgtacaagggagacgaattttctctaattattatactaccagccgaaggtatggacatcgaggaagtggagaaactgattacagctcagcagattctgaaatggctgagtgagatgcaggaggaggaagtggagatatcactgccaagattcaaagtggagcagaaggtggacttcaaggatgtgttgtactctcttaatatcacggaaatcttcagtggaggctgcgacctctccggtatcacagattcctcagaagtttacgtttctcaggtgacccagaaggttttttttgaaatcaacgaggatggaagtgaggccgctacatcgacgggtattcacatccccgtgatcatgagtttagcgcaatcacaattcatcgccaaccatcctttcttgtttatcatgaagcacaatcctaccgagtcaattctatttatgggaagggtgaccaatcccgacacacaagagatcaaaggtagagatctggacagtttgtag

SEQ ID NO: 162865 - DNA, 1218 bp, Artificial Sequence
  derived and/or modified sequence
atggacacgattttcctctggtcattactactgctcttctttggcagccaggcgtcaagatgttccgctcagaaaaacactgagtttgccgtagatctctatcaagaggtcagcctctcacataaggataatataatattctcccccctaggcattaccctcgtgttggagatggttcaactgggggccaagggtaaggctcaacaacagattcgccagaccctcaagcagcaggagacatcggcaggcgaagagtttttcgtgctcaaatcattttttagcgcaatctcagaaaagaaacaggaattcacgttcaatctagccaatgcactttatcttcaggaaggcttcaccgttaaggaacagtatctgcatggtaacaaggagtttttccagtctgccattaagttggtcgattttcaggatgctaaagcttgtgcagaaatgatctctacctgggttgaaaggaaaaccgacggcaagatcaaagacatgtttagcggcgaggagttcggccctttgactcgtctggtcctcgtgaacgcaatttattttaagggtgactggaaacagaagttcagaaaagaggatacacaattgataaacttcaccaaaaaaaacggatccaccgtgaaaatcccaatgatgaaggctcttcttcggaccaaatacggctatttctccgaatcatctctgaactaccaggtgctggaactgagttataagggcgatgagttctctctgatcatcatcctgcctgctgagggtatggatattgaggaggtggaaaaactgataaccgcccagcagatcctgaagtggctgagtgaaatgcaggaggaagaggttgagatctccctccccaggttcaaggtcgaacagaaggtggattttaaagatgtgctctattctcttaatataaccgagattttcagcggaggatgcgacctcagcggaattactgattcaagcgaggtctatgtgtcccaggtgacccagaaagtattctttgagatcaatgaagatggatcagaggcagctacctcgacaggtattcacatccctgttataatgtctctcgcccagtcacagttcatcgcaaaccacccgtttctctttatcatgaaacacaaccccaccgagagtattctgtttatgggaagagtaactaatcctgatacccaggaaataaaaggccgcgaccttgactctctctag

SEQ ID NO: 162866 - DNA, 1218 bp, Artificial Sequence
  derived and/or modified sequence
atggacacgattttcctctggtcactcctactgctgttcttcggatctcaggcgtcacggtgctccgctcagaaaaacaccgaattcgctgtcgatctataccaagaggtttcactctctcataaagataacatcatcttctccccccttggaattacattggtgctcgaaatggtgcaattgggcgccaaagggaaggcccagcaacagatacgtcaaaccctcaaacagcaagagacctccgctggcgaggagttcttcgtccttaaatcatttttctccgcgatctctgaaaaaaagcaagaatttacattcaacttagcaaacgcgctgtacctgcaagaggggttcaccgtcaaggagcagtacctccatggcaataaagaatttttccagagcgccatcaagctggtggattttcaggacgctaaggcctgtgccgagatgattagcacttgggtggagagaaagaccgacggaaagatcaaagacatgttcagcggcgaggagttcggtccccttactcggctcgtactcgtaaacgccatatacttcaagggtgattggaagcaaaaattccggaaagaagacacacagttgatcaatttcacaaaaaagaacggcagtactgtaaagatacctatgatgaaggccctcttgaggacaaaatacggctacttttcagaaagcagcttaaactatcaggtactcgagctaagctataagggggatgaattcagcttaattattatactccctgccgagggaatggacatcgaagaggtcgagaagcttatcaccgctcagcagattctgaaatggttaagtgagatgcaggaagaggaagtagaaatctcccttccaaggttcaaagtggagcaaaaggtagacttcaaggatgtgttgtatagccttaacataaccgaaatttttagtgggggatgtgaccttagtggtattaccgacagctctgaagtttatgtgagccaggtgacccaaaaagtattctttgaaattaatgaagatggttccgaggctgctacatctactggaatccatatccccgtgatcatgtccctcgcgcagtcacagtttatcgcaaatcacccatttctgttcataatgaagcacaatccgaccgagtctatcctctttatgggacgagtcaccaatccagatactcaggagatcaaaggacgcgatctcgactctctatag

SEQ ID NO: 162867 - DNA, 1218 bp, Artificial Sequence
  derived and/or modified sequence
atggataccatcttcctgtggagcctcctgttgctctttttcggatcacaggcgtcccgctgcagcgcccagaaaaacaccgaatttgccgtcgatctctatcaggaagtgtctctcagccataaggataacatcatattttcacctctaggcatcacgctagtgctggaaatggtgcaactcggagctaagggaaaggctcagcagcagattagacagacactgaagcagcaggaaacatccgccggcgaggaatttttcgtcctgaaatcttttttctcggccatttccgaaaaaaaacaagagtttaccttcaatctcgcaaacgccctgtacctccaggaaggttttacagttaaggagcaatatctgcatggtaacaaggagtttttccagagtgcaataaaactagttgattttcaggacgcgaaggcctgtgccgaaatgatctcaacgtgggtcgagagaaaaactgacggcaaaatcaaggacatgtttagtggtgaagaatttggtcccctcactcgcttggtgttggtcaatgccatctacttcaagggcgattggaagcagaagtttagaaaagaggatacacagctgatcaatttcactaaaaaaaatggtagcaccgtaaagatccccatgatgaaagcccttcttagaacaaaatacggttatttcagtgagtccagcttaaactaccaggtgctggagcttagttacaaaggcgatgaattcagcttgattattatactgcccgcagaagggatggacattgaggaggtggagaagctaattaccgctcagcaaatcttgaagtggctgtccgaaatgcaggaggaagaggtagagatttccctcccgcgatttaaggtggaacagaaggtggactttaaagacgtattgtacagtttgaatatcaccgaaatattctcaggaggatgtgatctcagcggcatcaccgatagttcagaagtgtatgtatcccaggtcacgcagaaggtgttctttgaaataaacgaagacgggtctgaggccgcaacctctactggcatccacatccccgtaatcatgtcactggcacaatctcagttcatcgctaatcatccttttctgttcataatgaagcacaacccaaccgaatccatcctttttatggggagagtcacaaaccccgacactcaggagattaagggcagagatctggatagtctgtag

SEQ ID NO: 162868 - DNA, 621 bp, Artificial Sequence
  derived and/or modified sequence
atggataccatctttctgtggtccctgctattactgttttttggctctcaggctagccggtgttctgcacagaaaaacaccgagttcgccgttgacttataccaagaagttagcctttcgcataaagacaacataatcttctctccattgggcatcactctcgtcctggaaatggtccaacttggcgctaaagggaaagcacaacaacagatcagacagactctgaaacagcaggaaacgtccgctggagaagagttctttgtgcttaaaagttttttttcagccatctcggaaaaaaagcaggagtttacatttaatcttgcaaatgcactctacctgcaggaaggcttcactgtgaaagagcaatacctccatggtaataaagagttttttcagagcgctattaagctagtggattttcaggacgcgaaagcctgcgcagaaatgatttcgacatgggtggaaaggaagacagacggaaaaattaaggacatgttctctggcgaagagttcggccccctgactcggctggtgttagttaatgcgatatacttcaaaggagactggaaacaaaagtttagaaaggaagatactcagctgatcaacttcactaaaaaatag

SEQ ID NO: 162869 - DNA, 1218 bp, Artificial Sequence
  derived and/or modified sequence
atggacactatcttcctctggtctctacttttgctattttttggctctcaagcaagccgatgctccgctcaaaagaataccgaattcgccgtggatctgtaccaggaggtcagtctctctcataaagacaacataatttttagccccctcggtatcacattagtgcttgagatggtccagctaggagcgaaaggcaaggcacaacagcagattcggcagacactgaagcaacaagaaactagcgcgggtgaggaattctttgtgctgaagagcttcttcagtgctatatctgaaaagaagcaggagttcacattcaatctagctaatgctttatatttacaggaaggcttcaccgtcaaggaacagtatctgcatgggaacaaggaattttttcagtctgctattaagctggtggattttcaggacgctaaggcatgcgctgagatgatcagtacttgggttgaacgcaaaacggacggcaagatcaaggacatgttttcaggtgaggagttcggccctttgacccggcttgtattggtgaatgcaatctatttcaaaggcgactggaaacagaaatttcgcaaggaagatacacagcttatcaactttacaaaaaaaaacggttctaccgttaaaatcccgatgatgaaagcattgctgcggaccaaatatggatacttttctgagtcatcactgaattatcaggtcttagagttgtcctacaaaggagatgaattctctcttattatcatcctgcccgctgaaggtatggacattgaagaagtggagaaattgattactgcccagcaaattcttaaatggctgtcagagatgcaggaagaagaagtggaaattagcctgccaagatttaaggttgagcagaaagtcgactttaaggacgtgctgtattccctcaatataacagagattttttctgggggctgcgacctgtcgggaatcacagatagctcggaggtatatgtatctcaagtgacacagaaagtgttttttgaaattaatgaagacggttccgaggccgctaccagcactggaatccacatccccgtcattatgagcctggcccagtcccaattcattgccaatcaccctttcctttttattatgaaacataatccaaccgaatctattctgtttatgggtagagtgacaaatcccgacactcaagagattaagggtagggatctagatagtctgtag

SEQ ID NO: 162870 - DNA, 1218 bp, Artificial Sequence
  derived and/or modified sequence
atggacacgattttcctctggtcacttctgttattattctttggaagtcaagctagcaggtgcagcgcccagaaaaacaccgagttcgccgttgacttataccaggaggtctctctcagtcataaagataacatcattttttctcctctaggaataaccctggtacttgagatggtgcagctgggcgctaagggcaaagcacagcaacagatcaggcagaccctcaaacaacaagaaacctccgcaggcgaggaattcttcgtcctcaagtcttttttttctgcaatcagcgaaaaaaaacaggagttcaccttcaacctggccaacgcactatacctacaggagggcttcaccgtcaaggaacagtatctgcatgggaacaaggaattctttcagagcgccatcaaacttgttgattttcaagatgccaaggcctgcgcggaaatgatttctacctgggtggagcgaaaaaccgacggaaaaatcaaagacatgttttcaggcgaggaattcggaccactcacacgactcgtcctggtgaatgcaatttacttcaagggagattggaagcagaaattcagaaaggaagacacacagctgatcaattttacaaaaaagaatgggtctaccgtgaagattcctatgatgaaagccctccttcgtactaagtacggatatttctcagagtcaagtctgaactatcaggttttggaactcagctacaaaggagacgaattttcactgattattatcttacccgcagagggaatggacatcgaagaggtcgaaaaattgatcacagctcaacaaatattgaaatggctgtcagaaatgcaagaggaggaagtagagatctccttacctcggtttaaggtcgaacagaaagtcgatttcaaggacgtgttgtatagcctgaacattactgagattttcagcggtggttgcgacctgagtggaattactgacagctcagaagtgtatgtatcccaagtgacccaaaaggttttttttgaaatcaacgaagatgggtccgaggccgcaacctctacaggaattcacatccccgtaattatgtccctggcgcaaagtcagtttatagccaatcatccatttctgttcattatgaagcataacccaaccgaatctattctctttatgggccgcgtcaccaaccctgatacccaggaaatcaaaggaagggacttagactcattatag

SEQ ID NO: 162871 - DNA, 1218 bp, Artificial Sequence
  derived and/or modified sequence
atggacaccatcttcctgtggagcctgctgctgctgttcttcggcagccaggccagcagatgcagcgcccagaagaacaccgagttcgccgtggacctgtaccaggaggtgagcctgagccacaaggacaacatcatcttcagccccctgggcatcaccctggtgctggagatggtgcagctgggcgccaagggcaaggcccagcagcagatcagacagaccctgaagcagcaggagaccagcgccggcgaggagttcttcgtgctgaagagcttcttcagcgccatcagcgagaagaagcaggagttcaccttcaacctggccaacgccctgtacctgcaggagggcttcaccgtgaaggagcagtacctgcacggcaacaaggagttcttccagagcgccatcaagctggtggacttccaggacgccaaggcctgcgccgagatgatcagcacctgggtggagagaaagaccgacggcaagatcaaggacatgttcagcggcgaggagttcggccccctgaccagactggtgctggtgaacgccatctacttcaagggcgactggaagcagaagttcagaaaggaggacacccagctgatcaacttcaccaagaagaacggcagcaccgtgaagatccccatgatgaaggccctgctgagaaccaagtacggctacttcagcgagagcagcctgaactaccaggtgctggagctgagctacaagggcgacgagttcagcctgatcatcatcctgcccgccgagggcatggacatcgaggaggtggagaagctgatcaccgcccagcagatcctgaagtggctgagcgagatgcaggaggaggaggtggagatcagcctgcccagattcaaggtggagcagaaggtggacttcaaggacgtgctgtacagcctgaacatcaccgagatcttcagcggcggctgcgacctgagcggcatcaccgacagcagcgaggtgtacgtgagccaggtgacccagaaggtgttcttcgagatcaacgaggacggcagcgaggccgccaccagcaccggcatccacatccccgtgatcatgagcctggcccagagccagttcatcgccaaccaccccttcctgttcatcatgaagcacaaccccaccgagagcatcctgttcatgggcagagtgaccaaccccgacacccaggagatcaagggcagagacctggacagcctgtag

SEQ ID NO: 162872 - DNA, 621 bp, Artificial Sequence
  derived and/or modified sequence
atggacaccatcttcctgtggagcctgctgctgctgttcttcggcagccaggccagcagatgcagcgcccagaagaacaccgagttcgccgtggacctgtaccaggaggtgagcctgagccacaaggacaacatcatcttcagccccctgggcatcaccctggtgctggagatggtgcagctgggcgccaagggcaaggcccagcagcagatcagacagaccctgaagcagcaggagaccagcgccggcgaggagttcttcgtgctgaagagcttcttcagcgccatcagcgagaagaagcaggagttcaccttcaacctggccaacgccctgtacctgcaggagggcttcaccgtgaaggagcagtacctgcacggcaacaaggagttcttccagagcgccatcaagctggtggacttccaggacgccaaggcctgcgccgagatgatcagcacctgggtggagagaaagaccgacggcaagatcaaggacatgttcagcggcgaggagttcggccccctgaccagactggtgctggtgaacgccatctacttcaagggcgactggaagcagaagttcagaaaggaggacacccagctgatcaacttcaccaagaagtag

SEQ ID NO: 162873 - DNA, 1218 bp, Artificial Sequence
  derived and/or modified sequence
atggacaccatttttttatggtcactcctgctcctcttctttgggtctcaggcttcacgttgtagcgcacagaagaatactgaatttgctgttgatctgtaccaagaggtctccctgtctcacaaggataacattattttttctcctttgggtataacactggtgctggagatggtgcagttgggagcaaaaggtaaagcacaacagcagataaggcaaaccttgaagcagcaggagacatccgcaggcgaggagttttttgttttaaaatcatttttctccgccatttccgagaagaaacaagaatttactttcaatctggctaatgctctgtatctccaagaagggttcactgtgaaggagcagtatttgcacgggaacaaggagtttttccaaagcgctattaagcttgttgacttccaggacgccaaggcgtgcgccgagatgatttcaacctgggttgagaggaaaaccgatggaaaaattaaggacatgtttagcggggaggagtttggacctctgactcgcctggtcttggtgaatgctatctattttaagggcgactggaagcagaaatttcggaaggaggatacgcagctcataaatttcaccaaaaagaacggaagtaccgttaaaatcccgatgatgaaagcactgctgcggaccaagtatggttacttttcggagtcatctctgaattaccaggtgttagagttgtcttacaaaggtgatgagttctctctcataattatcctccctgccgagggaatggatatcgaagaggttgagaaactcatcaccgctcagcagatcctgaagtggttgagcgaaatgcaagaagaagaagtggagatcagtctcccaagatttaaagtagagcagaaagtggattttaaagatgtcctgtacagcttaaacatcactgagattttcagcggaggctgcgatttatcaggaatcaccgattcttctgaagtctacgtatcccaggtgacacagaaggttttttttgagataaatgaggacggctcggaagcggctacaagtactggtattcacatacctgtgataatgagtctagcgcagtcccagttcatcgccaaccatccctttctatttattatgaagcacaacccgacagagagtatcctgttcatgggcagggtaacgaatcctgatactcaggagattaaggggagagacctggacagcctgtag

SEQ ID NO: 162874 - DNA, 1218 bp, Artificial Sequence
  derived and/or modified sequence
atggacacaatattcttatggtcacttctgttactctttttcggcagccaggcatctcgatgcagcgctcaaaaaaataccgagttcgctgtggatctctatcaggaggtgtccctcagtcacaaagataatatcatcttctcaccactggggatcactctggtcctcgagatggttcagctcggcgcgaaaggcaaagctcaacaacagattcgccagaccctgaagcaacaagaaacctccgcaggtgaggaattctttgtattgaaatctttcttcagcgctatctccgaaaaaaagcaggaatttacatttaacctcgcaaacgccctctatttgcaggaggggtttactgttaaagagcagtacctgcacggaaacaaggagttcttccagtctgcgataaaactggtggattttcaggatgcaaaagcctgtgctgagatgatcagtacctgggtagagcgaaaaactgacgggaaaatcaaggacatgttcagtggagaagaatttggcccattgacccggctcgttttggtgaatgccatctactttaaaggggactggaagcagaaattcagaaaggaggatactcagctaattaattttactaaaaagaacggctcaactgtgaagattcccatgatgaaagccttgctgagaaccaaatatgggtattttagtgagtcttctctcaattatcaggtactggaacttagctataaaggagacgagttctcactcatcattatacttccagctgaaggtatggatatcgaggaagtggagaagctgattacggcccagcagatattaaaatggctcagcgagatgcaggaggaagaggtggagatcagccttccaagatttaaggtagaacagaaggtggattttaaggatgttctgtatagcttaaacattacagagatcttctcaggagggtgtgatctgagcggcattactgattcctccgaagtgtatgtgtcgcaggtgacacagaaagtattctttgagatcaacgaggacggttccgaggccgctacgtctacgggtatccatatacctgttattatgagtctcgcccagtcacagttcattgccaaccatccctttctatttattatgaaacacaatcctaccgagtcaatattatttatgggaagagttaccaatcctgatacacaggagatcaaggggagagacctcgactccctctag

SEQ ID NO: 162875 - DNA, 621 bp, Artificial Sequence
  derived and/or modified sequence
atggatactattttcctctggtcgttactcctcctgttctttggttctcaggcttcacggtgctctgcccagaaaaacaccgaatttgccgtcgacctataccaagaggtgagcttgtcccacaaggacaacattattttttcccctctgggtattactttggtcctggagatggttcagctgggggccaaggggaaagctcagcagcagattcgtcagacattgaagcaacaggagacctctgccggggaggaattcttcgtattgaagtccttctttagcgccatctcggagaaaaagcaggaattcacttttaacctcgccaacgcactctatctgcaggaaggcttcaccgtcaaagaacagtaccttcacggaaataaggagtttttccaaagcgccatcaagttggtggactttcaggacgccaaggcgtgtgccgaaatgatctctacatgggttgagaggaagacagatggtaaaataaaggatatgtttagtggcgaagagtttggtcctcttacccgtctcgtgctcgtaaacgctatctacttcaagggagactggaaacagaaattccgaaaggaggacacccagctgatcaactttacaaagaagtag

SEQ ID NO: 162876 - DNA, 1218 bp, Artificial Sequence
  derived and/or modified sequence
atggatacaatatttctctggagtcttcttcttctgttttttgggtcacaggcctcaaggtgcagcgcgcagaagaacacagaattcgctgtggatctgtaccaggaagtaagcctgtcccataaggacaacattatattcagtccactgggcataacgctggtgctggagatggttcagctgggcgctaaggggaaggctcagcagcagatcagacagaccctgaagcagcaggagacgagtgcaggcgaagagttcttcgtcctaaagtccttttttagcgcaataagcgagaaaaagcaggagtttacatttaatctagccaatgccttgtatctccaggaggggtttaccgtgaaagagcagtacctgcacggcaataaagagtttttccagtccgcaatcaagctggtggacttccaggacgctaaagcctgcgccgaaatgatcagtacttgggtcgaaaggaagactgacggaaagatcaaggacatgttcagtggtgaagaattcggacctctgactaggctggtgctcgtgaacgctatttacttcaagggcgactggaagcaaaagttccgtaaggaagatacacagttgatcaattttacaaagaagaatggaagtactgtgaagatcccgatgatgaaggctctgcttaggactaagtacggctatttctccgagtcctcactcaactaccaggttctcgagctttcctacaaaggagatgaattttcactcatcattatcctgcctgcagaaggaatggacattgaggaagtggaaaaattgataacagctcaacagattttaaaatggctttccgagatgcaggaggaggaggtcgagatcagcctgccgcgcttcaaagtggaacagaaggttgatttcaaggatgtgttgtacagcctcaacatcaccgaaattttttcggggggctgtgatctgtcgggcatcacggactcttctgaagtatacgttagccaggtgacacagaaggtattctttgaaatcaatgaagatgggtcagaggccgccacttccacgggaattcacatacctgtgatcatgtctttggcccagagccagttcattgcaaaccacccattcctgtttatcatgaaacataaccccactgagagcattctgtttatggggcgcgtgactaacccggatacccaggaaatcaagggacgtgatctggattcactatag

SEQ ID NO: 162877 - DNA, 1218 bp, Artificial Sequence
  derived and/or modified sequence
atggacactatctttctgtggtcactcctgctacttttttttggaagccaggcatcacgttgctctgctcaaaaaaatacagagtttgctgtggatctgtaccaggaggtttctttgtcccacaaggataacatcatattcagccccctcggtataacactggttctggagatggtccaactgggcgctaagggcaaggctcaacagcagattcgacagactctcaaacaacaggaaacttccgccggggaagagttcttcgtgctgaaatcttttttctccgccatcagcgaaaagaagcaggaatttacgtttaatctagccaacgctttgtacttgcaggaaggtttcactgttaaggagcaatacttgcacggtaacaaagagttcttccagagcgccattaagctggtcgactttcaggacgcaaaagcatgcgctgaaatgatctcaacttgggtggaaagaaagactgacggaaagattaaggacatgtttagtggggaagagtttggaccactgacgcgcctggtgctggtcaatgcgatctatttcaagggggactggaagcaaaaattcagaaaagaagacacgcagcttatcaacttcaccaagaaaaacggatctactgtcaagatccccatgatgaaagctctgcttagaactaaatatggctacttctcagaaagctctttgaattaccaggtgcttgagttatcatacaaaggagacgaattctcgctgataataatactccctgccgagggaatggacattgaggaggttgagaagctgatcaccgctcaacagattctgaagtggctatctgaaatgcaggaggaagaggtggaaatctccctaccacgttttaaagttgagcagaaggtggactttaaggacgtactctattctctaaatatcacagagatattttctggaggctgtgatctctccgggattaccgactcaagtgaagtttatgtcagtcaggtgacacagaaagtgttcttcgagattaatgaagatggatccgaggccgcaacttctacaggcatccatatacccgtaattatgtccctcgcgcagagccagttcattgccaatcaccctttcctttttattatgaagcacaatccaactgagagcatcctgttcatgggaagagtgacaaacccagatactcaggagatcaagggcagggatctcgatagcctctag

SEQ ID NO: 162878 - DNA, 1218 bp, Artificial Sequence
  derived and/or modified sequence
atggacaccatcttcctgtggagcctgctgctgctcttcttcggcagccaggccagccgctgcagcgcccagaagaacacagaatttgctgtggacctgtaccaggaggtgtccctgagccacaaggacaacatcatcttcagccccctgggcatcaccctggtgctggagatggtgcagctgggcgccaagggcaaggcccagcagcagatccggcagaccctgaagcagcaggagaccagcgctggggaggagttctttgtgctgaagagcttcttcagcgccatcagcgagaagaagcaggagttcaccttcaacctggccaatgccctgtacctgcaggagggcttcaccgtgaaggagcagtacctgcacggcaacaaggagttcttccagagcgccatcaagctggtggacttccaggatgccaaggcctgtgccgagatgatcagcacctgggtggagaggaagacagatggcaagatcaaggacatgttttctggagaggagtttggccccctgacccggctggtgctggtgaatgccatctacttcaagggggactggaagcagaagttcaggaaggaggacacccagctgatcaacttcaccaagaagaatggcagcacagtgaagatccccatgatgaaggccctgctgcggaccaagtatggctacttcagcgagagcagcctgaactaccaggtgctggagctgagctacaagggagatgagttcagcctcatcatcatcctgcctgctgagggcatggacatcgaggaggtggagaagctgatcacagcccagcagatcctgaagtggctgtctgagatgcaggaggaggaggtggagatcagcctgccccgcttcaaggtggagcagaaggtggacttcaaggatgtgctgtacagcctgaacatcacagagatcttcagcggcggctgtgacctgagcggcatcacagacagcagcgaggtgtatgtgtcccaggtgacccagaaggtgttctttgagatcaatgaagatggcagcgaggccgccaccagcacaggcatccacatccctgtgatcatgagcctggcccagagccagttcatcgccaaccaccccttcctgttcatcatgaagcacaaccccacagagagcatcctcttcatgggccgggtgaccaacccagacacccaggagatcaagggccgggacctggacagcctgtag

SEQ ID NO: 162879 - DNA, 621 bp, Artificial Sequence
  derived and/or modified sequence
atggacaccatcttcctgtggagcctgctgctgctcttcttcggcagccaggccagccgctgcagcgcccagaagaacacagaatttgctgtggacctgtaccaggaggtgtccctgagccacaaggacaacatcatcttcagccccctgggcatcaccctggtgctggagatggtgcagctgggcgccaagggcaaggcccagcagcagatccggcagaccctgaagcagcaggagaccagcgctggggaggagttctttgtgctgaagagcttcttcagcgccatcagcgagaagaagcaggagttcaccttcaacctggccaatgccctgtacctgcaggagggcttcaccgtgaaggagcagtacctgcacggcaacaaggagttcttccagagcgccatcaagctggtggacttccaggatgccaaggcctgtgccgagatgatcagcacctgggtggagaggaagacagatggcaagatcaaggacatgttttctggagaggagtttggccccctgacccggctggtgctggtgaatgccatctacttcaagggggactggaagcagaagttcaggaaggaggacacccagctgatcaacttcaccaagaagtag

SEQ ID NO: 162880 - DNA, 1218 bp, Artificial Sequence
  derived and/or modified sequence
atggacaccatcttcctgtggagcctgctgctgctgttcttcggcagtcaggcaagtaggtgcagcgcccagaagaacaccgaatttgccgtagatctctatcaggaagtgtctctgtcacataaggataacataatcttcagccccctggggattaccttggtgcttgagatggtgcaactaggtgcgaagggcaaagcccagcagcaaatccggcagactctgaaacaacaggaaacctcggctggggaagagttcttcgtcttgaaatcttttttctccgcaatctctgaaaaaaaacaggaatttacattcaacctagcgaacgccttatatttacaggaaggtttcacggtgaaggagcagtacctacacggcaacaaagagttcttccagtcagctattaaactcgtggatttccaggacgcaaaggcctgtgcagagatgatatctacatgggttgaacggaaaacagatgggaaaatcaaggacatgttttcaggggaagaattcggcccgctgacaaggctggttttggtgaatgcgatctatttcaagggggactggaaacagaaattccgcaaagaggatacacagctgatcaacttcactaagaagaacggatccacggtcaagattcccatgatgaaagcactcctgagaacaaagtatggatattttagcgagtcatccctcaactaccaggtcctcgagttgtcttacaaaggggacgaattctcattgatcattatactgcccgcagaaggaatggatatcgaggaagtggagaagctcatcactgcccagcagatcttaaaatggctgtcagagatgcaggaggaagaagtggaaattagcctgcctaggttcaaagtggaacaaaaagtggacttcaaggacgtgttgtactccctcaacatcaccgaaatcttttcgggcggttgtgacctctcgggcataaccgactccagcgaggtttatgtgtcacaggttacgcagaaggtgttttttgagatcaatgaagacggctccgaggctgccactagcaccggcatccacattcctgtgatcatgtccctggcacagagccagttcattgcgaaccatccattcctgttcatcatgaaacacaatccaacagagtcaattctcttcatgggccgggtgactaacccagacactcaagaaataaagggcagagatctcgattcgttatag

SEQ ID NO: 162881 - DNA, 1218 bp, Artificial Sequence
  derived and/or modified sequence
atggacaccatcttcctgtggagcctgctgctgctgttcttcggcagccaagcctctcgatgcagtgcccaaaagaatactgagtttgctgtagatttatatcaagaggtgagcctttcccataaggacaatatcatcttttccccgttgggaatcacacttgtacttgagatggtgcagctgggggctaaggggaaagcccaacagcagattcggcagaccctcaagcagcaagagacaagcgctggagaggagtttttcgtgctcaaaagtttctttagcgctatatcagaaaaaaagcaggaattcacgtttaacctcgctaacgctttatacttgcaggagggctttactgtgaaggagcagtatctccatggcaacaaggagttttttcagtctgctatcaaacttgttgactttcaagacgccaaagcttgcgccgagatgatctcaacctgggtcgaacgtaaaaccgatggaaagattaaggatatgttctcaggagaagagtttggacctttgaccaggttggttctcgttaatgctatctattttaagggggattggaagcagaaatttcggaaggaggatacccagctgattaacttcaccaaaaaaaacgggtctacagttaagatcccaatgatgaaagcgctgctgcgcacaaaatatggatatttctctgagtccagtctgaattatcaagtcctggaactcagttataagggagacgagttttccttgattattatattgcctgcggagggaatggacatcgaagaggtagagaagctcattaccgcgcagcagattctgaagtggttgtcggagatgcaagaagaagaagtggagatctcattgcctcggtttaaagtagaacagaaagtcgatttcaaggatgttttgtactccctgaacatcacagagatttttagcgggggttgcgatctctccggcatcacagactctagcgaagtctacgtgtcacaggtgactcagaaagtgttctttgaaattaatgaagacgggagtgaagcagctaccagcaccggaatccacatcccagttattatgtctctggcccaatcccaatttatagcaaaccaccctttcttgtttattatgaaacacaaccctacggagtcgatcctgtttatggggagagtgacaaacccggacactcaggagattaagggcagggaccttgatagtttgtag

SEQ ID NO: 162882 - DNA, 621 bp, Artificial Sequence
  derived and/or modified sequence
atggacaccatcttcctgtggagcctgctgctgctgttcttcggctcccaggcctcacgctgctcagcacagaagaacactgagtttgctgtggacctgtatcaagaggtgtcattgagccacaaggataacatcatattctcaccattggggataacactggtccttgaaatggtacaactcggtgcaaaaggcaaagcccagcaacaaatccggcaaacactgaagcagcaagaaacatcagcaggggaagagttcttcgtactgaaaagcttctttagtgccattagcgaaaaaaaacaggaatttacgttcaacctggctaatgctctgtacctgcaggaaggatttactgtgaaggaacagtatctgcacggaaataaggaattcttccagagcgcaattaaactggtggactttcaggacgcaaaagcatgcgcagagatgatcagcacttgggtggagaggaaaactgacgggaaaattaaggacatgtttagcggggaggaattcgggcctctcactcggctggtgctggttaatgctatctattttaaaggcgactggaagcagaagtttagaaaggaagacacacagttgatcaactttactaagaagtag

SEQ ID NO: 162883 - DNA, 1218 bp, Artificial Sequence
  derived and/or modified sequence
atggacaccatcttcctgtggagcctgctgctgctgttcttcggctcccaagctagccgttgctcagcccaaaagaataccgaatttgcagtggacctttaccaggaagtatctttgtctcacaaagataatataattttcagcccccttggaatcaccctcgtgctggagatggtccagctgggggccaaggggaaggcccagcagcaaatacgccagaccctgaagcagcaggagacatcagccggcgaggagttttttgtgctgaagtcctttttcagtgccataagcgagaaaaagcaagagttcacatttaacctggcgaatgctttatacttacaagaggggtttactgttaaagagcaatacctgcacggcaacaaggagttttttcagagtgcaattaaattggttgatttccaggatgccaaagcgtgcgcagagatgatttcaacctgggtggaacggaagaccgatggtaagataaaggacatgttctcgggggaggaatttggtcctctaacacggctggttctcgtaaacgctatctatttcaaaggggattggaagcagaagttccgaaaggaagatacccagctgatcaattttacaaagaagaatggttccactgtcaaaattccaatgatgaaagcgctgctgcgaaccaagtacggctacttttcagaatccagcctgaattaccaggttttggagttgtcctataaaggagatgaattctcgctgatcattattctgcctgcagagggcatggacatcgaagaagtggagaagttgatcaccgcccagcagattctgaagtggttgtccgaaatgcaagaggaggaagtcgagatctctctaccacgattcaaggtggagcagaaggtggactttaaggatgtactgtactctctaaacattacagaaatattttccggaggctgcgacttaagcggcattaccgacagttccgaagtatatgtgagtcaggtgacccagaaagtgttctttgaaatcaatgaggacgggagcgaagccgccacttctaccggaatccacatcccagttatcatgagcctggcacaatcccagttcatagcaaaccatcctttcctgttcatcatgaaacacaatccgacagaatccatcctgtttatgggacgggtgaccaatcccgatactcaggaaattaagggcagagaccttgactcactctag

SEQ ID NO: 162884 - DNA, 1218 bp, Artificial Sequence
  derived and/or modified sequence
atggacaccatcttcctgtggagcctgctgctgctgttcttcggcagtcaagcctcaaggtgcagcgcccagaagaataccgaatttgctgtggatctttatcaggaagtgtcactgagccataaggataacataattttttcacctttgggaataacattagtcctggagatggtgcagctgggcgccaagggtaaagcccagcagcagattagacagaccctcaagcagcaggaaacctcggcaggggaggagttctttgtcctaaagagttttttttccgccatcagcgaaaagaaacaggaattcacgtttaacttagccaatgctctttacctccaggaggggttcacggttaaagagcaatacctgcatggcaataaagagttcttccaatcagcaatcaagctggtcgactttcaggacgctaaggcatgtgccgaaatgatatccacgtgggtggagcgaaagaccgacggcaaaatcaaagacatgttctctggtgaagagttcggcccgctcaccagacttgtcctcgtcaacgctatttacttcaagggggattggaaacaaaagtttcgaaaggaagatacccagctcattaatttcactaagaaaaacgggtcaactgttaagattccaatgatgaaggccctcctgaggactaaatatgggtatttcagcgagagctcgcttaattaccaggtccttgagctttcctacaagggcgacgagttctcgctcataattattctgccagcagagggtatggacattgaagaagtagagaaacttatcaccgcacagcagattctaaaatggctatccgaaatgcaagaggaagaggtggaaatatccctgcccagattcaaagtagaacagaaggtcgactttaaggatgtgctgtactccctgaacatcaccgaaatctttagcggcgggtgtgatctgagcgggatcacagattcctctgaagtttacgtcagtcaagtaacccagaaagtattcttcgagatcaatgaggacgggagtgaagctgcaacgagtactggcatccatatccctgttattatgagcctcgctcagagccaattcattgcaaaccatccattcctgttcattatgaagcacaatccaactgagagcatcctttttatggggcgtgtgaccaaccctgatactcaagagatcaaggggcgggatcttgactccctgtag

SEQ ID NO: 162885 - RNA, 1218 nt, Artificial Sequence
  derived and/or modified sequence
auggacaccaucuuccuuuggucauugcuccuccuguuuuuugguucccaggcaagccgcugcucagcacagaagaacaccgaauucgcaguggaucuguaucaggaagucucacucucucauaaggauaacauaauuuucucuccgcucgguaucacacucgucuuagaaaugguacaguuaggagcaaaagguaaagcacagcagcagauucgacagacgcucaagcaacaggagacauccgcuggggaggaauucuuugugcuaaagucguuuuucucugccauuagcgagaaaaaacaggaguucacuuuuaaccuggccaacgcccuguauuuacaggagggguucacagucaaggagcaguauuuacaugguaacaaggaguucuuccaauccgcuaucaagcuaguggacuuucaggacgcaaaagcaugugcugagaugauuuccacuuggguggaacguaagaccgacggaaagauaaaggauauguuuuccggagaagaguuuggcccacuuacccgguugguucucgucaacgccauuuacuuuaaaggagauuggaaacagaaauuuaggaaggaagacacucaauugaucaauuucacaaaaaagaacggcaguacuguaaagauaccuaugaugaaggcccucuugaggacaaaauacggcuacuuuucagaaagcagcuuaaacuaucagguacucgagcuaagcuauaagggggaugaauucagcuuaauuauuauacucccugccgagggaauggacaucgaagaggucgagaagcuuaucaccgcucagcagauucugaaaugguuaagugagaugcaggaagaggaaguagaaaucucccuuccaagguucaaaguggagcaaaagguagacuucaaggauguguuguauagccuuaacauaaccgaaauuuuuagugggggaugugaccuuagugguauuaccgacagcucugaaguuuaugugagccaggugacccaaaaaguauucuuugaaauuaaugaagaugguuccgaggcugcuacaucuacuggaauccauauccccgugaucaugucccucgcgcagucacaguuuaucgcaaaucacccauuucuguucauaaugaagcacaauccgaccgagucuauccucuuuaugggacgagucaccaauccagauacucaggagaucaaaggacgcgaccucgacagucuauag

SEQ ID NO: 162886 - RNA, 1218 nt, Artificial Sequence
  derived and/or modified sequence
auggacacgauuuuucuguggucacuucuacuguuguuuuucggaagccaagcaucacguuguagcgcucagaagaauacugaauucgccguggaucuuuaucaggaggugagccugucucauaaagacaacaucaucuucuccccacuggggauuacacuggugcuggagauggugcaacugggagccaagggaaaagcacagcaacagauuagacaaacuuuaaagcaacaggaaaccagcgccggagaggaauucuucguacucaaguccuuuuuuagugccaucagcgagaagaagcaggaauucacuuuuaaucuggcuaacgcccuauaucugcaggagggguucacugugaaagagcaguaccuacacgguaauaaggaguucuuccagagcgcaaucaagcucguggauuuucaagacgcuaaggccugugcggagaugaucucuacuuggguugagaggaagacagacggcaagaucaaggauauguucucaggggaggaauucggcccucugacccgauuaguccucguuaacgcaauuuacuuuaagggugauuggaaacagaaauuccgcaaagaagacacccagcugauaaauuuuacaaagaaaaacggcucuaccgugaagaucccuaugaugaaagcuuuacuaagaaccaaguauggguauuucucugagucauccuugaacuaccagguccuggagcuuuccuauaaaggcgaugaguucagccuuauuaucauacugccagcugaagguauggauauugaggagguagagaagcugauaacugcccaacagauuuugaaauggcucagugagaugcaggaggaagaagucgagauaagccugccuagauuuaaagucgagcaaaagguggacuucaaagauguauuguacaguuugaauaucaccgaaauauucucaggaggaugugaucucagcggcaucaccgauaguucagaaguguauguaucccaggucacgcagaagguguucuuugaaauaaacgaagacgggucugaggccgcaaccucuacuggcauccacauccccguaaucaugucacuggcacaaucucaguucaucgcuaaucauccuuuucuguucauaaugaagcacaacccaaccgaauccauccuuuuuauggggagagucacaaaccccgacacucaggagauuaagggcagagauuuagacucccuguag

SEQ ID NO: 162887 - RNA, 621 nt, Artificial Sequence
  derived and/or modified sequence
auggauacgaucuucuuguggagccuuuuguuacucuucuucgguucgcaagcaucccguuguuccgcgcagaagaacaccgaauuugcaguagacuuguaucaggaggucucucuaucccacaaagacaacauuaucuucuccccccucggaaucacauugguguuagagaugguccaacugggcgcuaaggggaaggcucagcagcaaaucaggcaaacccuuaaacagcaggagacuucagcgggggaagaauuuuucgugcugaagucauucuucucagccaucagugaaaaaaaacaggaauucacauucaaucuagcuaacgcacuuuaucuucaggaagguuucacagucaaggagcaguaccugcauggcaauaaggaguuuuuucaguccgcuaucaaacuugucgacuuucaggaugcaaaggccugugccgagaugauuaguacuuggguggaacgcaaaacugacggcaaaaucaaagacauguuuaguggcgaagaauucgguccucucacacggcuaguccuggucaaugccaucuacuuuaaaggagacuggaaacagaaauuccgcaaggaagauacucaacugauuaacuuuacgaagaaguag

SEQ ID NO: 162888 - RNA, 1218 nt, Artificial Sequence
  derived and/or modified sequence
auggacaccaucuuccuguggucucuucuucucuuauucuucggaucucaagccagcaggugcucugcccaaaaaaacaccgaguuugcaguggacuuguaucaagaaguaucacugucccauaaagauaacaucauauuuagcccccuggguaucacucuggugcucgaaauggugcagcugggcgcaaaaggcaaggcgcaacagcagauaagacagacgcucaaacaacaggagacguccgcaggcgaggaguuuuucguucugaagucguucuucucugcuauuuccgagaaaaaacaagaauuuaccuucaaccuggcgaaugcucuguaccugcaggaagguuuuacaguuaaggaacaguaucugcacggcaauaaggaguuuuuccaguccgccaucaaauuaguggacuuucaggacgcuaaggcuugcgccgaaaugauauccaccuggguugagagaaagacugaugggaagauuaaggauauguucucaggggaagaauuugggccucugaccagguuaguguugguuaacgcuauuuauuuuaaaggagacuggaaacagaaauuucgaaaggaggacacacaacugauaaacuuuacuaagaaaaauggcucuaccguuaagauuccuaugaugaaagcgcugcugcggaccaaauauggauacuucucagagaguagccugaauuaucaaguguuagagcuuucguacaagggagacgaauuuucucuaauuauuauacuaccagccgaagguauggacaucgaggaaguggagaaacugauuacagcucagcagauucugaaauggcugagugagaugcaggaggaggaaguggagauaucacugccaagauucaaaguggagcagaagguggacuucaaggauguguuguacucucuuaauaucacggaaaucuucaguggaggcugcgaccucuccgguaucacagauuccucagaaguuuacguuucucaggugacccagaagguuuuuuuugaaaucaacgaggauggaagugaggccgcuacaucgacggguauucacauccccgugaucaugaguuuagcgcaaucacaauucaucgccaaccauccuuucuuguuuaucaugaagcacaauccuaccgagucaauucuauuuaugggaagggugaccaaucccgacacacaagagaucaaagguagagaucuggacaguuuguag

SEQ ID NO: 162889 - RNA, 1218 nt, Artificial Sequence
  derived and/or modified sequence
auggacacgauuuuccucuggucauuacuacugcucuucuuuggcagccaggcgucaagauguuccgcucagaaaaacacugaguuugccguagaucucuaucaagaggucagccucucacauaaggauaauauaauauucuccccccuaggcauuacccucguguuggagaugguucaacugggggccaaggguaaggcucaacaacagauucgccagacccucaagcagcaggagacaucggcaggcgaagaguuuuucgugcucaaaucauuuuuuagcgcaaucucagaaaagaaacaggaauucacguucaaucuagccaaugcacuuuaucuucaggaaggcuucaccguuaaggaacaguaucugcaugguaacaaggaguuuuuccagucugccauuaaguuggucgauuuucaggaugcuaaagcuugugcagaaaugaucucuaccuggguugaaaggaaaaccgacggcaagaucaaagacauguuuagcggcgaggaguucggcccuuugacucgucugguccucgugaacgcaauuuauuuuaagggugacuggaaacagaaguucagaaaagaggauacacaauugauaaacuucaccaaaaaaaacggauccaccgugaaaaucccaaugaugaaggcucuucuucggaccaaauacggcuauuucuccgaaucaucucugaacuaccaggugcuggaacugaguuauaagggcgaugaguucucucugaucaucauccugccugcugaggguauggauauugaggagguggaaaaacugauaaccgcccagcagauccugaaguggcugagugaaaugcaggaggaagagguugagaucucccuccccagguucaaggucgaacagaagguggauuuuaaagaugugcucuauucucuuaauauaaccgagauuuucagcggaggaugcgaccucagcggaauuacugauucaagcgaggucuaugugucccaggugacccagaaaguauucuuugagaucaaugaagauggaucagaggcagcuaccucgacagguauucacaucccuguuauaaugucucucgcccagucacaguucaucgcaaaccacccguuucucuuuaucaugaaacacaaccccaccgagaguauucuguuuaugggaagaguaacuaauccugauacccaggaaauaaaaggccgcgaccuugacucucucuag

SEQ ID NO: 162890 - RNA, 1218 nt, Artificial Sequence
  derived and/or modified sequence
auggacacgauuuuccucuggucacuccuacugcuguucuucggaucucaggcgucacggugcuccgcucagaaaaacaccgaauucgcugucgaucuauaccaagagguuucacucucucauaaagauaacaucaucuucuccccccuuggaauuacauuggugcucgaaauggugcaauugggcgccaaagggaaggcccagcaacagauacgucaaacccucaaacagcaagagaccuccgcuggcgaggaguucuucguccuuaaaucauuuuucuccgcgaucucugaaaaaaagcaagaauuuacauucaacuuagcaaacgcgcuguaccugcaagagggguucaccgucaaggagcaguaccuccauggcaauaaagaauuuuuccagagcgccaucaagcugguggauuuucaggacgcuaaggccugugccgagaugauuagcacuuggguggagagaaagaccgacggaaagaucaaagacauguucagcggcgaggaguucgguccccuuacucggcucguacucguaaacgccauauacuucaagggugauuggaagcaaaaauuccggaaagaagacacacaguugaucaauuucacaaaaaagaacggcaguacuguaaagauaccuaugaugaaggcccucuugaggacaaaauacggcuacuuuucagaaagcagcuuaaacuaucagguacucgagcuaagcuauaagggggaugaauucagcuuaauuauuauacucccugccgagggaauggacaucgaagaggucgagaagcuuaucaccgcucagcagauucugaaaugguuaagugagaugcaggaagaggaaguagaaaucucccuuccaagguucaaaguggagcaaaagguagacuucaaggauguguuguauagccuuaacauaaccgaaauuuuuagugggggaugugaccuuagugguauuaccgacagcucugaaguuuaugugagccaggugacccaaaaaguauucuuugaaauuaaugaagaugguuccgaggcugcuacaucuacuggaauccauauccccgugaucaugucccucgcgcagucacaguuuaucgcaaaucacccauuucuguucauaaugaagcacaauccgaccgagucuauccucuuuaugggacgagucaccaauccagauacucaggagaucaaaggacgcgaucucgacucucuauag

SEQ ID NO: 162891 - RNA, 1218 nt, Artificial Sequence
  derived and/or modified sequence
auggauaccaucuuccuguggagccuccuguugcucuuuuucggaucacaggcgucccgcugcagcgcccagaaaaacaccgaauuugccgucgaucucuaucaggaagugucucucagccauaaggauaacaucauauuuucaccucuaggcaucacgcuagugcuggaaauggugcaacucggagcuaagggaaaggcucagcagcagauuagacagacacugaagcagcaggaaacauccgccggcgaggaauuuuucguccugaaaucuuuuuucucggccauuuccgaaaaaaaacaagaguuuaccuucaaucucgcaaacgcccuguaccuccaggaagguuuuacaguuaaggagcaauaucugcaugguaacaaggaguuuuuccagagugcaauaaaacuaguugauuuucaggacgcgaaggccugugccgaaaugaucucaacgugggucgagagaaaaacugacggcaaaaucaaggacauguuuaguggugaagaauuugguccccucacucgcuugguguuggucaaugccaucuacuucaagggcgauuggaagcagaaguuuagaaaagaggauacacagcugaucaauuucacuaaaaaaaaugguagcaccguaaagauccccaugaugaaagcccuucuuagaacaaaauacgguuauuucagugaguccagcuuaaacuaccaggugcuggagcuuaguuacaaaggcgaugaauucagcuugauuauuauacugcccgcagaagggauggacauugaggagguggagaagcuaauuaccgcucagcaaaucuugaaguggcuguccgaaaugcaggaggaagagguagagauuucccucccgcgauuuaagguggaacagaagguggacuuuaaagacguauuguacaguuugaauaucaccgaaauauucucaggaggaugugaucucagcggcaucaccgauaguucagaaguguauguaucccaggucacgcagaagguguucuuugaaauaaacgaagacgggucugaggccgcaaccucuacuggcauccacauccccguaaucaugucacuggcacaaucucaguucaucgcuaaucauccuuuucuguucauaaugaagcacaacccaaccgaauccauccuuuuuauggggagagucacaaaccccgacacucaggagauuaagggcagagaucuggauagucuguag

SEQ ID NO: 162892 - RNA, 621 nt, Artificial Sequence
  derived and/or modified sequence
auggauaccaucuuucuguggucccugcuauuacuguuuuuuggcucucaggcuagccgguguucugcacagaaaaacaccgaguucgccguugacuuauaccaagaaguuagccuuucgcauaaagacaacauaaucuucucuccauugggcaucacucucguccuggaaaugguccaacuuggcgcuaaagggaaagcacaacaacagaucagacagacucugaaacagcaggaaacguccgcuggagaagaguucuuugugcuuaaaaguuuuuuuucagccaucucggaaaaaaagcaggaguuuacauuuaaucuugcaaaugcacucuaccugcaggaaggcuucacugugaaagagcaauaccuccaugguaauaaagaguuuuuucagagcgcuauuaagcuaguggauuuucaggacgcgaaagccugcgcagaaaugauuucgacauggguggaaaggaagacagacggaaaaauuaaggacauguucucuggcgaagaguucggcccccugacucggcugguguuaguuaaugcgauauacuucaaaggagacuggaaacaaaaguuuagaaaggaagauacucagcugaucaacuucacuaaaaaauag

SEQ ID NO: 162893 - RNA, 1218 nt, Artificial Sequence
  derived and/or modified sequence
auggacacuaucuuccucuggucucuacuuuugcuauuuuuuggcucucaagcaagccgaugcuccgcucaaaagaauaccgaauucgccguggaucuguaccaggaggucagucucucucauaaagacaacauaauuuuuagcccccucgguaucacauuagugcuugagaugguccagcuaggagcgaaaggcaaggcacaacagcagauucggcagacacugaagcaacaagaaacuagcgcgggugaggaauucuuugugcugaagagcuucuucagugcuauaucugaaaagaagcaggaguucacauucaaucuagcuaaugcuuuauauuuacaggaaggcuucaccgucaaggaacaguaucugcaugggaacaaggaauuuuuucagucugcuauuaagcugguggauuuucaggacgcuaaggcaugcgcugagaugaucaguacuuggguugaacgcaaaacggacggcaagaucaaggacauguuuucaggugaggaguucggcccuuugacccggcuuguauuggugaaugcaaucuauuucaaaggcgacuggaaacagaaauuucgcaaggaagauacacagcuuaucaacuuuacaaaaaaaaacgguucuaccguuaaaaucccgaugaugaaagcauugcugcggaccaaauauggauacuuuucugagucaucacugaauuaucaggucuuagaguuguccuacaaaggagaugaauucucucuuauuaucauccugcccgcugaagguauggacauugaagaaguggagaaauugauuacugcccagcaaauucuuaaauggcugucagagaugcaggaagaagaaguggaaauuagccugccaagauuuaagguugagcagaaagucgacuuuaaggacgugcuguauucccucaauauaacagagauuuuuucugggggcugcgaccugucgggaaucacagauagcucggagguauauguaucucaagugacacagaaaguguuuuuugaaauuaaugaagacgguuccgaggccgcuaccagcacuggaauccacauccccgucauuaugagccuggcccagucccaauucauugccaaucacccuuuccuuuuuauuaugaaacauaauccaaccgaaucuauucuguuuauggguagagugacaaaucccgacacucaagagauuaaggguagggaucuagauagucuguag

SEQ ID NO: 162894 - RNA, 1218 nt, Artificial Sequence
  derived and/or modified sequence
auggacacgauuuuccucuggucacuucuguuauuauucuuuggaagucaagcuagcaggugcagcgcccagaaaaacaccgaguucgccguugacuuauaccaggaggucucucucagucauaaagauaacaucauuuuuucuccucuaggaauaacccugguacuugagauggugcagcugggcgcuaagggcaaagcacagcaacagaucaggcagacccucaaacaacaagaaaccuccgcaggcgaggaauucuucguccucaagucuuuuuuuucugcaaucagcgaaaaaaaacaggaguucaccuucaaccuggccaacgcacuauaccuacaggagggcuucaccgucaaggaacaguaucugcaugggaacaaggaauucuuucagagcgccaucaaacuuguugauuuucaagaugccaaggccugcgcggaaaugauuucuaccuggguggagcgaaaaaccgacggaaaaaucaaagacauguuuucaggcgaggaauucggaccacucacacgacucguccuggugaaugcaauuuacuucaagggagauuggaagcagaaauucagaaaggaagacacacagcugaucaauuuuacaaaaaagaaugggucuaccgugaagauuccuaugaugaaagcccuccuucguacuaaguacggauauuucucagagucaagucugaacuaucagguuuuggaacucagcuacaaaggagacgaauuuucacugauuauuaucuuacccgcagagggaauggacaucgaagaggucgaaaaauugaucacagcucaacaaauauugaaauggcugucagaaaugcaagaggaggaaguagagaucuccuuaccucgguuuaaggucgaacagaaagucgauuucaaggacguguuguauagccugaacauuacugagauuuucagcggugguugcgaccugaguggaauuacugacagcucagaaguguauguaucccaagugacccaaaagguuuuuuuugaaaucaacgaagauggguccgaggccgcaaccucuacaggaauucacauccccguaauuaugucccuggcgcaaagucaguuuauagccaaucauccauuucuguucauuaugaagcauaacccaaccgaaucuauucucuuuaugggccgcgucaccaacccugauacccaggaaaucaaaggaagggacuuagacucauuauag

SEQ ID NO: 162895 - protein, 1068 aa, Artificial Sequence
  derived and/or modified sequence
MPPRPSSGELWGIHLMPPRILVECLLPNGMIVTLECLREATLITIKHELFKEARKYPLHQLLQDESSYIFVSVTQEAEREEFFDETRRLCDLRLFQPFLKVIEPVGNREEKILNREIGFAIGMPVCEFDMVKDPEVQDFRRNILNVCKEAVDLRDLNSPHSRAMYVYPPNVESSPELPKHIYNKLDKGQIIVVIWVIVSPNNDKQKYTLKINHDCVPEQVIAEAIRKKTRSMLLSSEQLKLCVLEYQGKYILKVCGCDEYFLEKYPLSQYKYIRSCIMLGRMPNLMLMAKESLYSQLPMDCFTMPSYSRRISTATPYMNGETSTKSLWVINSALRIKILCATYVNVNIRDIDKIYVRTGIYHGGEPLCDNVNTQRVPCSNPRWNEWLNYDIYIPDLPRAARLCLSICSVKGRKGAKEEHCPLAWGNINLFDYTDTLVSGKMALNLWPVPHGLEDLLNPIGVTGSNPNKETPCLELEFDWFSSVVKFPDMSVIEEHANWSVSREAGFSYSHAGLSNRLARDNELRENDKEQLKAISTRDPLSEITEQEKDFLWSHRHYCVTIPEILPKLLLSVKWNSRDEVAQMYCLVKDWPPIKPEQAMELLDCNYPDPMVRGFAVRCLEKYLTDDKLSQYLIQLVQVLKYEQYLDNLLVRFLLKKALTNQRIGHFFFWHLKSEMHNKTVSQRFGLLLESYCRACGMYLKHLNRQVEAMEKLINLTDILKQEKKDETQKVQMKFLVEQMRRPDFMDALQGFLSPLNPAHQLGNLRLEECRIMSSAKRPLWLNWENPDIMSELLFQNNEIIFKNGDDLRQDMLTLQIIRIMENIWQNQGLDLRMLPYGCLSIGDCVGLIEVVRNSHTIMQIQCKGGLKGALQFNSHTLHQWLKDKNKGEIYDAAIDLFTRSCAGYCVATFILGIGDRHNSNIMVKDDGQLFHIDFGHFLDHKKKKFGYKRERVPFVLTQDFLIVISKGAQECTKTREFERFQEMCYKAYLAIRQHANLFINLFSMMLGSGMPELQSFDDIAYIRKTLALDKTEQEALEYFMKQMNDAHHGGWTTKMDWIFHTIKQHALN

SEQ ID NO: 162896 - protein, 118 aa, Artificial Sequence
  derived and/or modified sequence
MPPRPSSGELWGIHLMPPRILVECLLPNGMIVTLECLREATLITIKHELFKEARKYPLHQLLQDESSYIFVSVTQEAEREEFFDETRRLCDLRLFQPFLKVIEPVGNREEKILNREIG

SEQ ID NO: 162897 - protein, 21 aa, Artificial Sequence
  derived and/or modified sequence
MPPRPSSGELWGIHLMPPRIL

SEQ ID NO: 162898 - DNA, 3207 bp, Artificial Sequence
  derived and/or modified sequence
atgccccccagacccagcagcggcgagctgtggggcatccacctgatgccccccagaatcctggtggagtgcctgctgcccaacggcatgatcgtgaccctggagtgcctgagagaggccaccctgatcaccatcaagcacgagctgttcaaggaggccagaaagtaccccctgcaccagctgctgcaggacgagagcagctacatcttcgtgagcgtgacccaggaggccgagagagaggagttcttcgacgagaccagaagactgtgcgacctgagactgttccagcccttcctgaaggtgatcgagcccgtgggcaacagagaggagaagatcctgaacagagagatcggcttcgccatcggcatgcccgtgtgcgagttcgacatggtgaaggaccccgaggtgcaggacttcagaagaaacatcctgaacgtgtgcaaggaggccgtggacctgagagacctgaacagcccccacagcagagccatgtacgtgtacccccccaacgtggagagcagccccgagctgcccaagcacatctacaacaagctggacaagggccagatcatcgtggtgatctgggtgatcgtgagccccaacaacgacaagcagaagtacaccctgaagatcaaccacgactgcgtgcccgagcaggtgatcgccgaggccatcagaaagaagaccagaagcatgctgctgagcagcgagcagctgaagctgtgcgtgctggagtaccagggcaagtacatcctgaaggtgtgcggctgcgacgagtacttcctggagaagtaccccctgagccagtacaagtacatcagaagctgcatcatgctgggcagaatgcccaacctgatgctgatggccaaggagagcctgtacagccagctgcccatggactgcttcaccatgcccagctacagcagaagaatcagcaccgccaccccctacatgaacggcgagaccagcaccaagagcctgtgggtgatcaacagcgccctgagaatcaagatcctgtgcgccacctacgtgaacgtgaacatcagagacatcgacaagatctacgtgagaaccggcatctaccacggcggcgagcccctgtgcgacaacgtgaacacccagagagtgccctgcagcaaccccagatggaacgagtggctgaactacgacatctacatccccgacctgcccagagccgccagactgtgcctgagcatctgcagcgtgaagggcagaaagggcgccaaggaggagcactgccccctggcctggggcaacatcaacctgttcgactacaccgacaccctggtgagcggcaagatggccctgaacctgtggcccgtgccccacggcctggaggacctgctgaaccccatcggcgtgaccggcagcaaccccaacaaggagaccccctgcctggagctggagttcgactggttcagcagcgtggtgaagttccccgacatgagcgtgatcgaggagcacgccaactggagcgtgagcagagaggccggcttcagctacagccacgccggcctgagcaacagactggccagagacaacgagctgagagagaacgacaaggagcagctgaaggccatcagcaccagagaccccctgagcgagatcaccgagcaggagaaggacttcctgtggagccacagacactactgcgtgaccatccccgagatcctgcccaagctgctgctgagcgtgaagtggaacagcagagacgaggtggcccagatgtactgcctggtgaaggactggccccccatcaagcccgagcaggccatggagctgctggactgcaactaccccgaccccatggtgagaggcttcgccgtgagatgcctggagaagtacctgaccgacgacaagctgagccagtacctgatccagctggtgcaggtgctgaagtacgagcagtacctggacaacctgctggtgagattcctgctgaagaaggccctgaccaaccagagaatcggccacttcttcttctggcacctgaagagcgagatgcacaacaagaccgtgagccagagattcggcctgctgctggagagctactgcagagcctgcggcatgtacctgaagcacctgaacagacaggtggaggccatggagaagctgatcaacctgaccgacatcctgaagcaggagaagaaggacgagacccagaaggtgcagatgaagttcctggtggagcagatgagaagacccgacttcatggacgccctgcagggcttcctgagccccctgaaccccgcccaccagctgggcaacctgagactggaggagtgcagaatcatgagcagcgccaagagacccctgtggctgaactgggagaaccccgacatcatgagcgagctgctgttccagaacaacgagatcatcttcaagaacggcgacgacctgagacaggacatgctgaccctgcagatcatcagaatcatggagaacatctggcagaaccagggcctggacctgagaatgctgccctacggctgcctgagcatcggcgactgcgtgggcctgatcgaggtggtgagaaacagccacaccatcatgcagatccagtgcaagggcggcctgaagggcgccctgcagttcaacagccacaccctgcaccagtggctgaaggacaagaacaagggcgagatctacgacgccgccatcgacctgttcaccagaagctgcgccggctactgcgtggccaccttcatcctgggcatcggcgacagacacaacagcaacatcatggtgaaggacgacggccagctgttccacatcgacttcggccacttcctggaccacaagaagaagaagttcggctacaagagagagagagtgcccttcgtgctgacccaggacttcctgatcgtgatcagcaagggcgcccaggagtgcaccaagaccagagagttcgagagattccaggagatgtgctacaaggcctacctggccatcagacagcacgccaacctgttcatcaacctgttcagcatgatgctgggcagcggcatgcccgagctgcagagcttcgacgacatcgcctacatcagaaagaccctggccctggacaagaccgagcaggaggccctggagtacttcatgaagcagatgaacgacgcccaccacggcggctggaccaccaagatggactggatcttccacaccatcaagcagcacgccctgaactag

SEQ ID NO: 162899 - DNA, 357 bp, Artificial Sequence
  derived and/or modified sequence
atgccccccagacccagcagcggcgagctgtggggcatccacctgatgccccccagaatcctggtggagtgcctgctgcccaacggcatgatcgtgaccctggagtgcctgagagaggccaccctgatcaccatcaagcacgagctgttcaaggaggccagaaagtaccccctgcaccagctgctgcaggacgagagcagctacatcttcgtgagcgtgacccaggaggccgagagagaggagttcttcgacgagaccagaagactgtgcgacctgagactgttccagcccttcctgaaggtgatcgagcccgtgggcaacagagaggagaagatcctgaacagagagatcggctag

SEQ ID NO: 162900 - DNA, 66 bp, Artificial Sequence
  derived and/or modified sequence
atgccccccagacccagcagcggcgagctgtggggcatccacctgatgccccccagaatcctgtag

SEQ ID NO: 162901 - DNA, 3207 bp, Artificial Sequence
  derived and/or modified sequence
atgcctcccaggccctcttccggggagctgtggggaattcacttgatgccaccacgaattctcgtggaatgtctgctgcccaacggaatgatcgtgacgctcgagtgtctccgtgaggccaccttaatcactataaagcatgagctctttaaggaagcccggaaatatcctctgcatcagctcctgcaggacgagagttcctatatttttgtctccgttacccaggaggcggagcgagaagaattcttcgatgagacacggcgcctctgcgatctgcggctgtttcagcccttcctaaaggtaattgagccagtggggaatagagaagagaagattctgaaccgggaaatcgggtttgccatcggcatgccggtgtgtgaattcgacatggtgaaggaccccgaagtccaagatttcagacggaacatcctcaatgtgtgtaaagaggcagtggatctgagggacctgaattcgccacacagcagggccatgtacgtgtacccgcccaatgtcgaaagttcccccgagcttcctaaacatatctacaacaaactcgacaaggggcagattatcgttgtcatctgggttatagtatcaccaaacaacgacaagcagaagtatacacttaagatcaaccacgactgcgtgcctgagcaagtgatcgccgaagctatccgaaagaagacccgttctatgctgctgtccagcgaacagctgaagctctgcgtcctcgagtaccaggggaaatatattttaaaagtctgtggctgtgatgagtattttctcgagaagtaccctctttcccagtacaagtacattcggagctgtattatgttggggagaatgcccaacctgatgctgatggctaaagagagcttgtattcccaactgccaatggattgtttcacaatgcccagctattccagaaggatcagcaccgctaccccttacatgaacggcgagactagtaccaaatcactgtgggttataaatagcgccttaagaatcaagatcttatgtgcaacttacgtgaatgtcaatatccgggacatcgataaaatttacgtgcggactggcatataccatggcggggagccactctgcgataacgttaatactcagcgggttccctgcagtaatcctcgctggaatgaatggctgaactacgatatatacatcccagatctgccacgtgccgctaggctctgcttgtctatttgctcagttaagggtaggaagggcgccaaagaagagcactgtccactggcttggggcaacataaatctgttcgactacacggacactttggtcagtggtaaaatggcgctgaacctctggccggttcctcatggccttgaggatctcctgaacccaatcggcgttactggtagcaacccgaataaggagacaccttgcctcgaactcgaatttgactggttcagctctgtggtcaagtttccggatatgtccgtgatcgaggagcacgccaactggtccgtgtcacgcgaagcgggttttagctactctcacgcagggctttcgaatagactggccagagataatgagctgcgtgaaaatgacaaggagcagttgaaggcaatctctaccagagacccactgtcagagattactgagcaggagaaagacttcctgtggagccataggcactattgtgttacaattcctgagatactacctaaactgctcctcagcgtcaagtggaattcacgcgacgaggtagcgcagatgtattgcttggtaaaggactggccccctatcaagcccgagcaggcaatggagttacttgactgtaactatcccgacccaatggtccgaggcttcgccgtgagatgcctcgaaaaatacttaacagacgataagttgtctcagtatctgatacagctggtacaggtgcttaaatacgaacaatatctcgacaatctcttagtgaggttcctgctcaaaaaagctctgacgaaccagcggattgggcattttttcttctggcacctgaagagcgagatgcataataagacagtgtctcagcgcttcggccttctcctggaatcctattgtcgagcctgcgggatgtacttgaagcaccttaataggcaagtggaggcgatggagaaattaatcaacctcacggatatactgaagcaggagaagaaggatgagacccagaaggtgcaaatgaaatttctggtggagcagatgaggcggcctgatttcatggatgcactacagggatttctaagtcccctcaatccagcgcaccaattgggaaatctgcgcctggaagaatgtcgcatcatgtcaagcgcaaagcggccactctggctcaactgggagaaccctgacatcatgtcagagctcctctttcagaacaatgagatcattttcaaaaacggcgacgacctgaggcaagatatgctgaccctccagattatacgcataatggagaacatctggcagaaccaggggttggacttgagaatgcttccttacggatgtctgagcatcggagattgtgtcgggctcattgaagtcgtgcggaactctcatactattatgcagatccagtgtaaaggcggcctgaagggggctctccaattcaattcacacacactgcatcaatggctgaaggacaaaaacaagggtgagatatacgatgcggcaatagatctgttcacacggagttgtgccgggtactgcgtggcaaccttcatcctgggaatcggtgataggcacaatagtaatataatggtcaaagacgacggccaattgttccatatcgacttcggtcattttctcgatcataagaagaagaaatttgggtataagagagagagggtgccctttgtgctcacacaagactttttgatcgtgatcagcaagggggcacaggagtgtactaaaactagagagtttgagaggtttcaggaaatgtgctacaaggcctaccttgccattcgccagcatgctaatctcttcatcaacttatttagtatgatgctggggtccggcatgcctgaactccagagttttgatgatattgcttatatcagaaaaaccctggcattggacaagactgagcaggaagctctcgagtattttatgaagcagatgaacgatgctcatcacggaggctggactacgaagatggactggatcttccatacaattaagcagcacgctctgaattag

SEQ ID NO: 162902 - DNA, 357 bp, Artificial Sequence
  derived and/or modified sequence
atgccaccccggccgtcgtccggggaactgtgggggatccacttgatgcctcctaggatccttgtagagtgtctgctgccaaatggcatgatcgtgaccctagaatgtctccgggaggccaccctgatcacaataaagcatgaactgttcaaggaagctcgtaagtatccactacaccaactcctccaagatgagtcttcttacatctttgtttcagtgacgcaggaggctgagcgggaggagttttttgacgaaacgcgaaggctgtgcgatctgcgtctgtttcaacccttcctgaaggtgattgagccagtgggcaaccgcgaagagaaaatcctgaatcgcgagattgggtag

SEQ ID NO: 162903 - DNA, 66 bp, Artificial Sequence
  derived and/or modified sequence
atgccaccccgtccatcctcaggcgaactgtggggtatccacttaatgccaccgcggatactgtag

SEQ ID NO: 162904 - DNA, 3207 bp, Artificial Sequence
  derived and/or modified sequence
atgccaccccggcccagcagtggagagctgtggggcatccacctgatgccaccccgcatcctggtggagtgcctgctgcccaacggcatgattgtgaccctggagtgcctgcgggaggccaccctcatcaccatcaagcatgagctgttcaaggaggccaggaagtaccccctgcaccagctgctgcaggatgagagcagctacatctttgtgtctgtgacccaggaggccgagcgggaggagttctttgatgagacccggcggctgtgtgacctgcggctcttccagcccttcctgaaggtgattgagcctgtgggcaaccgggaggagaagatcctgaaccgggagattggatttgccatcggcatgcctgtgtgtgaatttgacatggtgaaggaccctgaggtgcaggacttcagaagaaacatcctgaatgtgtgcaaggaggccgtggacctgcgggacctgaacagcccccacagccgggccatgtatgtgtacccacccaacgtggagagcagccctgagctgcccaagcacatctacaacaagctggacaagggccagatcatcgtggtgatctgggtgattgtgagccccaacaatgacaagcagaagtacaccctgaagatcaaccacgactgtgtgcctgagcaggtgattgctgaggccatcaggaagaagaccaggtccatgctgctgagcagcgagcagctgaagctgtgtgtgctggagtaccagggcaagtacatcctgaaggtgtgtggctgtgatgagtacttcctggagaagtaccccctgagccagtacaagtacatccgcagctgcatcatgctgggccgcatgcccaacctgatgctgatggccaaggagagcctgtacagccagctgcccatggactgcttcaccatgcccagctacagccgccgcatcagcacagccaccccctacatgaatggagagaccagcaccaagagcctgtgggtgatcaacagcgccctgcgcatcaagatcctgtgtgccacctacgtgaatgtgaacatccgggacatcgacaagatctacgtgaggacaggcatctaccacggcggggagcccctgtgtgacaacgtgaacacccagagggtgccctgcagcaacccccgctggaatgagtggctgaactatgacatctacatcccagacctgcccagggctgcccggctgtgcctgagcatctgcagcgtgaagggcaggaaaggagccaaggaggagcactgccccctggcctggggcaacatcaacctgtttgactacacagacaccctggtgtctgggaagatggccctgaacctgtggcctgtgccccacggcctggaggacctgctgaaccccatcggcgtgacaggcagcaaccccaacaaggagaccccctgcctggagctggagtttgactggttcagctctgtggtgaagttcccagacatgtctgtcatcgaggagcacgccaactggagcgtgtcccgggaggccggcttctcctacagccatgctggcctgagcaaccggctggcccgggacaatgagctgagagaaaatgacaaggagcagctgaaggccatcagcacccgggaccccctgtctgagatcacagagcaggagaaggacttcctgtggagccaccgccactactgtgtgaccatccctgagatcctgcccaagctgctgctgtctgtgaagtggaacagcagagatgaggtggcccagatgtactgcctggtgaaggactggccacccatcaagccagagcaggccatggagctgctggactgcaactacccagaccccatggtgcggggctttgctgtgcgctgcctggagaagtacctgacagatgacaagctgagccagtacctgatccagctggtgcaggtgctgaagtatgagcagtacctggacaacctgctggtgcgcttcctgctgaagaaggccctgaccaaccagagaattggccacttcttcttctggcacctgaagtctgagatgcacaacaagacagtgtcccagcgcttcggcctgctgctggagagctactgccgggcctgtggcatgtacctgaagcacctgaaccggcaggtggaggccatggagaagctgatcaacctgacagacatcctgaagcaggagaagaaggatgagacccagaaggtgcagatgaagttcctggtggagcagatgaggaggccagacttcatggatgccctgcagggcttcctgagccccctgaacccagcccaccagctgggcaacctgcggctggaggagtgccgcatcatgagcagcgccaagaggcccctgtggctgaactgggagaacccagacatcatgtctgagctgctcttccagaacaatgagatcatcttcaagaatggagatgacctgcggcaggacatgctgaccctgcagatcatccgcatcatggagaacatctggcagaaccagggcctggacctgaggatgctgccctacggctgcctgagcattggagactgtgtgggcctcatcgaggtggtgaggaacagccacaccatcatgcagatccagtgcaagggcggcctgaagggggccctgcagttcaacagccacaccctgcaccagtggctgaaggacaagaacaagggggagatctatgatgctgccatcgacctcttcaccaggagctgtgccggctactgtgtggccaccttcatcctgggcattggagacagacacaacagcaacatcatggtgaaggatgatggccagctgttccacatcgactttggccacttcctggaccacaagaagaagaagtttggctacaagcgggagcgggtgccctttgtgctgacccaggacttcctgattgtcatcagcaagggggcccaggagtgcaccaagacccgggagtttgagcgcttccaggagatgtgctacaaggcctacctggccatccggcagcacgccaacctcttcatcaacctcttctccatgatgctgggcagcggcatgcctgagctgcagagctttgatgacatcgcctacatcaggaagaccctggccctggacaagacagagcaggaggccctggagtacttcatgaagcagatgaatgatgcccaccacggcggctggaccaccaagatggactggatcttccacaccatcaagcagcacgccctgaactag

SEQ ID NO: 162905 - DNA, 357 bp, Artificial Sequence
  derived and/or modified sequence
atgccaccccggcccagcagtggagagctgtggggcatccacctgatgccaccccgcatcctggtggagtgcctgctgcccaacggcatgattgtgaccctggagtgcctgcgggaggccaccctcatcaccatcaagcatgagctgttcaaggaggccaggaagtaccccctgcaccagctgctgcaggatgagagcagctacatctttgtgtctgtgacccaggaggccgagcgggaggagttctttgatgagacccggcggctgtgtgacctgcggctcttccagcccttcctgaaggtgattgagcctgtgggcaaccgggaggagaagatcctgaaccgggagattggatag

SEQ ID NO: 162906 - DNA, 66 bp, Artificial Sequence
  derived and/or modified sequence
atgccaccccggcccagcagtggagagctgtggggcatccacctgatgccaccccgcatcctgtag

SEQ ID NO: 162907 - DNA, 3207 bp, Artificial Sequence
  derived and/or modified sequence
atgcccccccggcccagcagcggcgagctgtggggcatccacctgatgcctcctagaattcttgttgaatgcttgttgccgaatggcatgatcgtgactcttgagtgcttaagagaggcaaccttaattaccattaagcacgagctgttcaaagaggctaggaagtaccctctccatcagctccttcaggatgagtcatcctatatttttgtgtccgttactcaagaggcagagcgcgaagagtttttcgatgagaccaggcgattgtgcgatctgagactcttccagccttttctgaaagtgattgaacctgtggggaacagagaggaaaagatactgaatcgtgagatagggtttgccatcggaatgccagtctgtgaattcgacatggtaaaagaccccgaagtgcaggacttccggcgcaatattcttaatgtgtgtaaggaagcagtcgacttgcgcgacttgaactcccctcatagcagagcaatgtacgtgtacccacccaatgtggagtctagccccgaactgcctaagcacatctataacaagctcgataagggccagataatcgtggtgatttgggtgattgtgagccccaacaacgataagcagaagtacactctgaaaataaatcatgattgcgtgcccgaacaggtcatcgccgaggctatccgaaagaagacacgctcaatgctactgtcgtccgagcagctcaagctctgtgttctggagtaccaggggaaatacattctgaaggtttgtggctgcgatgaatactttctcgagaagtaccccctgtcacagtataaatatataaggtcttgcatcatgctcggaaggatgcctaacttaatgctcatggcaaaggagagtctatactcacaactacctatggactgctttaccatgccttcctatagcagacggatttctactgccactccctacatgaatggcgagacaagcacaaaatccctctgggttatcaacagtgctctgagaatcaaaatcctctgtgccacttacgtgaatgtgaatattagagacattgacaaaatatatgtcaggacaggaatctatcacgggggcgagcccctgtgtgacaacgtcaatacccagcgagtgccttgcagcaaccccaggtggaacgagtggctcaattacgatatctatattcctgatctcccccgcgcagcccgcctgtgtctcagtatctgcagcgtgaaaggccgcaaaggagcaaaagaggagcattgcccactcgcctggggtaacatcaatttgttcgactacacagacactctggtctccggcaaaatggcattaaacttatggcctgtgccacacggtttagaggacttgctgaatcccatcggcgtcacaggcagcaatcctaacaaagagacaccatgcttggagctggagtttgattggttcagctctgtggtgaagttccctgacatgtccgttattgaggagcacgcaaactggagcgtatcaagagaagccggcttttcttactctcacgcaggcctcagcaacaggctggccagagataatgagctcagggagaacgacaaagagcagctgaaagcaatctccaccagggatcccctttctgagatcactgagcaagaaaaggactttctctggtcacaccgtcattactgtgtgacaatcccagaaatcttgcctaagctgctcctctctgtgaagtggaacagcagagatgaggtggcgcagatgtattgcttggtgaaagattggcccccaatcaagcctgaacaggctatggagctcctggactgcaattaccctgatcctatggtccgcggtttcgccgtgcggtgtctggaaaagtatctaaccgatgataagctgtcacagtatctgatccagcttgtacaggtgttaaagtatgaacagtatctggataacctgttggtcaggttcctgctcaagaaagcactgactaatcagagaatcggccacttcttcttttggcatctcaagagtgagatgcacaacaagaccgtgagccagagatttggcctgctgctggagtcctactgcagagcctgcggtatgtatctcaagcacctgaacagacaggttgaagctatggagaagttgattaatctgactgatattcttaaacaggagaagaaagacgaaactcagaaagtgcagatgaagtttctcgttgaacaaatgcggcggcctgacttcatggacgcactccaggggttcctctcaccccttaatcccgcccatcaactgggcaatctgagattggaagaatgccgtatcatgtctagcgcgaaaaggcctttgtggctaaactgggaaaacccagatatcatgtctgaactgttgtttcagaataatgagatcatctttaagaacggggatgacctgcggcaagacatgctcacgcttcaaattattcggattatggagaacatttggcaaaatcaaggcttagacttacggatgcttccatatggatgcctgtctatcggtgactgcgttgggctgattgaggtggtaaggaatagccacacaataatgcaaattcaatgcaaaggtgggctgaaaggagctcttcagttcaattctcacacgttgcatcagtggctgaaggacaaaaacaaaggtgagatctacgacgccgccattgatctgttcactcgtagttgtgctggttactgtgttgcaacttttatcctcgggattggggacagacataatagcaatattatggtgaaggatgacgggcagctgttccatatagactttggtcacttcctggatcacaagaaaaagaagtttgggtataaacgggagcgggtgccatttgttttgacgcaagattttttgatcgtgatctccaaaggggcacaggaatgcaccaagacgcgggagttcgagcgcttccaagaaatgtgctacaaggcttatttagctatccgccagcacgccaatctctttatcaacctctttagcatgatgctgggctctggcatgccagaattgcaaagctttgatgacatagcgtacatccgaaaaacgctggccttggacaagaccgaacaggaggccctggaatactttatgaagcagatgaatgatgcacatcacggaggctggacaaccaagatggactggatctttcatacaataaaacagcatgctctgaactag

SEQ ID NO: 162908 - DNA, 357 bp, Artificial Sequence
  derived and/or modified sequence
atgcccccccggcccagcagcggcgagctgtggggcatccacctgatgccgccaaggattcttgtggagtgcctattacctaacggtatgattgtaactcttgagtgtctcagggaggccactctcatcacgattaagcacgagctgtttaaggaggccaggaagtacccactgcaccagctcttgcaagatgagagtagctacatatttgtatccgttacccaggaagccgaaagggaggagttcttcgatgagactcggcgcctgtgcgatctgcggcttttccagccctttcttaaggtgattgagcccgtcggcaacagggaagagaagattctgaaccgtgaaatcggctag

SEQ ID NO: 162909 - DNA, 66 bp, Artificial Sequence
  derived and/or modified sequence
atgcccccccggcccagcagcggcgagctgtggggcatccacctgatgcctcctcgcattctgtag

SEQ ID NO: 162910 - DNA, 3207 bp, Artificial Sequence
  derived and/or modified sequence
atgcctcctcgcccatctagcggagaactctggggcattcatctgatgcccccacgcattcttgtggaatgtctgttgcccaacgggatgatcgttacgttagagtgtctgcgagaggctaccttgattactattaaacatgagcttttcaaagaggccaggaagtacccgcttcaccagctgttgcaagatgagtcttcttacatcttcgttagcgtcactcaggaagccgagagggaggaatttttcgacgagacccgtcgcctgtgtgacttgcggctgtttcagccattccttaaggtgattgaacccgtgggaaatcgtgaagagaaaattctgaatcgtgagatcggtttcgccattggtatgcccgtgtgtgagttcgacatggtgaaggacccagaagtgcaggacttcaggcggaatatcctgaatgtatgtaaggaggccgttgatctgcgcgatctgaattcgccacacagtcgtgccatgtacgtgtatccacccaacgtggagtccagcccagagctcccaaaacatatttacaacaaattagataaaggacagatcatcgttgtgatttgggttatcgtgagtccaaacaatgataaacagaagtataccctcaagattaatcacgattgtgtgcctgagcaagtgatcgctgaggctatacgaaaaaagacacgcagcatgctgctcagttccgagcagctgaaactgtgtgtgctggaatatcagggaaagtatatactgaaagtgtgtggatgcgacgagtactttctggaaaagtatccacttagtcaatacaaatacatccggtcttgcattatgctgggacgaatgccaaatctgatgctaatggcaaaagagtccctgtactcccaactgccaatggactgctttaccatgccttcgtatagcagacgcatcagcacagcgaccccatacatgaacggagagacctccaccaagagtttgtgggtgataaatagcgcactcaggatcaagattttgtgtgcaacctacgtgaatgttaatatccgggacatcgataaaatctatgtacgtacgggaatctaccatggcggtgagcccctgtgcgataatgtcaatacccagagagtgccttgtagcaacccgaggtggaatgagtggctaaattacgatatatatatccccgatctccctagggcagcccgactttgtctttctatttgtagtgtaaaggggaggaagggggctaaggaggagcattgtccgctggcctggggaaatattaatttgttcgactatacagataccttagtcagtggcaaaatggccctgaatctttggcccgtgccccatggtctagaggatttgttgaacccaattggtgttaccgggtcaaatccgaacaaggaaactccatgcctggaactggaatttgactggtttagtagcgtcgtcaaattccctgacatgagtgtgatcgaggagcacgccaattggagcgtgtcacgagaggcaggcttcagctatagccatgcaggcctgtccaatagactcgcacgcgataacgaattacgtgagaatgacaaggaacagttgaaggctattagcactcgggatccattgtccgagatcactgagcaagagaaagacttcctgtggagccaccgtcattactgcgtcaccatccctgagatcttacctaagctgctcctatcggtgaagtggaactctcgggatgaggttgcacagatgtactgtctcgtcaaagattggccacccattaagcctgaacaagccatggagctgctggattgtaattatcccgacccgatggttcgcggattcgccgtgagatgcttggagaagtatttgacggatgacaagctctcccagtatctgatccaactagtgcaggtcctgaagtatgaacagtatctggataacctgcttgtgaggttcctactgaagaaggcccttaccaatcagagaattggacatttctttttctggcacttaaagtcggaaatgcataacaagacagtttcgcagcgtttcggactcctgcttgaaagctattgtcgcgcatgcggaatgtacctcaagcacttgaatcgacaggtagaagcaatggagaaacttatcaatttaaccgacatcttgaagcaagaaaaaaaagatgaaactcagaaggttcagatgaaattcctggttgagcagatgagacggccagacttcatggacgcccttcagggattcctatccccacttaacccggcacatcagcttggaaacctccggctggaggaatgccgcataatgagctcggctaagaggccgctgtggttaaattgggaaaacccggatatcatgagtgagctactgtttcagaacaacgaaatcattttcaaaaacggagacgatctgcggcaggacatgctcactctgcagattatccgcattatggagaatatctggcagaatcaaggattagatttgagaatgctgccctacggctgcctgagcattggcgattgcgttggtcttattgaagtggtcagaaactcccatacgattatgcagatccagtgcaagggcggactcaagggggcactgcagttcaattctcacaccctacaccagtggcttaaggacaagaacaagggcgaaatatatgacgctgcaatcgatctcttcacaaggtcttgcgctgggtattgtgtggcaaccttcattctcggaattggagatcgtcacaacagcaatatcatggtaaaagatgacgggcagctttttcacattgacttcgggcattttctggatcataagaagaagaaattcggctacaaacgcgagcgcgtccctttcgtgcttacgcaggatttcctgattgtcatctcaaaaggcgcacaagagtgtaccaaaacccgggaattcgagaggtttcaagaaatgtgctacaaggcctatctggctatccggcagcatgccaacctgttcataaacctgttcagtatgatgcttggtagcggtatgcccgaactacagagctttgacgacattgcgtatatccgcaaaactcttgccctcgataagacagaacaggaggctctggaatacttcatgaagcagatgaacgacgcacaccatggcggatggaccaccaagatggattggatcttccacactattaagcagcatgctctcaattag

SEQ ID NO: 162911 - DNA, 357 bp, Artificial Sequence
  derived and/or modified sequence
atgccacctaggccctcctccggggaattatggggtattcatctaatgccacctaggattcttgtggaatgtctgctcccaaatgggatgatcgtgactctcgagtgcctgagggaagcaacccttatcacaataaagcatgagctcttcaaggaggccagaaagtacccattgcatcagcttctgcaggatgagtcctcctatattttcgtgtccgtcacccaggaggccgaacgagaggagtttttcgacgaaactaggcgtctctgcgaccttcgtctgtttcagccctttctcaaggttatcgaacccgtgggtaatagagaggagaagatcctaaatcgggagatcgggtag

SEQ ID NO: 162912 - DNA, 66 bp, Artificial Sequence
  derived and/or modified sequence
atgcctccaagaccttcttccggagaactgtgggggattcatcttatgcctcccaggatcctgtag

SEQ ID NO: 162913 - DNA, 9093 bp, Artificial Sequence
  derived and/or modified sequence
tctccctcggcgccgccgccgccgcccgcggggctgggacccgatgcggttagagccgcggagcctggaagagccccgagcgtttctgctttgggacaaccatacatctaattccttaaagtagttttatatgtaaaacttgcaaagaatcagaacaatgcctccacgaccatcatcaggtgaactgtggggcatccacttgatgcccccaagaatcctagtagaatgtttactaccaaatggaatgatagtgactttagaatgcctccgtgaggctacattaataaccataaagcatgaactatttaaagaagcaagaaaataccccctccatcaacttcttcaagatgaatcttcttacattttcgtaagtgttactcaagaagcagaaagggaagaattttttgatgaaacaagacgactttgtgaccttcggctttttcaaccctttttaaaagtaattgaaccagtaggcaaccgtgaagaaaagatcctcaatcgagaaattggttttgctatcggcatgccagtgtgtgaatttgatatggttaaagatccagaagtacaggacttccgaagaaatattctgaacgtttgtaaagaagctgtggatcttagggacctcaattcacctcatagtagagcaatgtatgtctatcctccaaatgtagaatcttcaccagaattgccaaagcacatatataataaattagataaagggcaaataatagtggtgatctgggtaatagtttctccaaataatgacaagcagaagtatactctgaaaatcaaccatgactgtgtaccagaacaagtaattgctgaagcaatcaggaaaaaaactcgaagtatgttgctatcctctgaacaactaaaactctgtgttttagaatatcagggcaagtatattttaaaagtgtgtggatgtgatgaatacttcctagaaaaatatcctctgagtcagtataagtatataagaagctgtataatgcttgggaggatgcccaatttgatgttgatggctaaagaaagcctttattctcaactgccaatggactgttttacaatgccatcttattccagacgcatttccacagctacaccatatatgaatggagaaacatctacaaaatccctttgggttataaatagtgcactcagaataaaaattctttgtgcaacctacgtgaatgtaaatattcgagacattgataagatctatgttcgaacaggtatctaccatggaggagaacccttatgtgacaatgtgaacactcaaagagtaccttgttccaatcccaggtggaatgaatggctgaattatgatatatacattcctgatcttcctcgtgctgctcgactttgcctttccatttgctctgttaaaggccgaaagggtgctaaagaggaacactgtccattggcatggggaaatataaacttgtttgattacacagacactctagtatctggaaaaatggctttgaatctttggccagtacctcatggattagaagatttgctgaaccctattggtgttactggatcaaatccaaataaagaaactccatgcttagagttggagtttgactggttcagcagtgtggtaaagttcccagatatgtcagtgattgaagagcatgccaattggtctgtatcccgagaagcaggatttagctattcccacgcaggactgagtaacagactagctagagacaatgaattaagggaaaatgacaaagaacagctcaaagcaatttctacacgagatcctctctctgaaatcactgagcaggagaaagattttctatggagtcacagacactattgtgtaactatccccgaaattctacccaaattgcttctgtctgttaaatggaattctagagatgaagtagcccagatgtattgcttggtaaaagattggcctccaatcaaacctgaacaggctatggaacttctggactgtaattacccagatcctatggttcgaggttttgctgttcggtgcttggaaaaatatttaacagatgacaaactttctcagtatttaattcagctagtacaggtcctaaaatatgaacaatatttggataacttgcttgtgagatttttactgaagaaagcattgactaatcaaaggattgggcactttttcttttggcatttaaaatctgagatgcacaataaaacagttagccagaggtttggcctgcttttggagtcctattgtcgtgcatgtgggatgtatttgaagcacctgaataggcaagtcgaggcaatggaaaagctcattaacttaactgacattctcaaacaggagaagaaggatgaaacacaaaaggtacagatgaagtttttagttgagcaaatgaggcgaccagatttcatggatgctctacagggctttctgtctcctctaaaccctgctcatcaactaggaaacctcaggcttgaagagtgtcgaattatgtcctctgcaaaaaggccactgtggttgaattgggagaacccagacatcatgtcagagttactgtttcagaacaatgagatcatctttaaaaatggggatgatttacggcaagatatgctaacacttcaaattattcgtattatggaaaatatctggcaaaatcaaggtcttgatcttcgaatgttaccttatggttgtctgtcaatcggtgactgtgtgggacttattgaggtggtgcgaaattctcacactattatgcaaattcagtgcaaaggcggcttgaaaggtgcactgcagttcaacagccacacactacatcagtggctcaaagacaagaacaaaggagaaatatatgatgcagccattgacctgtttacacgttcatgtgctggatactgtgtagctaccttcattttgggaattggagatcgtcacaatagtaacatcatggtgaaagacgatggacaactgtttcatatagattttggacactttttggatcacaagaagaaaaaatttggttataaacgagaacgtgtgccatttgttttgacacaggatttcttaatagtgattagtaaaggagcccaagaatgcacaaagacaagagaatttgagaggtttcaggagatgtgttacaaggcttatctagctattcgacagcatgccaatctcttcataaatcttttctcaatgatgcttggctctggaatgccagaactacaatcttttgatgacattgcatacattcgaaagaccctagccttagataaaactgagcaagaggctttggagtatttcatgaaacaaatgaatgatgcacatcatggtggctggacaacaaaaatggattggatcttccacacaattaaacagcatgcattgaactgaaaagataactgagaaaatgaaagctcactctggattccacactgcactgttaataactctcagcaggcaaagaccgattgcataggaattgcacaatccatgaacagcattagaatttacagcaagaacagaaataaaatactatataatttaaataatgtaaacgcaaacagggtttgatagcacttaaactagttcatttcaaaattaagctttagaataatgcgcaatttcatgttatgccttaagtccaaaaaggtaaactttgaagattgtttgtatctttttttaaaaaacaaaacaaaacaaaaatccccaaaatatatagaaatgatggagaaggaaaaagtgatggttttttttgtcttgcaaatgttctatgttttgaaatgtggacacaacaaaggctgttattgcattaggtgtaagtaaactggagtttatgttaaattacattgattggaaaagaatgaaaatttcttatttttccattgctgttcaatttatagtttgaagtgggtttttgactgcttgtttaatgaagaaaaatgcttggggtggaagggactcttgagatttcaccagagactttttctttttaataaatcaaaccttttgatgatttgaggttttatctgcagttttggaagcagtcacaaatgagacctgttataaggtggtatttttttttttcttctggacagtatttaaaggatcttattcttatttcccagggaaattctgggctcccacaaagtaaaaaaaaaaaaaaatcatagaaaaagaatgagcaggaatagttcttattccagaattgtacagtattcaccttaagttgattttttttctccttctgcaattgaactgaatacatttttcatgcatgttttccagaaaatagaagtattaatgttattaaaaagattattttttttattaaaggctatttatattatagaaactatcattaatatatattctttatttacatgatctgtcccatagtcatgcattgttttgcaccccaaattttttattgttcatagcagcatggtcagctttcttcttgatctatagatgaggctcaggcactatcccatttataccaataaccagtgtataactacttaaggaaaacataaaaacttcatcttctttccttttatttcttatgtgaatctcccgtcttccattctcttttataattgagaatgtctcaatcatatgaaattagttaccagaattaacacaatttagactatcttcctgattccttaaacccctttactgaagtatactcatgaataatactttaaaatatgggggaatagaaaccatgaactttttacctttttaaactatttatccatatctccaaagtagaacattaaaccattttaagatatgtctcattcccaagtagtcagagctcactctccaactttattaaatactatttgagcacaggacacattcttaaacattttgaaaaacattaacccaagatgtagaggctactgctagtcgtcattctagaatctgatattttactctgtatttgaaatgaatgattaatgtcctaggaaattagctttagcagatgtccaggtgccacatcaaaaaagtgcaataattattgacagttttttagattaggcatattattggaaaacaactttataaagagtgaacattgtatactctagtaaaacagcatcactttaaaaatattcatttatgaaatctgttacctatagttgaagtcttgagtagtgaacaagggactctaataccaatactcttaatatctggctattttagatcccttaaagggcataattattggaaatttaggtatttcactaaagcatgtatataatattgccaacaagaaaagtaaatttgaagattaagggaacttacttctgcaaactgtcttgcgatagttaagcagaatttaaactctgttttaagcaggaaaccagaaagattattttgcagttgtagaagatttcataacttattaaaacttattaacattttgtgttgtttagatataggcagttgatacatactaacatcccagccttttcaatatcagggttaaattataggaaaactcagtaaaatggtacaaatctgaaagtttgatggtagaaactgaagatttaacagagaactgtgttttacccgagtgccaaaaatgctgtgagcctccttgcacaaaatttataccacttttgcatttttatctatcagtccagatagttgtctcccctccttctcccaggacctctccaccattaaaatgcacaaaccacatggccgatttcaccatttacatttattttcaaaagttactacaaccaaattaattctattagaagaaatgtagacaaattctataaagactatagattgtgacctaagaaagaaatgaggcaaagaaccaaacattgaattaaatgctacatgggtgactaagatctgtttcaagtcagtgataatatagccacttctgggtacttcagtatcagagatcagttctcgtggtttagacagttcctatctatagctgactatccttgtccttgaatatggtgtaactgactattggctctacagttttattgggccacttaagaaatatttccttgaataattattttgagaaaaagtctaaaagtaataaaaataattttaaacacactgtagtaagaaatgactgttggaaaattatgctttcactttctaccatattctcagctatacaaaaccatttattttgaagatttttagactactgttaatttgaaatctgttactcttattgtggaatttgtttttttaaaaaagatgtttctaattggatttttaaaagaagaatggaatttggttgctattttacaatagaacctaagctttttgtggttcttagtgtcctatgtaaaacttagtgtcaaagtaatcaactttgagattttcccttctattctgctttatattaaaagcccattagaaaatgggaacctggtgaatatataatgaattgtaaaatattttaatgtgtaactttttcaactgtgaaactgacttgattttttgatgaaaacagctgctgataaagtattttgtgtaaagtgtagttcttattaatcaggaaaatgatgacttgattagactgtatatgccctcttggattttattttaaatggattggtgactttcacataggtaaaacacagtccatctgtattcttttttccatcaaaaatcgagtgatttggaattataaaaaaattgtgagcagcctatttgaaaggcatcatggaaatttcacagcacaataacacggatttgttttttcttaatgatgtaaatccgtttaattcatactttgatcaatagcccatgcttgccaactctgaagaaatttaatttccagcagtattttaaagctagcctgttaactttttctgaatatttaaagttcctcttttttctatgtctgcacaaactgcagacctgggctggacccacatactcaagagtccaccttaagaaattattttgatgtccaagacatcactaaaatatttaagtttaaagataatatgtggtgttaatagattgtggtgcttttactatttaaagacaactttcatacttcagatgtttttgagaagaggggaatgtgaggggagggggcagaacagggaggagttgtttgaatgaattacattctttatatccatcctgctcatttggggcatgtctttaagagaaggctgaaagttgtgagagtatattgtataccgtaagagaatcaactcttcatcatggatgggattgtgaaggctgaactataaaattcagcattgacagcatcctcaattaataattcttggtgacagaataatacagctgggctgttttttaaaatataaacaataccatttttaattattacattaaaaattgtaaatatatctatgtgccatggcctgggaagcctgctttcttttttcataaaaattatttttactgtatgaaaagatcatggggtttagctcaaaatatctgtggtcctgataaaattggattggtaactctacctcagaaggaaaatgggaaaaaaaaatagatgagtcacaattcaatacttcaagctcagaaactgtgcagatcactgaattttagatttataaagtcagagttggcatgccttgtttttaatgatatggaagaccttaagaaaaaaacttggctgaagtttaatcgttggtccagccatttgaaaaaggcaatagtttgaggaggttcccgaattcggcatttgaaattcattttgttctctcttcttcattattagtgcatttggtgtgtgtatacttgcacacaattctgtttgtgtacacactgcttgcttagccctagtcaagaggcatcttttataaaaggtgtaaagaaatatcaaggttctaaaattcggaagagtttagaatttattaggagtttcccaagttgggatgttagtctttaaataaacttcatgcacctattccacttaaggttttgcacctcctttttattagtgcagtgccatttcttctgcttgattttaggtatgttaatattccagccttgctagttagcataaagtgacaggtgtgagccatgaggaaattttctgacttaatttgtacacaactacatataagagttttagtggaggaaaaaaattagtcccttgtgcgtatacagtagttaggtaaatgatttttctaccaacagtatactccattcctcatgtaggtaagtacagaaaaggtttttaaatgtatttttttagccagttaaagtctatgaatctatctgcaaccttatttaatctgtcactataataattttgtggttatgctaagaaccatgtatacttttaggtattcttatttttgtcaatttttctaggttggcaaggaggcagaaaaccttcattgtttcatattaaaatataattagactaaacttaattctagtatgaatttccaaaatcattatctatttatttcatttttatttaattttgtttttatttcatttttaaaagtcccttgttcaatttaacttatgttcctaagagaggttggagaacttggccttcatctgatttcaaaaatgttttgagtttcaaatgaagttaatggtttcagtgtgattcagtcctcagacctaattgggttgaataaaatctaaaagaatatacccttttggagcataacattttaataccttggggaatgtggcactaccaaaagaagactactaacacgtcagatgttcacctggaagctttatcaagaaattcgaaccacccttttggccccattaattgtagcaagtttatttctctatattttgtcattcagtgaattgaagtcctgtggtatactgcattcattagaagaaaaacgtttttaatgtccttttaatgatggcccagaaagcatttgacacagcaagatgcatgtgttactatattgagaatatagaataataacagtatcactaaatttaagacctcttcccagtcttgctgttcctagcaagaagtttggcctgtgactgcacttactgtttatgctcatcagaaactgtcaatgtctgcttttctttaactctgcagtctgtaacatcacgctgtttattaaaaaaaaaaagaaaaatta

SEQ ID NO: 162914 - DNA, 620 bp, Artificial Sequence
  derived and/or modified sequence
ggagcgcaacaagagggtctttctagaaaacagtctgcatattctttaatgaattagagttgtgatttcatcttggtgaagcttcctcattccagcactgcgcctttgtgcacatgcaggacctgggttttcggaacgatgttttgaatcatagtttgtgtggccggggagaaccccttagaatacttgggtttctgctttgggacaaccatacatctaattccttaaagtagttttatatgtaaaacttgcaaagaatcagaacaatgcctccacgaccatcatcaggtgaactgtggggcatccacttgatgcccccaagaatcctagtagaatgtttactaccaaatggaatgatagtgactttagaatgcctccgtgaggctacattaataaccataaagcatgaactatttaaagaagcaagaaaataccccctccatcaacttcttcaagatgaatcttcttacattttcgtaagtgttactcaagaagcagaaagggaagaattttttgatgaaacaagacgactttgtgaccttcggctttttcaaccctttttaaaagtaattgaaccagtaggcaaccgtgaagaaaagatcctcaatcgagaaattggt

SEQ ID NO: 162915 - DNA, 245 bp, Artificial Sequence
  derived and/or modified sequence
ttccgggggattgtaggctctgcccctcctcagctcttaccctcttctgccggaggagggggggggccgagggggtggggaagagttcgttgtttgtttacacgatgtttctgctttgggacaaccatacatctaattccttaaagtagttttatatgtaaaacttgcaaagaatcagaacaatgcctccacgaccatcatcaggtgaactgtggggcatccacttgatgcccccaagaatccta

SEQ ID NO: 162916 - protein, 1070 aa, Artificial Sequence
  derived and/or modified sequence
MCFSFIMPPAMADILDIWAVDSQIASDGSIPVDFLLPTGIYIQLEVPREATISYIKQMLWKQVHNYPMFNLLMDIDSYMFACVNQTAVYEELEDETRRLCDVRPFLPVLKLVTRSCDPGEKLDSKIGVLIGKGLHEFDSLKDPEVNEFRRKMRKFSEEKILSLVGLSWMDWLKQTYPPEHEPSIPENLEDKLYGGKLIVAVHFENCQDVFSFQVSPNMNPIKVNELAIQKRLTIHGKEDEVSPYDYVLQVSGRVEYVFGDHPLIQFQYIRNCVMNRALPHFILVECCKIKKMYEQEMIAIEAAINRNSSNLPLPLPPKKTRIISHVWENNNPFQIVLVKGNKLNTEETVKVHVRAGLFHGTELLCKTIVSSEVSGKNDHIWNEPLEFDINICDLPRMARLCFAVYAVLDKVKTKKSTKTINPSKYQTIRKAGKVHYPVAWVNTMVFDFKGQLRTGDIILHSWSSFPDELEEMLNPMGTVQTNPYTENATALHVKFPENKKQPYYYPPFDKIIEKAAEIASSDSANVSSRGGKKFLPVLKEILDRDPLSQLCENEMDLIWTLRQDCREIFPQSLPKLLLSIKWNKLEDVAQLQALLQIWPKLPPREALELLDFNYPDQYVREYAVGCLRQMSDEELSQYLLQLVQVLKYEPFLDCALSRFLLERALGNRRIGQFLFWHLRSEVHIPAVSVQFGVILEAYCRGSVGHMKVLSKQVEALNKLKTLNSLIKLNAVKLNRAKGKEAMHTCLKQSAYREALSDLQSPLNPCVILSELYVEKCKYMDSKMKPLWLVYNNKVFGEDSVGVIFKNGDDLRQDMLTLQMLRLMDLLWKEAGLDLRMLPYGCLATGDRSGLIEVVSTSETIADIQLNSSNVAAAAAFNKDALLNWLKEYNSGDDLDRAIEEFTLSCAGYCVASYVLGIGDRHSDNIMVKKTGQLFHIDFGHILGNFKSKFGIKRERVPFILTYDFIHVIQQGKTGNTEKFGRFRQCCEDAYLILRRHGNLFITLFALMLTAGLPELTSVKDIQYLKDSLALGKSEEEALKQFKQKFDEALRESWTTKVNWMAHTVRKDYRS

SEQ ID NO: 162917 - protein, 100 aa, Artificial Sequence
  derived and/or modified sequence
MCFSFIMPPAMADILDIWAVDSQIASDGSIPVDFLLPTGIYIQLEVPREATISYIKQMLWKQVHNYPMFNLLMDIDSYMFACVNQTAVYEELEDETRRLC

SEQ ID NO: 162918 - protein, 56 aa, Artificial Sequence
  derived and/or modified sequence
MCFSFIMPPAMADILDIWAVDSQIASDGSIPVDFLLPTGIYIQLEVPREATISYIK

SEQ ID NO: 162919 - protein, 131 aa, Artificial Sequence
  derived and/or modified sequence
MCFSFIMPPAMADILDIWAVDSQIASDGSIPVDFLLPTGIYIQLEVPREATISYIKQMLWKQVHNYPMFNLLMDIDSYMFACVNQTAVYEELEDETRRLCDVRPFLPVLKLVTRSCDPGEKLDSKIGVLIG

SEQ ID NO: 162920 - protein, 521 aa, Artificial Sequence
  derived and/or modified sequence
MDLIWTLRQDCREIFPQSLPKLLLSIKWNKLEDVAQLQALLQIWPKLPPREALELLDFNYPDQYVREYAVGCLRQMSDEELSQYLLQLVQVLKYEPFLDCALSRFLLERALGNRRIGQFLFWHLRSEVHIPAVSVQFGVILEAYCRGSVGHMKVLSKQVEALNKLKTLNSLIKLNAVKLNRAKGKEAMHTCLKQSAYREALSDLQSPLNPCVILSELYVEKCKYMDSKMKPLWLVYNNKVFGEDSVGVIFKNGDVCFPLDLRQDMLTLQMLRLMDLLWKEAGLDLRMLPYGCLATGDRSGLIEVVSTSETIADIQLNSSNVAAAAAFNKDALLNWLKEYNSGDDLDRAIEEFTLSCAGYCVASYVLGIGDRHSDNIMVKKTGQLFHIDFGHILGNFKSKFGIKRERVPFILTYDFIHVIQQGKTGNTEKFGRFRQCCEDAYLILRRHGNLFITLFALMLTAGLPELTSVKDIQYLKDSLALGKSEEEALKQFKQKFDEALRESWTTKVNWMAHTVRKDYRS

SEQ ID NO: 162921 - DNA, 3213 bp, Artificial Sequence
  derived and/or modified sequence
atgtgcttcagcttcatcatgccccccgccatggccgacatcctggacatctgggccgtggacagccagatcgccagcgacggcagcatccccgtggacttcctgctgcccaccggcatctacatccagctggaggtgcccagagaggccaccatcagctacatcaagcagatgctgtggaagcaggtgcacaactaccccatgttcaacctgctgatggacatcgacagctacatgttcgcctgcgtgaaccagaccgccgtgtacgaggagctggaggacgagaccagaagactgtgcgacgtgagacccttcctgcccgtgctgaagctggtgaccagaagctgcgaccccggcgagaagctggacagcaagatcggcgtgctgatcggcaagggcctgcacgagttcgacagcctgaaggaccccgaggtgaacgagttcagaagaaagatgagaaagttcagcgaggagaagatcctgagcctggtgggcctgagctggatggactggctgaagcagacctacccccccgagcacgagcccagcatccccgagaacctggaggacaagctgtacggcggcaagctgatcgtggccgtgcacttcgagaactgccaggacgtgttcagcttccaggtgagccccaacatgaaccccatcaaggtgaacgagctggccatccagaagagactgaccatccacggcaaggaggacgaggtgagcccctacgactacgtgctgcaggtgagcggcagagtggagtacgtgttcggcgaccaccccctgatccagttccagtacatcagaaactgcgtgatgaacagagccctgccccacttcatcctggtggagtgctgcaagatcaagaagatgtacgagcaggagatgatcgccatcgaggccgccatcaacagaaacagcagcaacctgcccctgcccctgccccccaagaagaccagaatcatcagccacgtgtgggagaacaacaaccccttccagatcgtgctggtgaagggcaacaagctgaacaccgaggagaccgtgaaggtgcacgtgagagccggcctgttccacggcaccgagctgctgtgcaagaccatcgtgagcagcgaggtgagcggcaagaacgaccacatctggaacgagcccctggagttcgacatcaacatctgcgacctgcccagaatggccagactgtgcttcgccgtgtacgccgtgctggacaaggtgaagaccaagaagagcaccaagaccatcaaccccagcaagtaccagaccatcagaaaggccggcaaggtgcactaccccgtggcctgggtgaacaccatggtgttcgacttcaagggccagctgagaaccggcgacatcatcctgcacagctggagcagcttccccgacgagctggaggagatgctgaaccccatgggcaccgtgcagaccaacccctacaccgagaacgccaccgccctgcacgtgaagttccccgagaacaagaagcagccctactactacccccccttcgacaagatcatcgagaaggccgccgagatcgccagcagcgacagcgccaacgtgagcagcagaggcggcaagaagttcctgcccgtgctgaaggagatcctggacagagaccccctgagccagctgtgcgagaacgagatggacctgatctggaccctgagacaggactgcagagagatcttcccccagagcctgcccaagctgctgctgagcatcaagtggaacaagctggaggacgtggcccagctgcaggccctgctgcagatctggcccaagctgccccccagagaggccctggagctgctggacttcaactaccccgaccagtacgtgagagagtacgccgtgggctgcctgagacagatgagcgacgaggagctgagccagtacctgctgcagctggtgcaggtgctgaagtacgagcccttcctggactgcgccctgagcagattcctgctggagagagccctgggcaacagaagaatcggccagttcctgttctggcacctgagaagcgaggtgcacatccccgccgtgagcgtgcagttcggcgtgatcctggaggcctactgcagaggcagcgtgggccacatgaaggtgctgagcaagcaggtggaggccctgaacaagctgaagaccctgaacagcctgatcaagctgaacgccgtgaagctgaacagagccaagggcaaggaggccatgcacacctgcctgaagcagagcgcctacagagaggccctgagcgacctgcagagccccctgaacccctgcgtgatcctgagcgagctgtacgtggagaagtgcaagtacatggacagcaagatgaagcccctgtggctggtgtacaacaacaaggtgttcggcgaggacagcgtgggcgtgatcttcaagaacggcgacgacctgagacaggacatgctgaccctgcagatgctgagactgatggacctgctgtggaaggaggccggcctggacctgagaatgctgccctacggctgcctggccaccggcgacagaagcggcctgatcgaggtggtgagcaccagcgagaccatcgccgacatccagctgaacagcagcaacgtggccgccgccgccgccttcaacaaggacgccctgctgaactggctgaaggagtacaacagcggcgacgacctggacagagccatcgaggagttcaccctgagctgcgccggctactgcgtggccagctacgtgctgggcatcggcgacagacacagcgacaacatcatggtgaagaagaccggccagctgttccacatcgacttcggccacatcctgggcaacttcaagagcaagttcggcatcaagagagagagagtgcccttcatcctgacctacgacttcatccacgtgatccagcagggcaagaccggcaacaccgagaagttcggcagattcagacagtgctgcgaggacgcctacctgatcctgagaagacacggcaacctgttcatcaccctgttcgccctgatgctgaccgccggcctgcccgagctgaccagcgtgaaggacatccagtacctgaaggacagcctggccctgggcaagagcgaggaggaggccctgaagcagttcaagcagaagttcgacgaggccctgagagagagctggaccaccaaggtgaactggatggcccacaccgtgagaaaggactacagaagctag

SEQ ID NO: 162922 - DNA, 303 bp, Artificial Sequence
  derived and/or modified sequence
atgtgcttcagcttcatcatgccccccgccatggccgacatcctggacatctgggccgtggacagccagatcgccagcgacggcagcatccccgtggacttcctgctgcccaccggcatctacatccagctggaggtgcccagagaggccaccatcagctacatcaagcagatgctgtggaagcaggtgcacaactaccccatgttcaacctgctgatggacatcgacagctacatgttcgcctgcgtgaaccagaccgccgtgtacgaggagctggaggacgagaccagaagactgtgctag

SEQ ID NO: 162923 - DNA, 171 bp, Artificial Sequence
  derived and/or modified sequence
atgtgcttcagcttcatcatgccccccgccatggccgacatcctggacatctgggccgtggacagccagatcgccagcgacggcagcatccccgtggacttcctgctgcccaccggcatctacatccagctggaggtgcccagagaggccaccatcagctacatcaagtag

SEQ ID NO: 162924 - DNA, 396 bp, Artificial Sequence
  derived and/or modified sequence
atgtgcttcagcttcatcatgccccccgccatggccgacatcctggacatctgggccgtggacagccagatcgccagcgacggcagcatccccgtggacttcctgctgcccaccggcatctacatccagctggaggtgcccagagaggccaccatcagctacatcaagcagatgctgtggaagcaggtgcacaactaccccatgttcaacctgctgatggacatcgacagctacatgttcgcctgcgtgaaccagaccgccgtgtacgaggagctggaggacgagaccagaagactgtgcgacgtgagacccttcctgcccgtgctgaagctggtgaccagaagctgcgaccccggcgagaagctggacagcaagatcggcgtgctgatcggctag

SEQ ID NO: 162925 - DNA, 1566 bp, Artificial Sequence
  derived and/or modified sequence
atggacctgatctggaccctgagacaggactgcagagagatcttcccccagagcctgcccaagctgctgctgagcatcaagtggaacaagctggaggacgtggcccagctgcaggccctgctgcagatctggcccaagctgccccccagagaggccctggagctgctggacttcaactaccccgaccagtacgtgagagagtacgccgtgggctgcctgagacagatgagcgacgaggagctgagccagtacctgctgcagctggtgcaggtgctgaagtacgagcccttcctggactgcgccctgagcagattcctgctggagagagccctgggcaacagaagaatcggccagttcctgttctggcacctgagaagcgaggtgcacatccccgccgtgagcgtgcagttcggcgtgatcctggaggcctactgcagaggcagcgtgggccacatgaaggtgctgagcaagcaggtggaggccctgaacaagctgaagaccctgaacagcctgatcaagctgaacgccgtgaagctgaacagagccaagggcaaggaggccatgcacacctgcctgaagcagagcgcctacagagaggccctgagcgacctgcagagccccctgaacccctgcgtgatcctgagcgagctgtacgtggagaagtgcaagtacatggacagcaagatgaagcccctgtggctggtgtacaacaacaaggtgttcggcgaggacagcgtgggcgtgatcttcaagaacggcgacgtgtgcttccccctggacctgagacaggacatgctgaccctgcagatgctgagactgatggacctgctgtggaaggaggccggcctggacctgagaatgctgccctacggctgcctggccaccggcgacagaagcggcctgatcgaggtggtgagcaccagcgagaccatcgccgacatccagctgaacagcagcaacgtggccgccgccgccgccttcaacaaggacgccctgctgaactggctgaaggagtacaacagcggcgacgacctggacagagccatcgaggagttcaccctgagctgcgccggctactgcgtggccagctacgtgctgggcatcggcgacagacacagcgacaacatcatggtgaagaagaccggccagctgttccacatcgacttcggccacatcctgggcaacttcaagagcaagttcggcatcaagagagagagagtgcccttcatcctgacctacgacttcatccacgtgatccagcagggcaagaccggcaacaccgagaagttcggcagattcagacagtgctgcgaggacgcctacctgatcctgagaagacacggcaacctgttcatcaccctgttcgccctgatgctgaccgccggcctgcccgagctgaccagcgtgaaggacatccagtacctgaaggacagcctggccctgggcaagagcgaggaggaggccctgaagcagttcaagcagaagttcgacgaggccctgagagagagctggaccaccaaggtgaactggatggcccacaccgtgagaaaggactacagaagctag

SEQ ID NO: 162926 - DNA, 3213 bp, Artificial Sequence
  derived and/or modified sequence
atgtgcttttcctttattatgccccctgcaatggccgacattttggatatttgggcagtcgattctcagatcgcatccgacgggagtatacccgtggatttcctgttgcccaccggtatttatattcaattagaggttccccgcgaggccaccatttcttacatcaagcagatgctgtggaaacaggtgcacaattatccaatgttcaacctcctgatggacattgatagttatatgttcgcatgtgtcaaccagactgccgtgtatgaggagttggaagatgagaccaggaggttgtgtgacgtcaggcccttcctgccagttcttaagctggtaactcgctcgtgcgatcccggtgaaaagctggacagcaaaatcggagtcctgatcgggaagggactgcacgaatttgactctctgaaggatccggaggttaatgagtttcgccgtaagatgcgcaaatttagcgaagaaaaaattctgtcccttgtgggcctttcttggatggattggctcaaacagacttatcctcccgagcacgaaccgtccatccccgagaatctggaggataaattgtatggcgggaagctgatcgtcgccgtgcactttgagaattgtcaggacgtgttctcttttcaggtaagccccaatatgaatcccattaaagtgaacgaactggccatccagaagcgactgaccattcatggaaaagaggatgaggtgagcccatatgactacgtccttcaggtatctggtcgtgtagagtatgtgtttggggatcatcctctcatccagtttcagtacattcggaactgtgtcatgaaccgggcactgcctcatttcattctggtcgagtgttgtaagatcaagaaaatgtatgaacaggaaatgattgctattgaggccgctatcaacagaaacagtagcaacctgcccttgccactccctccaaagaagaccagaattatctcacatgtctgggaaaacaataatcctttccagatcgtattggtgaagggtaacaaattgaacactgaagaaacggtgaaggtgcatgtccgcgcagggctgtttcatggtaccgagttactctgtaagaccattgtgtcctcggaagtctccgggaagaatgaccatatctggaatgaaccactggagttcgacatcaacatttgtgatctgccccgcatggcccgtctgtgttttgcggtatatgcggtactggataaagtgaaaaccaagaaaagcaccaagaccatcaatccctccaagtatcagacgatcagaaaagcaggaaaggtgcattaccccgtggcttgggtgaacacaatggttttcgattttaaagggcagctccggaccggggacattatactgcatagctggagcagcttcccggacgaactggaggaaatgctgaaccctatgggaactgttcagactaatccctacacagagaatgccacggcgcttcatgtgaaatttcccgagaataagaaacagccttactactacccgccattcgacaaaatcattgagaaagctgccgaaattgcaagcagtgactcagctaacgtttcgagcaggggaggtaagaaatttctgcccgtcctgaaggagattcttgatcgcgaccctctatcacagttatgtgagaacgagatggatctcatctggactctgcgccaagactgccgggagattttcccacagtccctgcccaaattgctgctgtcaatcaaatggaacaagttggaagacgtcgcccagttgcaggccctgctacagatatggcccaagctcccccccagagaggcgcttgaattactggatttcaactatcccgatcaatatgtgcgggagtatgcagtgggctgtttaaggcagatgtcggatgaagagctgagtcagtacttacttcaacttgttcaggtgttgaagtacgaacctttcctggactgcgctctctctcgctttctgctggaacgcgccctagggaatcggcgcatcggtcagttcttgttttggcacctgcggtccgaagtgcatatccccgccgtaagcgtccagttcggtgtgatccttgaggcatactgcagggggtctgtcggccatatgaaggtgctctctaagcaggttgaggcactgaacaagctgaaaacacttaatagtctaataaagttgaatgccgttaaacttaatcgggcaaaaggcaaggaggccatgcacacctgcctgaaacagtccgcgtaccgggaggcactgtctgacctgcagtctcccctgaatccatgtgttattctgtctgaactgtacgtggagaaatgtaagtatatggactccaaaatgaagcccctgtggttagtatacaacaacaaggtgttcggggaagacagtgtgggagtgatctttaaaaacggagatgatttgagacaggatatgctaacacttcagatgctgagactaatggatctgttgtggaaggaggcgggactcgacttgagaatgctgccttatgggtgccttgcgacaggagacaggagcggtcttattgaggttgtgagcacaagcgagactatcgcagacattcagctgaactccagcaatgtggccgccgccgctgcattcaataaggatgctctcctaaattggctgaaggagtacaactccggagacgatctggacagggccattgaagaattcacgttatcttgtgcaggatattgtgtcgcctcctatgtcctggggattggggacagacattctgataacattatggtaaagaagacaggccagctctttcacatcgatttcggccacattctgggcaactttaagtcgaagtttggaatcaagcgtgagcgggtgccgtttattctgacctatgactttattcacgtgatccaacagggaaaaactgggaataccgagaaatttggcagattccgccagtgttgtgaagacgcctatctgattctcagacggcatggcaacttgttcatcactctcttcgccctcatgctcacagcaggtctacctgagctgactagcgtgaaggatatccagtacctgaaagactcactcgcactggggaaaagtgaagaggaggccttaaagcagttcaaacagaagtttgacgaagccttgcgagagtcgtggaccacaaaggtaaactggatggctcatacagtgcgcaaagactatcgctcttag

SEQ ID NO: 162927 - DNA, 303 bp, Artificial Sequence
  derived and/or modified sequence
atgtgctttagttttattatgccccccgctatggcagacatattggatatctgggctgtcgattcccagatcgccagcgatgggtctatccccgtggattttctgctccctactgggatctatattcagctggaggtcccccgagaagcgaccatctcatacatcaagcagatgctatggaagcaggtgcacaactatccgatgttcaatttattaatggacattgacagctacatgttcgcttgcgtgaatcagactgccgtttacgaggagctcgaggacgaaacacgacgactgtgctag

SEQ ID NO: 162928 - DNA, 171 bp, Artificial Sequence
  derived and/or modified sequence
atgtgctttagttttatcatgccacccgccatggcagacatcctggacatctgggcggttgactctcagattgcaagcgacggatccatccctgttgattttttgctgcctactggcatttatatccagctggaagtgccaagagaagcaactatttcttacatcaaatag

SEQ ID NO: 162929 - DNA, 3213 bp, Artificial Sequence
  derived and/or modified sequence
atgtgctttagcttcattatgcccccggcgatggcagatatcctggacatctgggccgtagactctcagatcgcctcggatggaagtatccctgtggactttctcctccccactggcatctatattcaactcgaagtgccacgcgaagctaccattagctatatcaagcagatgctctggaaacaggtgcataattaccccatgtttaacctgctcatggacatcgactcttacatgttcgcttgtgtgaaccagacggccgtgtatgaggagttggaagacgagaccagacgcttgtgcgatgtaagacctttcctgcccgtgttgaagctcgtgaccagatcttgcgaccccggcgagaagcttgattcaaagatcggggtgctgatcggtaaggggctccacgaatttgatagcctcaaggaccctgaagtgaatgagtttagacgcaagatgaggaagtttagtgaggaaaagatcttatccttggttggcctgtcttggatggactggctaaaacaaacttatccgccagaacacgagccctctatcccagagaacctggaagacaagctctatggagggaaactcatcgtggctgtgcactttgaaaactgtcaagacgtttttagtttccaagtttcacctaacatgaaccccattaaggtcaatgaactggccattcaaaaacgactgacaatccatggaaaggaggatgaggtgtccccttatgactacgtgttgcaggtgtccggacgggttgagtacgtttttggcgaccaccctctgatccagtttcagtacatccgcaattgtgtgatgaatcgggctctgcctcatttcatcctcgttgagtgctgtaagattaagaaaatgtatgagcaagagatgattgccattgaggccgctatcaaccggaactccagtaacctccctctgcctctgccccccaaaaaaacacggattatctcccacgtgtgggagaacaataatcccttccagatcgtgcttgttaaggggaataagcttaatactgaggagacggtcaaagtacacgtaagggccgggctctttcacggcactgagctcctttgcaagacgatcgtctccagtgaagtctctggtaaaaacgaccacatttggaatgagcccctggaattcgacatcaatatctgcgacctcccgagaatggcacgcctttgtttcgctgtgtacgctgttcttgacaaggtgaaaaccaagaagtcaacaaagacaattaatccctcaaaataccagacaatccgaaaggcgggcaaagtgcattaccccgtggcatgggttaacaccatggtctttgatttcaaggggcagcttcggaccggagatataatcttgcattcctggagcagttttcccgatgagcttgaagaaatgctcaatcctatgggtacggtgcagactaatccatatacggagaatgccacagcactgcacgtgaagtttccagagaacaagaagcagccgtactattaccctcccttcgacaagattatcgagaaggcggctgaaatagccagtagcgactccgctaacgtctcatctcgtggcggcaaaaagttcctgcctgtgcttaaggagatcttggatcgggacccactgtcccagctctgcgagaacgagatggacctaatctggaccttaagacaggattgtagagagattttccctcagagcctgcccaagctgctgcttagtattaaatggaataaactcgaggacgtcgcgcagctgcaggctttgctgcagatctggcctaagctgccccctcgtgaggccctcgagctgctcgatttcaactatcctgaccaatatgtgcgggaatatgcagttgggtgtcttagacagatgagcgatgaagaactgagccagtaccttctgcagctggtgcaagtccttaagtatgagcccttcttagactgtgcgctatctcgttttctgctggagagggccttaggcaatagaagaatcgggcagttcctgttttggcacctcagatcagaggttcatatccctgccgtgtccgtacaatttggcgtgattctggaagcctattgccgtggctctgtaggccatatgaaagttctaagtaagcaggtggaggcattaaataagcttaagaccctgaattctttgatcaagctgaacgcagtaaaactgaaccgcgcaaagggcaaagaagctatgcacacttgccttaagcaaagtgcctatagagaggcactgagcgacttgcagagtcccttgaatccttgcgtgatactgtctgagctatatgtggagaagtgcaaatacatggactccaaaatgaagccattgtggttagtatacaataacaaagtgttcggagaggatagtgtgggcgtaatcttcaagaacggtgacgatctacgtcaggacatgctcacactgcagatgctgcggttaatggatctattgtggaaggaggcaggactagatctccggatgctgccttatggttgcctggctactggcgacaggagtggccttatagaggtcgtcagcacctccgaaaccattgctgacatccagctaaacagtagtaacgtggccgctgctgccgccttcaacaaagatgctttgctgaattggctgaaggagtacaacagcggtgacgatctggatcgtgctattgaggaattcacgctgtcatgcgccggctactgcgtcgcatcatacgtcctgggcatcggagatcgccactctgacaacattatggtgaaaaaaaccgggcaactgttccatattgattttggacacatccttggaaacttcaagtccaagtttggcattaagagggagcgggtcccttttatcctaacctatgattttattcacgtcatccagcagggcaagacgggcaatacagagaaatttggcagattccggcaatgctgtgaagatgcttacttgatcctccggaggcacggaaacctcttcatcacgcttttcgccctaatgctgacagccggacttcccgaactcactagcgtcaaggacatccaatacttaaaagattccctcgccctgggaaagtctgaagaagaagccctcaaacagtttaagcagaaatttgatgaggcacttagggaatcctggactactaaggtgaactggatggcacacacagtcaggaaagactatagatcatag

SEQ ID NO: 162930 - DNA, 396 bp, Artificial Sequence
  derived and/or modified sequence
atgtgttttagctttattatgccccccgccatggcggatatcctcgacatctgggccgtcgactctcagattgcttcagatggcagcatcccagtcgacttccttctacctacaggaatttacattcagctggaggtgccccgcgaggcaacaatcagctacattaaacagatgctgtggaagcaggtccataattatcccatgtttaatctgctgatggacatagattcatacatgttcgcttgtgttaatcagactgctgtgtatgaggagctagaggacgaaacccgacggctgtgtgacgtgcggccatttcttcctgtgctaaaattggtgactagaagctgtgaccccggagaaaagttggattcaaagatcggagttctgataggttag

SEQ ID NO: 162931 - DNA, 1566 bp, Artificial Sequence
  derived and/or modified sequence
atggatttaatctggaccttgagacaggattgccgtgaaatctttcctcaatctttgcctaagttgttattgagtattaagtggaacaaactggaggatgttgcccaacttcaagccctcctgcaaatttggcccaaactgccacccagggaagcgctggaacttctagacttcaattacccagaccagtacgtgagggagtatgcagtcggatgcttgaggcagatgtccgacgaagagctgagccagtatttgctccagctcgtccaggttctcaagtatgaacctttcctcgattgtgctttgagcagattcttattggaaagagctctcggaaatcgtcgaatcggtcagtttctcttctggcacctgaggtccgaggttcatattcccgctgtgagtgtgcaatttggcgtgattttggaagcttattgcaggggcagtgtgggccacatgaaggtcctatctaaacaagtggaggcattgaataagctgaagactctgaacagtttgatcaagctgaacgccgttaagttgaatagggctaagggcaaagaggccatgcatacatgcctgaagcagagtgcttaccgcgaggctttatccgatttacagagccccctgaacccttgcgttattcttagtgagctgtatgtggagaagtgcaaatacatggacagcaagatgaaaccattgtggctggtctataacaacaaggtttttggggaagattcagtgggggtgatcttcaaaaatggagacgtatgctttcccctagatctgcgccaggatatgctgaccctgcagatgttgcggcttatggacctcctatggaaggaggcaggcctggatcttagaatgttgccatacggctgcctcgctactggggatcggagtggtctcatcgaagtggtgtctacctctgagacaatcgcggacattcagctgaacagcagtaatgtggccgcagctgcagctttcaataaagatgcccttctgaattggctcaaggagtacaactcgggggacgacctggacagggcaatcgaggagtttactctgtcctgtgccggctattgtgtggcttcatatgtgctgggcattggggatcgacattccgataacataatggtgaaaaagacagggcagctgttccacatcgacttcggacacattttgggtaacttcaaatctaagtttggtataaagagagagagggttccgtttattctgacctacgattttatccacgtgattcaacaaggaaaaacagggaacaccgagaagtttggccgttttcgccagtgttgtgaagatgcttacctgatactaagacgccacggcaatctgtttataaccctcttcgccctcatgcttacagctggtctgccagagctcactagcgtcaaggacattcaatacttgaaggactctctcgcactggggaagagtgaagaggaggcactgaagcagttcaagcagaaattcgatgaggcactgcgtgagtcgtggaccacaaaggtcaactggatggctcatacagtgcgaaaagactacaggtcctag

SEQ ID NO: 162932 - DNA, 3213 bp, Artificial Sequence
  derived and/or modified sequence
atgtgcttctccttcatcatgcccccagccatggctgacatcctggacatctgggccgtggacagccagatcgccagtgatggcagcatccctgtggacttcctgctgcccaccggcatctacatccagctggaggtgccccgggaggccaccatctcctacatcaagcagatgctgtggaagcaggtgcacaactaccccatgttcaacctgctgatggacatcgacagctacatgtttgcctgtgtgaaccagacagctgtgtatgaggagctggaggatgagacccggcggctgtgtgatgtgcggcccttcctgcctgtgctgaagctggtgaccaggagctgtgaccccggggagaagctggacagcaagattggagtgctgattggcaagggcctgcatgaatttgacagcctgaaggaccctgaggtgaatgagttccggaggaagatgaggaagttcagcgaggagaagatcctgagcctggtgggcctgtcctggatggactggctgaagcagacctacccacctgagcacgagcccagcatccctgagaacctggaggacaagctgtatggaggcaagctgattgtggccgtgcactttgagaactgccaggatgtgttctccttccaggtgagccccaacatgaaccccatcaaggtgaatgagctggccatccagaagaggctgaccatccacggcaaggaggatgaggtgagcccctatgactatgtgctgcaggtgtctggccgggtggagtatgtgtttggagaccaccccctcatccagttccagtacatccggaactgtgtgatgaacagagccctgccccacttcatcctggtggagtgctgcaagatcaagaagatgtatgagcaggagatgattgccatcgaggccgccatcaacagaaacagcagcaacctgcccctgcccctgccccccaagaagacccgcatcatcagccacgtgtgggagaacaacaaccccttccagatcgtgctggtgaagggcaacaagctgaacacagaggagaccgtgaaggtgcacgtgcgggccggcctcttccatggaacagagctgctgtgcaagaccatcgtgtcctctgaggtgtctgggaagaatgaccacatctggaatgagcccctggagtttgacatcaacatctgtgacctgcccaggatggcccggctgtgctttgctgtgtatgctgtgctggacaaggtgaagaccaagaagagcaccaagaccatcaaccccagcaagtaccagaccatcaggaaggccggcaaggtgcactaccctgtggcctgggtgaacaccatggtgtttgacttcaagggccagctgaggactggagacatcatcctgcacagctggagcagcttcccagatgagctggaggagatgctgaaccccatgggcaccgtgcagaccaacccctacacagaaaatgccacagccctgcacgtgaagtttcctgagaacaagaagcagccctactactaccccccatttgacaagatcatcgagaaggctgctgagatcgccagcagtgacagcgccaacgtgagcagccggggcggcaagaagttcctgcctgtgctgaaggagatcctggaccgggaccccctgagccagctgtgtgaaaatgagatggacctgatctggaccctgcggcaggactgccgggagatcttcccccagagcctgcccaagctgctgctgagcatcaagtggaacaagctggaggatgtggcccagctgcaggccctgctgcagatctggcccaagctgcccccccgggaggccctggagctgctggacttcaactacccagaccagtatgtgcgggagtatgctgtgggctgcctgcggcagatgtctgatgaggagctgagccagtacctgctgcagctggtgcaggtgctgaagtatgagcccttcctggactgtgccctgagccgcttcctgctggagcgggccctgggcaacagacgcatcggccagttcctgttctggcacctgcggtctgaggtgcacatcccagctgtgtctgtgcagtttggagtcatcctggaggcctactgccggggctctgtgggccacatgaaggtgctgagcaagcaggtggaggccctgaacaagctgaagaccctgaacagcctcatcaagctgaatgctgtgaagctgaacagagccaagggcaaggaggccatgcacacctgcctgaagcagagcgcctaccgggaggccctgagtgacctgcagagccccctgaacccctgtgtgatcctgtctgagctgtatgtggagaagtgcaagtacatggacagcaagatgaagcccctgtggctggtgtacaacaacaaggtgtttggagaagattctgtgggcgtcatcttcaagaatggagatgacctgcggcaggacatgctgaccctgcagatgctgcggctgatggacctgctgtggaaggaggccggcctggacctgaggatgctgccctacggctgcctggccaccggggacaggagcggcctgattgaggtggtgtccaccagcgagaccatcgctgacatccagctgaacagcagcaatgtggccgctgctgctgccttcaacaaggatgccctgctgaactggctgaaggagtacaacagcggagatgacctggaccgggccatcgaggagttcaccctgagctgtgccggctactgtgtggccagctatgtgctgggcattggagacagacacagcgacaacatcatggtgaagaagacaggccagctgttccacatcgactttggccacatcctgggcaacttcaagagcaagtttggcatcaagcgggagcgggtgcccttcatcctgacctatgacttcatccacgtgatccagcagggcaagacaggcaacacagagaagtttggccgcttccggcagtgctgtgaagatgcctacctgatcctgcggcggcacggcaacctcttcatcaccctgtttgccctgatgctgacagctggcctgcctgagctgacctctgtgaaggacatccagtacctgaaggacagcctggccctgggcaagtctgaggaggaggccctgaagcagttcaagcagaagtttgatgaggccctgcgggagagctggaccaccaaggtgaactggatggcccacacagtgaggaaggactaccgctcctag

SEQ ID NO: 162933 - DNA, 303 bp, Artificial Sequence
  derived and/or modified sequence
atgtgcttctccttcatcatgcccccagccatggctgacatcctggacatctgggccgtggacagccagatcgccagtgatggcagcatccctgtggacttcctgctgcccaccggcatctacatccagctggaggtgccccgggaggccaccatctcctacatcaagcagatgctgtggaagcaggtgcacaactaccccatgttcaacctgctgatggacatcgacagctacatgtttgcctgtgtgaaccagacagctgtgtatgaggagctggaggatgagacccggcggctgtgctag

SEQ ID NO: 162934 - DNA, 171 bp, Artificial Sequence
  derived and/or modified sequence
atgtgcttctccttcatcatgcccccagccatggctgacatcctggacatctgggccgtggacagccagatcgccagtgatggcagcatccctgtggacttcctgctgcccaccggcatctacatccagctggaggtgccccgggaggccaccatctcctacatcaagtag

SEQ ID NO: 162935 - DNA, 396 bp, Artificial Sequence
  derived and/or modified sequence
atgtgcttctccttcatcatgcccccagccatggctgacatcctggacatctgggccgtggacagccagatcgccagtgatggcagcatccctgtggacttcctgctgcccaccggcatctacatccagctggaggtgccccgggaggccaccatctcctacatcaagcagatgctgtggaagcaggtgcacaactaccccatgttcaacctgctgatggacatcgacagctacatgtttgcctgtgtgaaccagacagctgtgtatgaggagctggaggatgagacccggcggctgtgtgatgtgcggcccttcctgcctgtgctgaagctggtgaccaggagctgtgaccccggggagaagctggacagcaagattggagtgctgattggatag

SEQ ID NO: 162936 - DNA, 1566 bp, Artificial Sequence
  derived and/or modified sequence
atggacctgatctggaccctgcggcaggactgccgggagatcttcccccagagcctgcccaagctgctgctgagcatcaagtggaacaagctggaggatgtggcccagctgcaggccctgctgcagatctggcccaagctgcccccccgggaggccctggagctgctggacttcaactacccagaccagtatgtgcgggagtatgctgtgggctgcctgcggcagatgtctgatgaggagctgagccagtacctgctgcagctggtgcaggtgctgaagtatgagcccttcctggactgtgccctgagccgcttcctgctggagcgggccctgggcaacagacgcatcggccagttcctgttctggcacctgcggtctgaggtgcacatcccagctgtgtctgtgcagtttggagtcatcctggaggcctactgccggggctctgtgggccacatgaaggtgctgagcaagcaggtggaggccctgaacaagctgaagaccctgaacagcctcatcaagctgaatgctgtgaagctgaacagagccaagggcaaggaggccatgcacacctgcctgaagcagagcgcctaccgggaggccctgagtgacctgcagagccccctgaacccctgtgtgatcctgtctgagctgtatgtggagaagtgcaagtacatggacagcaagatgaagcccctgtggctggtgtacaacaacaaggtgtttggagaagattctgtgggcgtcatcttcaagaatggagatgtgtgcttccccctggacctgcggcaggacatgctgaccctgcagatgctgcggctgatggacctgctgtggaaggaggccggcctggacctgaggatgctgccctacggctgcctggccactggagacagaagtggcctcatcgaggtggtgtccaccagcgagaccatcgctgacatccagctgaacagcagcaatgtggccgctgctgctgccttcaacaaggatgccctgctgaactggctgaaggagtacaacagcggagatgacctggaccgggccatcgaggagttcaccctgagctgtgccggctactgtgtggccagctatgtgctgggcatcggggacagacacagcgacaacatcatggtgaagaagacaggccagctgttccacatcgactttggccacatcctgggcaacttcaagagcaagtttggcatcaagcgggagcgggtgcccttcatcctgacctatgacttcatccacgtgatccagcagggcaagacaggcaacacagagaagtttggccgcttccggcagtgctgtgaagatgcctacctgatcctgcggagacatggcaacctcttcatcaccctgtttgccctgatgctgacagctggcctgcctgagctgacctctgtgaaggacatccagtacctgaaggacagcctggccctgggcaagtctgaggaggaggccctgaagcagttcaagcagaagtttgatgaggccctgcgggagagctggaccaccaaggtgaactggatggcccacacagtgaggaaggactaccgctcctag

SEQ ID NO: 162937 - DNA, 3213 bp, Artificial Sequence
  derived and/or modified sequence
atgtgcttcagcttcatcatgccccccgccatggccgacatcctggacatttgggctgtggactcccagattgcaagcgatgggagcatccctgttgatttcttactccccactggtatatacatacaactggaagttccacgcgaagccacgatctcctatattaaacagatgttatggaagcaggtgcacaactaccccatgtttaatcttttgatggatattgacagctacatgttcgcctgtgtcaaccagaccgctgtttatgaggagttggaggatgaaacccgcagactgtgcgatgtcaggcccttcctgcccgtgctgaagctggttacaaggagttgcgaccctggagaaaagttagactcaaaaataggcgttctgatcggaaagggcttacatgaatttgattcactgaaggatccagaagtgaacgagtttagaaggaagatgagaaagtttagcgaagagaagattttgagcttagtgggcctcagttggatggattggctcaagcagacttacccccccgaacacgaaccttctattcccgaaaacctcgaagataagctttatggaggcaagttgatcgtagcggtccacttcgagaactgtcaggatgtattttctttccaggtgtcacccaatatgaatcccattaaggttaatgaactcgcgattcagaagcgcctgaccatacacgggaaagaggatgaagtgagcccttacgactacgtgctgcaggtgtctggacgcgtcgagtacgtgttcggtgatcatcccctgatccaatttcagtatatccgtaactgtgtgatgaatcgggcgctcccgcacttcattctggtagagtgttgcaagataaaaaaaatgtacgagcaggagatgattgctatagaggccgctattaaccggaactctagcaatctccccttgccccttccacctaagaaaactaggatcatcagccacgtatgggaaaacaacaatccgttccaaatagtgcttgtcaaaggcaataagctcaacactgaggagactgtgaaagttcatgtcagggcgggactcttccacggaaccgaattgctctgcaagacaattgtctcatcagaggtttcgggcaagaacgaccacatttggaacgaacccctggagtttgatattaatatctgtgatttgcctcgaatggcccgcttatgctttgctgtgtatgccgtcctggataaggtaaagaccaagaagagtactaagacaatcaaccctagcaaatatcagaccatacgtaaggcaggcaaggtgcattatcccgtcgcctgggtgaacaccatggtctttgatttcaagggtcagctgagaacgggtgatatcatcttgcattcgtggagcagcttccccgatgaactggaagagatgctaaaccctatggggacggtccagacgaacccctacaccgagaatgccactgcactgcacgtcaagttccccgagaataagaagcagccctattattacccgccatttgacaagataatcgaaaaggcagcagagattgctagcagcgattccgccaacgtgagttctcgagggggcaaaaaattcttacccgtgcttaaagagattctggatagagaccccctttcccagttgtgcgagaacgagatggaccttatctggacgttgaggcaggattgcagagaaattttcccccagtccctgcccaaattgttgctgtcaatcaagtggaataagcttgaggatgttgcgcaactacaggcattgttgcagatctggcctaagctgcccccgagggaagcgctggaattactagacttcaactatccagaccagtacgtgagggaatatgcagtgggctgtctaagacagatgtcggacgaagagctaagccagtaccttctccagctggttcaggtgttaaaatatgaaccattcttggactgtgcactgagtaggtttcttctggagcgtgccttgggcaacagaagaattgggcaatttctcttttggcatctgcggagtgaagttcacatcccagccgtctccgtgcagttcggcgttatccttgaggcgtactgccgaggttccgtggggcatatgaaagttttatctaagcaggttgaagctcttaacaaattgaaaactctgaattctctcatcaaactcaatgccgtcaaacttaaccgcgcgaagggcaaagaggcaatgcacacttgtctgaaacaaagcgcgtaccgcgaggctctaagcgatttgcagtctcccttaaatccgtgcgtcattctgagcgagctctacgtcgagaaatgcaagtacatggacagcaaaatgaagcccctctggctggtttataacaacaaggtgttcggggaagacagtgtcggcgtaatctttaagaatggtgacgaccttcgacaagatatgctgacactccagatgttaaggcttatggacttgctttggaaggaggccggtctcgatctgcgcatgctgccttatgggtgcctcgccactggcgaccgaagcggactgatagaagtggtgtcgaccagcgaaactatcgccgacatccagctcaattcatctaatgtcgctgccgcagctgcatttaataaagacgccctactcaattggttgaaagagtataactctggagacgacctggaccgggccatagaagaatttaccctctcttgcgcaggatactgtgtcgcaagttacgttctgggtatcggggataggcattcagacaatatcatggtcaagaagacagggcagctcttccatatcgatttcggtcacattctcggaaacttcaagtctaaattcgggatcaagagggaacgagtccctttcattttaacatacgattttatccatgtgatacagcaagggaagaccggcaatacagagaagtttggcaggtttaggcagtgctgcgaggacgcttacctgattttaaggcgccacggcaacttattcattaccctgtttgcattgatgttgactgctggactccccgagctcacttcagttaaggacattcaatatttgaaagactcactcgccttgggcaagtccgaggaggaggctctcaaacagtttaaacagaagttcgatgaggccctgcgcgagtcgtggacaacgaaagtgaattggatggcacacacggtgcggaaggattaccgctcatag

SEQ ID NO: 162938 - DNA, 303 bp, Artificial Sequence
  derived and/or modified sequence
atgtgcttcagcttcatcatgccccccgccatggccgacatcctggacatctgggctgtcgattcccagatcgcctccgatggaagcattcccgtcgattttctgctaccaaccggaatatatattcagctggaggtgcccagagaagcgactatcagttatattaaacagatgctgtggaaacaagtccataattaccccatgtttaatcttctcatggacatcgattcttatatgttcgcttgtgtcaatcagacagccgtgtacgaggagctcgaggatgagacccggagactctgttag

SEQ ID NO: 162939 - DNA, 171 bp, Artificial Sequence
  derived and/or modified sequence
atgtgcttcagcttcatcatgccccccgccatggccgacatcctggatatttgggcggttgacagccagattgcaagtgatggctcaatccctgtggatttcttactccctacaggcatatacatccagttggaggtgcctcgcgaagctaccatctcatacataaagtag

SEQ ID NO: 162940 - DNA, 3213 bp, Artificial Sequence
  derived and/or modified sequence
atgtgcttcagcttcatcatgccccccgccatggccgacatcctggatatctgggccgtggatagccaaatagcgtcggatgggtcaatccctgtcgactttcttctgcccacgggaatttatatccagttagaagtccctagggaagccacaatttcatacatcaaacaaatgttgtggaaacaggtccacaactaccccatgtttaaccttctcatggacatcgatagttatatgttcgcttgcgtgaaccagacagccgtgtacgaggagcttgaggatgagaccagaaggttgtgcgacgttcgacccttcctgcccgtcctaaaacttgtgacccggagttgtgatccgggggaaaaacttgactcaaagattggggtcctgattggaaaaggattgcatgaattcgactccctgaaagaccctgaggtaaatgagtttcgacgaaaaatgagaaagttttccgaagagaaaatcctctccctcgttgggcttagttggatggattggttgaaacagacctaccctcccgaacacgaacccagcattcctgaaaatctcgaggacaaactttatggtggcaagctgatcgtagcagtgcatttcgagaattgtcaagatgtgttctcctttcaggtgtccccaaatatgaatcccatcaaggtcaatgaattggccattcagaaacgactgaccatccacggcaaggaggacgaagtttctccgtacgactatgtgcttcaggtatctgggagggtggaatacgtgttcggcgatcatccgctcatacagtttcagtacatcaggaattgtgtgatgaatagagcgttgccccactttatacttgttgagtgttgcaaaattaagaagatgtatgagcaggagatgatagccatcgaggctgccatcaaccggaacagtagtaacctaccgcttcccctgcctcccaagaagactcgaatcataagccacgtatgggagaacaacaatcccttccagatcgtccttgtgaaagggaacaaactcaacacagaagagacagtgaaagtccatgtgagggctggactttttcacggcacagagctgctctgcaagactattgtttcaagcgaagtctcaggcaaaaatgaccacatctggaacgaacccctggagttcgacatcaacatctgtgatctgccacgaatggccaggctgtgcttcgctgtgtacgctgtcctcgacaaggtcaaaactaagaagtcaaccaagacgattaacccgtcgaaatatcagaccatccggaaggctgggaaagtccactaccccgtggcctgggttaatactatggtcttcgatttcaaagggcagctgagaacaggcgatattatcctgcattcttggtcttcctttcccgatgaactggaggaaatgcttaatcctatggggaccgtccagactaacccttataccgagaacgcaacagctctgcacgtaaagtttcccgagaacaaaaagcaaccttattattatcctcctttcgacaaaatcattgaaaaagctgcagagattgcctcttccgattctgccaatgttagcagcaggggcggtaagaagtttctgccagtcctgaaggaaatcctggaccgtgacccacttagccaattatgtgaaaacgagatggatctcatttggacactcagacaagactgtagagagatcttccctcagagcctgccaaagctgctcctgtccataaagtggaataaactggaggatgtggcccagttgcaagctttactacagatttggcctaaactcccgccccgggaggcccttgagctgctggatttcaactacccggaccaatacgttcgtgagtatgctgtgggatgcctgcgacagatgtccgacgaggagctgtctcagtacctactccaactggttcaggtgctgaagtacgagccattcctggattgcgccctgtcccgatttttgctggagagagctctgggcaatagacgcattggtcaatttctgttttggcacctgaggtcggaagtgcatatacctgccgtgtcagtacagttcggcgtgatcctagaagcttactgccgcggatcagtgggccatatgaaagtgttaagcaaacaggtagaagctctgaataagctgaaaaccctgaactccctcataaagcttaacgcagtgaaactgaacagggctaagggtaaggaagccatgcacacttgcctgaagcaaagcgcgtaccgagaagccctctctgacttgcagtcaccactgaatccctgcgtgattttaagcgaactctacgttgagaaatgcaaatatatggattcaaagatgaagccactatggctagtctataacaataaagtcttcggtgaagattctgtgggcgtgatcttcaagaacggggatgacctgaggcaagacatgttgactctgcaaatgctccgcctgatggatttactatggaaggaggctgggttagatctaagaatgctcccctatggctgtctggccaccggagaccggtcaggattgatcgaagttgtttcgaccagcgagacaattgcagatattcagcttaacagttcaaacgtagcagcagcagcagctttcaataaagacgctctgttgaactggctaaaagagtacaattccggagatgacctggatagagccatcgaggagtttaccctgtcctgtgccgggtactgcgttgcgagctacgtattgggaatcggggataggcattccgataatatcatggtcaagaagacaggtcagttgtttcacatcgacttcgggcacattttgggaaactttaagagcaaattcgggattaagcgtgagagagttccgttcattctgacctatgatttcatacatgttatccagcaaggcaaaacagggaacactgaaaagtttgggaggttcaggcagtgttgtgaggacgcctacctgattttgagaaggcatggaaacctctttataactttgtttgccctgatgctcactgcgggcctccctgagctaacgtccgtcaaagacatacaatatctgaaggactctctagcactggggaaatccgaagaagaagctctgaaacagtttaaacagaagttcgacgaagcattacgtgaatcctggacaaccaaggtgaactggatggctcacaccgtgcggaaagactaccgcagctag

SEQ ID NO: 162941 - DNA, 396 bp, Artificial Sequence
  derived and/or modified sequence
atgtgcttcagcttcatcatgccccccgccatggccgacatcctggacatatgggccgtcgattctcagatcgcatccgacggatctatccctgttgatttccttctccctaccggcatttatatacagctggaggttcctcgggaggcaacaatctcatatatcaagcagatgctctggaaacaagtacacaactaccctatgttcaatctgttaatggatatagactcctacatgttcgcctgcgtcaaccaaacagcggtgtacgaggagcttgaagacgaaacccggcgactttgcgatgtgcggccctttcttcctgtcctcaaactggttactcgcagttgcgatcccggcgagaagctggacagtaaaatcggagtcttgattgggtag

SEQ ID NO: 162942 - DNA, 1566 bp, Artificial Sequence
  derived and/or modified sequence
atggacctgatctggaccctgcggcaggactgccgggagatcttcccacagagcctcccaaagctgctcctgagtatcaagtggaataagctggaggacgtcgcccaactgcaggctttgctgcagatatggcctaaactgccccctcgcgaagccctggagctgctggacttcaattatccagatcagtacgtgcgggaatatgccgtcgggtgtcttcggcagatgtctgacgaggagctttctcaatacctcttgcagcttgtccaagtgctcaaatacgaacccttcctggactgcgcactcagtaggtttctgctcgagcgcgctctggggaatcgtcgcataggacagtttctgttctggcacctccgttcagaagtccacataccagcggtgtctgtgcaatttggggtgatcctggaggcctactgccgggggagcgttggacatatgaaggtcctgagcaaacaagtggaggctttaaacaaattaaaaacgctgaacagccttatcaaactgaacgccgtgaagctgaatagagcaaaaggcaaggaggcgatgcacacttgcctgaaacagtcagcttatagggaagccttgagtgatcttcaatcaccgttgaatccgtgcgtgatactttctgaattatatgtagagaagtgtaaatatatggatagcaagatgaaacctctgtggctggtatataacaacaaggtgttcggtgaagacagcgtcggggtgattttcaagaacggagatgtctgtttccccctggacctgagacaggacatgctgacactgcagatgctcaggttgatggatctgctttggaaggaggcaggtttagacctgcgcatgctgccatatggctgcctggcgaccggagataggagtgggctcatcgaggttgtgtccacatccgagaccattgcagacattcaactgaattcttcgaatgtggcagcagctgctgcgtttaataaggatgccttattgaactggctcaaggagtataattccggcgatgacctggaccgggctattgaggagttcacattatcctgcgccggatactgcgtcgcatcctacgtcctaggaattggcgatcgacacagcgataatatcatggttaagaaaactggtcaactgttccacatcgacttcgggcacatactcggcaacttcaagtcaaagtttggtatcaaaagggagagagttccgttcattttgacatacgatttcattcacgtaattcagcagggtaaaactggcaatacagaaaagttcggccgattcagacagtgctgtgaggatgcctatttgatcttgagacggcatgggaacctgttcattaccctttttgcactgatgttaactgccggtctacccgaattgacctcggtgaaagacatacagtatttgaaagattcactcgccctaggtaaatcagaagaggaggcattaaagcagttcaaacaaaagtttgacgaggcactgagagagtcatggaccaccaaagttaactggatggcccacacggttcgcaaggactatcggagctag

SEQ ID NO: 162943 - DNA, 3213 bp, Artificial Sequence
  derived and/or modified sequence
atgtgtttttcctttataatgcctcccgctatggcagatatcctggatatttgggccgtcgattcgcagatcgcgagcgatggctctattcccgttgatttcttgctgcccactggaatctatatacagctggaagtgccaagggaagctactattagctatatcaagcagatgctgtggaaacaggtgcacaactacccaatgtttaatctgctgatggacatcgattcatacatgttcgcctgcgtcaaccagactgccgtgtacgaagagctggaggacgagacacggcgactctgcgacgttcgacctttcctacccgtgctgaagctcgtgacaaggtcatgtgatccaggtgagaagctggatagcaagatcggagttctcataggaaagggactccatgaatttgacagcctgaaagatccggaagttaacgaattccggcgaaaaatgcgcaaattctcggaagagaaaatactgtcactcgttggcttgtcttggatggactggttaaaacagacctatccgccagaacatgagccgtccatccctgaaaacctggaagataaactgtatgggggtaaattgattgtggcagttcattttgagaactgccaagacgtgttttctttccaggtgtctccaaacatgaaccctatcaaggtgaacgagctggccatccagaaacggctgacaatccacgggaaagaggatgaagtttccccatatgactacgtcctgcaggttagcggaagagtggaatatgtctttggcgaccaccccctgatccagtttcagtatatcagaaactgtgtgatgaaccgcgcactgccgcattttattttagtggaatgttgtaaaatcaagaagatgtatgagcaggagatgatcgcaatcgaggccgctattaacagaaatagctccaatcttcctctgccgctgcctcctaagaaaacaagaattattagtcacgtatgggaaaacaacaatccatttcagatcgtgttagtgaagggcaataaactgaatacagaagaaactgtcaaggttcacgtgagggcagggttgttccacggcaccgagcttctctgtaagacaatagtgtcgtccgaagtctcaggaaagaatgatcacatctggaatgagcccctggaatttgacattaacatctgtgacttgccgaggatggctcggctgtgcttcgccgtgtacgctgtgctagacaaggtgaaaaccaaaaaaagcacaaagacaataaatccatcaaaatatcagactataagaaaggccggtaaagtccactatccagtggcctgggtgaacacgatggtattcgattttaagggacagctgcgcaccggagatatcattctacattcttggtcatcctttccagacgagctcgaggagatgcttaacccgatggggactgtgcagacaaatccttatactgaaaatgccactgctctgcatgtcaagttccctgaaaacaaaaaacagccgtactactatccgccttttgataaaataatcgagaaagcagctgaaatagccagctctgactccgccaacgtgagcagcaggggcggtaagaagtttctccctgtgttaaaggagatcctcgaccgcgatcccctaagtcagctctgcgaaaacgaaatggatctgatatggactcttcgccaggattgtagggagatctttccacagagtctccccaagttgctgctcagcatcaagtggaacaaattggaagacgtggcacaattacaggctctcctccaaatctggccaaaactccctccgagagaagccttggagctcctcgacttcaattaccccgatcagtacgtgagagaatacgcagtgggatgtctcaggcagatgtctgacgaggagttatcccagtaccttctgcaattggtacaggtactgaagtatgaaccatttctcgactgcgccctctctcggttccttctagaacgggctctgggcaatcgccgaatcggccaattccttttctggcacctgcggagtgaggtgcatattccggctgtttcagtccagtttggcgtgatcttagaagcctattgccgaggcagtgtgggacatatgaaagttctgtctaagcaagtggaggcgctgaacaagcttaaaaccctgaattcgctcataaagcttaacgccgtaaagctgaatcgagcaaaggggaaagaggcaatgcatacctgtttgaagcagagcgcttatcgggaggccctaagtgacctgcagagtcctctaaacccctgtgtgattctgtcagagttatatgttgaaaaatgtaagtatatggattctaagatgaaaccactgtggcttgtttataacaataaggtgtttggcgaagactcggtaggggtgatcttcaagaacggagacgatcttcggcaggacatgctgacgcttcagatgctgagactaatggatctgttgtggaaggaggctggactcgatctcagaatgctcccctatggttgtcttgctaccggagatcgatccggcctaatcgaagtcgtgtctacttctgaaaccattgccgatattcagttgaacagctctaacgtggctgcagccgcagcttttaacaaagacgctctcctaaactggctgaaggaatacaattcaggcgacgacctggatcgcgcaatcgaggaatttacactgtcctgcgccggatattgcgtggccagctacgtgctggggatcggcgaccggcactcagataacatcatggtcaaaaaaaccgggcagttatttcatatcgattttggccacatcttgggcaattttaaatctaaatttggaattaagcgggagcgcgtgcccttcattttgacttatgactttatccacgtgatccaacaaggaaagacaggcaacacagagaaattcggtcggttcaggcagtgttgcgaagatgcctacctcatactgcgaagacatggcaacctgttcattaccttgttcgccctcatgcttaccgctggcctgcctgaattaaccagcgtgaaggatatccaatacctcaaggattcgttagccctggggaaatccgaagaagaggcactgaagcagtttaaacagaagttcgacgaagcgctgcgtgagtcctggacaacaaaagtgaattggatggcccatacggtgcgaaaagattatcgatcctag

SEQ ID NO: 162944 - DNA, 303 bp, Artificial Sequence
  derived and/or modified sequence
atgtgcttctctttcattatgcccccagcgatggccgacattctcgatatttgggcagttgacagtcagattgcctcagacggtagcatccccgtcgatttcctgctcccgacaggtatctacatccagctggaagtaccgagggaggcaacaatctcttacattaaacagatgctgtggaaacaggtccataattaccccatgtttaatttattaatggatattgacagctacatgttcgcctgcgtaaatcaaaccgccgtttacgaagaactggaggatgaaacaaggaggttatgctag

SEQ ID NO: 162945 - DNA, 171 bp, Artificial Sequence
  derived and/or modified sequence
atgtgtttcagttttatcatgcccccagccatggctgatattctcgatatttgggcagttgattcacaaatcgcgtccgatggaagcattccggtcgattttctgctaccaaccggcatctatatacagctagaggtgccgagagaagccaccatatcatacattaagtag

SEQ ID NO: 162946 - DNA, 3213 bp, Artificial Sequence
  derived and/or modified sequence
atgtgcttctcatttattatgccccctgccatggctgatattcttgatatctgggccgtggattcacaaatcgccagtgacggcagtatacccgtggattttctgctacctaccggaatctatatccaacttgaggtgccacgagaggcaacaatttcatacatcaaacagatgttgtggaaacaggtgcacaactacccaatgttcaacttgcttatggacatcgacagttatatgtttgcatgtgttaatcagacagccgtctacgaggagttagaagacgagacccggagactgtgcgacgtacggcctttcctaccagtgctgaaactagtgacaagatcttgtgatcccggtgagaagctcgattctaaaattggggtgctgattggaaagggcctgcatgaatttgacagtcttaaagaccccgaggtcaatgagtttcggagaaaaatgagaaagttctccgaagaaaaaatcctaagcctcgtgggcttgtcatggatggactggctcaagcaaacttacccgcctgagcacgagccaagcattcccgagaacctggaggacaagctttacggcggtaaactgatagttgccgtacattttgagaactgtcaggacgttttcagctttcaggtgtcccccaatatgaatcctatcaaggtgaacgaactggccatccaaaaaaggcttacaatccacggtaaagaagatgaagtcagcccctatgactacgtactgcaagtgtcagggagggtggaatatgtgtttggggaccaccccctgatacagttccagtacattagaaactgcgtcatgaacagggctttaccacatttcattctcgtggaatgttgcaaaatcaagaagatgtatgaacaggagatgatcgccattgaggcagccatcaacaggaattccagcaacctgcctctcccactcccacctaagaagactagaatcatatctcatgtgtgggagaataacaatcccttccagatcgtccttgtcaagggaaataagttgaatactgaggagaccgtgaaagtgcacgtgcgagcaggactctttcacggcactgaattattgtgtaagacaattgtttccagtgaggtgtctggaaagaatgatcacatctggaacgagccccttgagttcgacatcaacatctgcgacctgccaagaatggccaggctgtgtttcgcggtgtacgcagtacttgacaaggtgaaaactaaaaaaagcacaaagacgattaatccttccaaatatcagaccattcgtaaagctggaaaggttcattatcccgtggcgtgggttaataccatggtcttcgacttcaaggggcagctgagaacgggggacattatactgcacagctggtcatcttttcccgatgaactcgaagagatgctgaacccaatgggcacagtccagacgaacccttataccgaaaatgctacagcgctacacgtgaaatttccagagaacaagaaacagccgtactattacccaccctttgacaaaattatcgaaaaggccgctgagattgcgagcagcgactcagccaatgttagcagtagaggtggcaagaaatttctgcctgtcttaaaggagatcttagaccgggatcctcttagtcagctgtgcgaaaacgagatggaccttatttggacactgcgccaagattgtcgggagatcttcccgcaaagtttacctaaactgttactgtcaattaagtggaacaagctcgaggatgtggcacagcttcaggctctcctccagatttggcctaagttgcccccacgcgaggccctggagttactggattttaattaccccgatcagtacgtccgcgagtatgctgtggggtgtcttagacagatgagcgatgaggagctatcccagtacctcctgcaactagttcaggttttaaagtacgagccgtttctggactgcgccttaagccgatttcttctggagagagctctgggcaatagacgcatcggacagttcctgttttggcatctacgcagcgaggtccacatcccagctgtgtcagtgcagttcggtgtaatcctggaagcctattgtagaggctcagtgggacacatgaaggtactcagtaagcaggtggaggcccttaacaaactcaagactctgaactccctgattaagttaaacgctgtgaagttgaatagagccaaaggcaaagaggccatgcacacctgcctcaagcagtctgcatatcgcgaagctctcagcgacctgcagtcgccactgaacccctgtgtgattttgagcgaactttatgtcgagaaatgcaagtacatggattccaaaatgaagccgctctggttggtctacaataacaaggtgttcggggaggattctgtgggagtgattttcaagaacggagatgatctccgccaagatatgctcaccctgcagatgttgcggttgatggaccttctttggaaggaggccggtctcgatttgaggatgctaccttacgggtgtctggccaccggtgaccgcagtggcttgatcgaagtcgtgtccacaagcgagaccattgcggacattcaacttaactcttctaatgttgctgccgctgcagctttcaataaagatgcactcttgaactggctgaaggagtacaattcaggagacgatcttgatagagcgatcgaagaatttactctctcttgtgccggatactgcgtagccagctacgtgctcggaataggtgatcgccactcagataacattatggttaaaaaaactggtcagctgttccacattgatttcggccatatcttagggaacttcaaatctaaattcggcatcaaaagagagagagttcccttcattctcacatacgatttcatccatgtcattcagcagggtaaaacggggaatacagagaaattcggcagattccgacagtgctgcgaagacgcatatttaattcttcgaagacacggcaacctatttatcacactgtttgcacttatgttgaccgcaggactgcctgagttgacatccgtgaaggacatacagtaccttaaagatagcttggccttgggcaagagtgaggaggaggcactcaagcagtttaaacagaaattcgatgaggcgctcagggaaagttggactaccaaggtgaattggatggcccatactgtccgtaaggactataggtcttag

SEQ ID NO: 162947 - DNA, 396 bp, Artificial Sequence
  derived and/or modified sequence
atgtgcttttcctttattatgcctcctgctatggccgacattcttgatatatgggcggtagattctcagattgcgtcagatggctctattccagttgatttccttctgccgacaggtatatacatccagcttgaggtacctagggaggccacaatatcgtacattaaacagatgctgtggaagcaagtgcacaattatccaatgtttaacctgctgatggacatcgacagttatatgtttgcatgcgtaaaccagaccgcagtctacgaggaactggaagacgagaccagacggctgtgcgatgtccggccattcctgcccgtgctgaaattagtcacacgatcctgtgatcctggggagaagcttgactccaagattggggtgctcataggctag

SEQ ID NO: 162948 - DNA, 1566 bp, Artificial Sequence
  derived and/or modified sequence
atggatctcatctggacattaagacaagactgtagagaaatctttcctcagtctctgcctaagctcctgttgtctataaagtggaacaagcttgaggatgtggcacagctgcaagctttactgcagatatggcccaaattgccacctcgggaggccctcgaactgttagacttcaactacccagaccaatatgtacgcgagtacgcagtggggtgtcttcgacagatgtctgacgaagagctatctcagtacctactgcaactcgtccaggtcctgaaatatgaacctttcctggattgcgccctctcccgattcctgcttgagagagcgctgggaaacaggaggattggacaatttctgttttggcatctgagatctgaagtgcatatcccggcagtgtctgtccagttcggggttattctcgaggcatactgccgcggttccgtgggacacatgaaggtcttgagcaaacaggttgaagccctgaataaactgaaaaccctgaactccctgattaagctgaatgctgtgaagctgaaccgggcaaagggtaaggaggctatgcatacatgtctgaaacagtccgcctaccgcgaagccttgtccgatctgcagagtccccttaacccatgtgtaattttgtccgaactgtacgtggaaaagtgtaagtacatggatagtaaaatgaagcccctgtggttggtgtataacaacaaagtgttcggtgaggactccgtaggcgtcatatttaagaatggtgatgtttgcttcccgttagacttgaggcaggacatgttgaccttgcagatgctgcggctcatggatctgttgtggaaagaagctggcttggatctgcgcatgcttccatatggttgtctggccacaggggaccgaagtggcctaatagaagttgtatcaactagcgaaacaatagctgacattcaactgaacagtagtaatgtggcagctgcagcagcatttaacaaggacgcccttttaaactggctcaaggaatacaactcgggagacgacctggatagagccatcgaagaattcaccctttcctgcgcaggctactgtgtggcgagttatgtgcttgggattggggatagacattccgacaatataatggtgaagaaaacgggccaactgttccacattgacttcgggcatatcctgggtaatttcaagagcaaattcggcatcaagagggaaagggtgccctttattctgacatatgattttattcacgtcatacaacaaggcaaaacgggcaacacagagaagtttggtagattcaggcaatgctgcgaggatgcctacctcatcttgagaaggcacggcaatctgtttataaccctgttcgcgctcatgctgaccgccggtctgccagaactgacctcagttaaggacatccagtacttgaaggacagcctcgcactcggcaaaagcgaggaagaagcccttaagcaatttaaacagaagtttgacgaggccttgagggaaagctggactactaaagtgaactggatggcccatacagttagaaaggattaccgcagctag

SEQ ID NO: 162949 - DNA, 3213 bp, Artificial Sequence
  derived and/or modified sequence
atgtgcttcagtttcataatgcctcctgctatggcagacatccttgacatctgggcggtggattcacagatagcatctgatggctccatacctgtggatttccttttgcccactgggatttatatccagttggaggtacctcgggaagctaccatttcttatattaagcagatgttatggaagcaagttcacaattacccaatgttcaacctccttatggatattgactcctatatgtttgcatgtgtgaatcagactgctgtatatgaggagcttgaagatgaaacacgaagactctgtgatgtcagaccttttcttccagttctcaaattagtgacaagaagttgtgacccaggggaaaaattagactcaaaaattggagtccttataggaaaaggtctgcatgaatttgattccttgaaggatcctgaagtaaatgaatttcgaagaaaaatgcgcaaattcagcgaggaaaaaatcctgtcacttgtgggattgtcttggatggactggctaaaacaaacatatccaccagagcatgaaccatccatccctgaaaacttagaagataaactttatgggggaaagctcatcgtagctgttcattttgaaaactgccaggacgtgtttagctttcaagtgtctcctaatatgaatcctatcaaagtaaatgaattggcaatccaaaaacgtttgactattcatgggaaggaagatgaagttagcccctatgattatgtgttgcaagtcagcgggagagtagaatatgtttttggtgatcatccactaattcagttccagtatatccggaactgtgtgatgaacagagccctgccccattttatacttgtggaatgctgcaagatcaagaaaatgtatgaacaagaaatgattgccatagaggctgccataaatcgaaattcatctaatcttcctcttccattaccaccaaagaaaacacgaattatttctcatgtttgggaaaataacaaccctttccaaattgtcttggttaagggaaataaacttaacacagaggaaactgtaaaagttcatgtcagggctggtctttttcatggtactgagctcctgtgtaaaaccatcgtaagctcagaggtatcagggaaaaatgatcatatttggaatgaaccactggaatttgatattaatatttgtgacttaccaagaatggctcgattatgttttgctgtttatgcagttttggataaagtaaaaacgaagaaatcaacgaaaactattaatccctctaaatatcagaccatcaggaaagctggaaaagtgcattatcctgtagcgtgggtaaatacgatggtttttgactttaaaggacaattgagaactggagacataatattacacagctggtcttcatttcctgatgaactcgaagaaatgttgaatccaatgggaactgttcaaacaaatccatatactgaaaatgcaacagctttgcatgttaaatttccagagaataaaaaacaaccttattattaccctcccttcgataagattattgaaaaggcagctgagattgcaagcagtgatagtgctaatgtgtcaagtcgaggtggaaaaaagtttcttcctgtattgaaagaaatcttggacagggatcccttgtctcaactgtgtgaaaatgaaatggatcttatttggactttgcgacaagactgccgagagattttcccacaatcactgccaaaattactgctgtcaatcaagtggaataaacttgaggatgttgctcagcttcaggcgctgcttcagatttggcctaaactgcccccccgggaggccctagagcttctggatttcaactatccagaccagtacgttcgagaatatgctgtaggctgcctgcgacagatgagtgatgaagaactttctcaatatcttttacaactggtgcaagtgttaaaatatgagccttttcttgattgtgccctctctagattcctattagaaagagcacttggtaatcggaggatagggcagtttctattttggcatcttaggtcagaagtgcacattcctgctgtctcagtacaatttggtgtcatccttgaagcatactgccggggaagtgtggggcacatgaaagtgctttctaagcaggttgaagcactcaataagttaaaaactttaaatagtttaatcaaactgaatgccgtgaagttaaacagagccaaagggaaggaggccatgcatacctgtttaaaacagagtgcttaccgggaagccctctctgacctgcagtcacccctgaacccatgtgttatcctctcagaactctatgttgaaaagtgcaaatacatggattccaaaatgaagcctttgtggctggtatacaataacaaggtatttggtgaggattcagttggagtgatttttaaaaatggtgatgatttacgacaggatatgttgacactccaaatgttgcgcttgatggatttactctggaaagaagctggtttggatcttcggatgttgccttatggctgtttagcaacaggagatcgctctggcctcattgaagttgtgagcacctctgaaacaattgctgacattcagctgaacagtagcaatgtggctgctgcagcagccttcaacaaagatgcccttctgaactggcttaaagaatacaactctggggatgacctggaccgagccattgaggaatttacactgtcctgtgctggctactgtgtagcttcttatgtccttgggattggtgacagacatagtgacaacatcatggtcaaaaaaactggccagctcttccacattgactttggacatattcttggaaatttcaaatctaagtttggcattaaaagggagcgagtgccttttattcttacctatgatttcatccatgtcattcaacaaggaaaaacaggaaatacagaaaagtttggccggttccgccagtgttgtgaggatgcatatctgattttacgacggcatgggaatctcttcatcactctctttgcgctgatgttgactgcagggcttcctgaactcacatcagtcaaagatatacagtatcttaaggactctcttgcattagggaagagtgaagaagaagcactcaaacagtttaagcaaaaatttgatgaggcgctcagggaaagctggactactaaagtgaactggatggcccacacagttcggaaagactacagatcttaa

SEQ ID NO: 162950 - DNA, 667 bp, Artificial Sequence
  derived and/or modified sequence
tggcgcgcgcgcacacgggcgcgggttcggcggcggcgcgcgcgtgctctgtcggcctgtgcggcgctgcggcggagcgggccatggcagtggggagggggcgagtgtagtgctgcgcggggcaggcgggaggtgatcgagagaggcagggatgggggcgccggagtggagcggttgcggcggcctgggctgctgactgcgcacttggaatagtagcaggcggcggcggcggaacgccaggcagtgtatgttttaactggaaaaagtcttccatgaaaacgtcacttttaaaaaataagtaatgccatctgttttcctaaaagactgaaatgggggcgaccattcttagggccccgtggttatgaatgtgcttcagtttcataatgcctcctgctatggcagacatccttgacatctgggcggtggattcacagatagcatctgatggctccatacctgtggatttccttttgcccactgggatttatatccagttggaggtacctcgggaagctaccatttcttatattaagcagatgttatggaagcaagttcacaattacccaatgttcaacctccttatggatattgactcctatatgtttgcatgtgtgaatcagactgctgtatatgaggagcttgaagatgaaacacgaagactctgtga

SEQ ID NO: 162951 - DNA, 690 bp, Artificial Sequence
  derived and/or modified sequence
tgtattttttagtagagatggggtttcactgtgttagccaggatggtcacgatctcctgacctcgtgatccgtccacctcagccccccagagtgctgggattacaggcatgagccactgtgcccggccaaaaaaaatctctttttaaatatctcctatgattttggttgaatttgttcacctatagaacaaatttatgttgttttctgcttatcattagatgtaaaggagtaaagtccagtgggttctgctggcacattggtggggaagctgagaacttttaaactctttcccctttctccagtgaacaatcgacaggatatgggttatagttacagttaaagggtttattgaactaattgtcactgctgaagttcctgtgccctctgatagcttccttgaaaagttttcatagtttaaaaactctgcttgtccttagcctttgatctcttgctttgatgctcaaacagaagaatgatacaagactgaggatcttgccaggcaagggccccgtggttatgaatgtgcttcagtttcataatgcctcctgctatggcagacatccttgacatctgggcggtggattcacagatagcatctgatggctccatacctgtggatttccttttgcccactgggatttatatccagttggaggtacctcgggaagctaccatttcttatattaagc

SEQ ID NO: 162952 - DNA, 4658 bp, Artificial Sequence
  derived and/or modified sequence
gggctgctgactgcgcacttggaatagtagcaggcggcggcggcggaacgccaggcagggccccgtggttatgaatgtgcttcagtttcataatgcctcctgctatggcagacatccttgacatctgggcggtggattcacagatagcatctgatggctccatacctgtggatttccttttgcccactgggatttatatccagttggaggtacctcgggaagctaccatttcttatattaagcagatgttatggaagcaagttcacaattacccaatgttcaacctccttatggatattgactcctatatgtttgcatgtgtgaatcagactgctgtatatgaggagcttgaagatgaaacacgaagactctgtgatgtcagaccttttcttccagttctcaaattagtgacaagaagttgtgacccaggggaaaaattagactcaaaaattggagtccttataggaaaaggtctgcatgaatttgattccttgaaggatcctgaagtaaatgaatttcgaagaaaaatgcgcaaattcagcgaggaaaaaatcctgtcacttgtgggattgtcttggatggactggctaaaacaaacatatccaccagagcatgaaccatccatccctgaaaacttagaagataaactttatgggggaaagctcatcgtagctgttcattttgaaaactgccaggacgtgtttagctttcaagtgtctcctaatatgaatcctatcaaagtaaatgaattggcaatccaaaaacgtttgactattcatgggaaggaagatgaagttagcccctatgattatgtgttgcaagtcagcgggagagtagaatatgtttttggtgatcatccactaattcagttccagtatatccggaactgtgtgatgaacagagccctgccccattttatacttgtggaatgctgcaagatcaagaaaatgtatgaacaagaaatgattgccatagaggctgccataaatcgaaattcatctaatcttcctcttccattaccaccaaagaaaacacgaattatttctcatgtttgggaaaataacaaccctttccaaattgtcttggttaagggaaataaacttaacacagaggaaactgtaaaagttcatgtcagggctggtctttttcatggtactgagctcctgtgtaaaaccatcgtaagctcagaggtatcagggaaaaatgatcatatttggaatgaaccactggaatttgatattaatatttgtgacttaccaagaatggctcgattatgttttgctgtttatgcagttttggataaagtaaaaacgaagaaatcaacgaaaactattaatccctctaaatatcagaccatcaggaaagctggaaaagtgcattatcctgtagcgtgggtaaatacgatggtttttgactttaaaggacaattgagaactggagacataatattacacagctggtcttcatttcctgatgaactcgaagaaatgttgaatccaatgggaactgttcaaacaaatccatatactgaaaatgcaacagctttgcatgttaaatttccagagaataaaaaacaaccttattattaccctcccttcgataagattattgaaaaggcagctgagattgcaagcagtgatagtgctaatgtgtcaagtcgaggtggaaaaaagtttcttcctgtattgaaagaaatcttggacagggatcccttgtctcaactgtgtgaaaatgaaatggatcttatttggactttgcgacaagactgccgagagattttcccacaatcactgccaaaattactgctgtcaatcaagtggaataaacttgaggatgttgctcagcttcaggcgctgcttcagatttggcctaaactgcccccccgggaggccctagagcttctggatttcaactatccagaccagtacgttcgagaatatgctgtaggctgcctgcgacagatgagtgatgaagaactttctcaatatcttttacaactggtgcaagtgttaaaatatgagccttttcttgattgtgccctctctagattcctattagaaagagcacttggtaatcggaggatagggcagtttctattttggcatcttaggtcagaagtgcacattcctgctgtctcagtacaatttggtgtcatccttgaagcatactgccggggaagtgtggggcacatgaaagtgctttctaagcaggttgaagcactcaataagttaaaaactttaaatagtttaatcaaactgaatgccgtgaagttaaacagagccaaagggaaggaggccatgcatacctgtttaaaacagagtgcttaccgggaagccctctctgacctgcagtcacccctgaacccatgtgttatcctctcagaactctatgttgaaaagtgcaaatacatggattccaaaatgaagcctttgtggctggtatacaataacaaggtatttggtgaggattcagttggagtgatttttaaaaatggtgatgatttacgacaggatatgttgacactccaaatgttgcgcttgatggatttactctggaaagaagctggtttggatcttcggatgttgccttatggctgtttagcaacaggagatcgctctggcctcattgaagttgtgagcacctctgaaacaattgctgacattcagctgaacagtagcaatgtggctgctgcagcagccttcaacaaagatgcccttctgaactggcttaaagaatacaactctggggatgacctggaccgagccattgaggaatttacactgtcctgtgctggctactgtgtagcttcttatgtccttgggattggtgacagacatagtgacaacatcatggtcaaaaaaactggccagctcttccacattgactttggacatattcttggaaatttcaaatctaagtttggcattaaaagggagcgagtgccttttattcttacctatgatttcatccatgtcattcaacaaggaaaaacaggaaatacagaaaagtttggccggttccgccagtgttgtgaggatgcatatctgattttacgacggcatgggaatctcttcatcactctctttgcgctgatgttgactgcagggcttcctgaactcacatcagtcaaagatatacagtatcttaaggactctcttgcattagggaagagtgaagaagaagcactcaaacagtttaagcaaaaatttgatgaggcgctcagggaaagctggactactaaagtgaactggatggcccacacagttcggaaagactacagatcttaacgatcagccttcgctcctaatgtatttgttggtttcatttcattttcattttgcacttgcactaaattgaacatgaccctgttagagatgttataaagggaatgaaatcctggaactcagagttaaattaagaacaaggcatcccacagaacctaatctgaacaatccccgatgattccctctgctttttgaatgcttccaagacttatcatgaaaactgtcaatggataatcatttcctgctgactttgcacgccaaggaatgctactagggattgtttccgtttttgtttgttttttctaatatttggtacttcccagaatggtgtaaatacttcttttcaatgttgtgaccaagtattgtcactcagccaacaacttttccacacctgggggttggtggctgttcttactgtccaaatgaagctaaaaagaaaggcatctttcttcccttttaaaattgtgtaaactgcaaattataatataatttgaatttatgattattttccagaagaaatcttgtaaacctgtggatactcattaattcttttgttaatatttatttccatgatagcatcattccagccagacttgctgaaaatctactggtgaggcaaatataatatatataaatatgctacatatatatttataaaatttctagtgggagttctatataaatgtttctttggtattcttcagcctgtgatttaaagttttacaaaaagcagagctttttcctaagttacttttcagttaggtaactgtgtgatccagttcttccagctgcttctataatgaggcacatattaatacagtttttatatggtatctatgaaagagttcacttcatagagaataatacttgagcaaatgtatccaagaaagcaagcaaatgaaaagaaacctatttatggaataaactccagatctgaaattcagtattttagaaaaatgccagctcttcttactgtatttattaaaacttgtaataatgtgatttttttcaaggatattagttcaaattgaaatggtttcacgccacacggaaatctttaagttatttgttgaggtaccatatatttagggtgctaggggcaagtaatgttaatatgtgcaataggaactactggtttgaatgtgtaaatgggtgatctctctgagtcctggcaacatccagcaaaactactgcttattctccaaagaatattgggagctctcaatcctcggtgatatgggaaagagaactgagtatttgccctatgactgagctttctataggaattttattaaagaatgtttaattttgttgtccttcttaatgttctcagtcaaataaatgagtgagctggtttcggctgctcttggaatg

SEQ ID NO: 162953 - DNA, 721 bp, Artificial Sequence
  derived and/or modified sequence
tgtagtgctgcgcggggcaggcgggaggtgatcgagagaggcagggatgggggcgccggagtggagcggttgcggcggcctgggctgctgactgcgcacttggaatagtagcaggcggcggcggcggaacgccaggcagtgtatgttttaactggaaaaagtcttccatgaaaacgtcacttttaaaaaataagtaatgccatctgttttcctaaaagactgaaatgggggcgaccattcttagcctttgatctcttgctttgatgctcaaacagaagaatgatacaagactgaggatcttgccaggcaagggccccgtggttatgaatgtgcttcagtttcataatgcctcctgctatggcagacatccttgacatctgggcggtggattcacagatagcatctgatggctccatacctgtggatttccttttgcccactgggatttatatccagttggaggtacctcgggaagctaccatttcttatattaagcagatgttatggaagcaagttcacaattacccaatgttcaacctccttatggatattgactcctatatgtttgcatgtgtgaatcagactgctgtatatgaggagcttgaagatgaaacacgaagactctgtgatgtcagaccttttcttccagttctcaaattagtgacaagaagttgtgacccaggggaaaaattagactcaaaaattggagtccttataggaa

SEQ ID NO: 162954 - DNA, 3181 bp, Artificial Sequence
  derived and/or modified sequence
caggaaagctggaaaagtgcattatcctgtagcgtgggtaaatacgatggtttttgactttaaaggacaattgagaactggagacataatattacacagctggtcttcatttcctgattattgaaaaggcagctgagattgcaagcagtgatagtgctaatgtgtcaagtcgaggtggaaaaaagtttcttcctgtattgaaagaaatcttggacagggatcccttgtctcaactgtgtgaaaatgaaatggatcttatttggactttgcgacaagactgccgagagattttcccacaatcactgccaaaattactgctgtcaatcaagtggaataaacttgaggatgttgctcagcttcaggcgctgcttcagatttggcctaaactgcccccccgggaggccctagagcttctggatttcaactatccagaccagtacgttcgagaatatgctgtaggctgcctgcgacagatgagtgatgaagaactttctcaatatcttttacaactggtgcaagtgttaaaatatgagccttttcttgattgtgccctctctagattcctattagaaagagcacttggtaatcggaggatagggcagtttctattttggcatcttaggtcagaagtgcacattcctgctgtctcagtacaatttggtgtcatccttgaagcatactgccggggaagtgtggggcacatgaaagtgctttctaagcaggttgaagcactcaataagttaaaaactttaaatagtttaatcaaactgaatgccgtgaagttaaacagagccaaagggaaggaggccatgcatacctgtttaaaacagagtgcttaccgggaagccctctctgacctgcagtcacccctgaacccatgtgttatcctctcagaactctatgttgaaaagtgcaaatacatggattccaaaatgaagcctttgtggctggtatacaataacaaggtatttggtgaggattcagttggagtgatttttaaaaatggtgatgtttgttttcccttagatttacgacaggatatgttgacactccaaatgttgcgcttgatggatttactctggaaagaagctggtttggatcttcggatgttgccttatggctgtttagcaacaggagatcgctctggcctcattgaagttgtgagcacctctgaaacaattgctgacattcagctgaacagtagcaatgtggctgctgcagcagccttcaacaaagatgcccttctgaactggcttaaagaatacaactctggggatgacctggaccgagccattgaggaatttacactgtcctgtgctggctactgtgtagcttcttatgtccttgggattggtgacagacatagtgacaacatcatggtcaaaaaaactggccagctcttccacattgactttggacatattcttggaaatttcaaatctaagtttggcattaaaagggagcgagtgccttttattcttacctatgatttcatccatgtcattcaacaaggaaaaacaggaaatacagaaaagtttggccggttccgccagtgttgtgaggatgcatatctgattttacgacggcatgggaatctcttcatcactctctttgcgctgatgttgactgcagggcttcctgaactcacatcagtcaaagatatacagtatcttaaggactctcttgcattagggaagagtgaagaagaagcactcaaacagtttaagcaaaaatttgatgaggcgctcagggaaagctggactactaaagtgaactggatggcccacacagttcggaaagactacagatcttaacgatcagccttcgctcctaatgtatttgttggtttcatttcattttcattttgcacttgcactaaattgaacatgaccctgttagagatgttataaagggaatgaaatcctggaactcagagttaaattaagaacaaggcatcccacagaacctaatctgaacaatccccgatgattccctctgctttttgaatgcttccaagacttatcatgaaaactgtcaatggataatcatttcctgctgactttgcacgccaaggaatgctactagggattgtttccgtttttgtttgttttttctaatatttggtacttcccagaatggtgtaaatacttcttttcaatgttgtgaccaagtattgtcactcagccaacaacttttccacacctgggggttggtggctgttcttactgtccaaatgaagctaaaaagaaaggcatctttcttcccttttaaaattgtgtaaactgcaaattataatataatttgaatttatgattattttccagaagaaatcttgtaaacctgtggatactcattaattcttttgttaatatttatttccatgatagcatcattccagccagacttgctgaaaatctactggtgaggcaaatataatatatataaatatgctacatatatatttataaaatttctagtgggagttctatataaatgtttctttggtattcttcagcctgtgatttaaagttttacaaaaagcagagctttttcctaagttacttttcagttaggtaactgtgtgatccagttcttccagctgcttctataatgaggcacatattaatacagtttttatatggtatctatgaaagagttcacttcatagagaataatacttgagcaaatgtatccaagaaagcaagcaaatgaaaagaaacctatttatggaataaactccagatctgaaattcagtattttagaaaaatgccagctcttcttactgtatttattaaaacttgtaataatgtgatttttttcaaggatattagttcaaattgaaatggtttcacgccacacggaaatctttaagttatttgttgaggtaccatatatttagggtgctaggggcaagtaatgttaatatgtgcaataggaactactggtttgaatgtgtaaatgggtgatctctctgagtcctggcaacatccagcaaaactactgcttattctccaaagaatattgggagctctcaatcctcggtgatatgggaaagagaactgagtatttgccctatgactgagctttctataggaattttattaaagaatgtttaattttgttgtccttcttaatgttctcagtcaaataaatgagtgagctggtttcggctgctcttgg

SEQ ID NO: 162955 - protein, 163 aa, Artificial Sequence
  derived and/or modified sequence
MADEEKLPPGWEKRMSRSSGRVYYFNHITNASQWERPSGNSSSGGKNGQGEPARVRCSHLLVKHSQSRRPSSWRQEKITRTKEEALELINGYIQKIKSGEEDFESLASQFSDCSSAKARGDLGAFSRGQMQKPFEDASFALRTGEMSGPVFTDSGIHIILRTE

SEQ ID NO: 162956 - protein, 45 aa, Artificial Sequence
  derived and/or modified sequence
MQKPFEDASFALRTGEMSGPVFTDSGIHIILRTECWRQTRGPNCF

SEQ ID NO: 162957 - protein, 145 aa, Artificial Sequence
  derived and/or modified sequence
MADEEKLPPGWEKRMSRSSGRVYYFNHITNASQWERPSGNSSSGGKNGQGEPARVRCSHLLVKHSQSRRPSSWRQEKITRTKEEALELINGYIQKIKSGEEDFESLASQFSDCSSAKARGDLGAFSRGAQGMGLTRLGDPYHPEG

SEQ ID NO: 162958 - DNA, 492 bp, Artificial Sequence
  derived and/or modified sequence
atggccgacgaggagaagctgccccccggctgggagaagagaatgagcagaagcagcggcagagtgtactacttcaaccacatcaccaacgccagccagtgggagagacccagcggcaacagcagcagcggcggcaagaacggccagggcgagcccgccagagtgagatgcagccacctgctggtgaagcacagccagagcagaagacccagcagctggagacaggagaagatcaccagaaccaaggaggaggccctggagctgatcaacggctacatccagaagatcaagagcggcgaggaggacttcgagagcctggccagccagttcagcgactgcagcagcgccaaggccagaggcgacctgggcgccttcagcagaggccagatgcagaagcccttcgaggacgccagcttcgccctgagaaccggcgagatgagcggccccgtgttcaccgacagcggcatccacatcatcctgagaaccgagtag

SEQ ID NO: 162959 - DNA, 138 bp, Artificial Sequence
  derived and/or modified sequence
atgcagaagcccttcgaggacgccagcttcgccctgagaaccggcgagatgagcggccccgtgttcaccgacagcggcatccacatcatcctgagaaccgagtgctggagacagaccagaggccccaactgcttctag

SEQ ID NO: 162960 - DNA, 438 bp, Artificial Sequence
  derived and/or modified sequence
atggccgacgaggagaagctgccccccggctgggagaagagaatgagcagaagcagcggcagagtgtactacttcaaccacatcaccaacgccagccagtgggagagacccagcggcaacagcagcagcggcggcaagaacggccagggcgagcccgccagagtgagatgcagccacctgctggtgaagcacagccagagcagaagacccagcagctggagacaggagaagatcaccagaaccaaggaggaggccctggagctgatcaacggctacatccagaagatcaagagcggcgaggaggacttcgagagcctggccagccagttcagcgactgcagcagcgccaaggccagaggcgacctgggcgccttcagcagaggcgcccagggcatgggcctgaccagactgggcgacccctaccaccccgagggctag

SEQ ID NO: 162961 - DNA, 492 bp, Artificial Sequence
  derived and/or modified sequence
atggccgacgaggagaagttgccacctgggtgggagaaacgaatgtctagatctagtgggagggtctattacttcaatcatattacgaatgcaagccagtgggagcggccctccggcaattccagctccgggggaaagaatggacagggtgaaccagcccgagtgaggtgtagtcatcttcttgtgaaacactctcagtcccgaaggccctcgagctggaggcaggaaaagattactagaacaaaggaagaggccctggaactgattaacggttatatccagaagataaagtctggggaagaggatttcgagtcactggcatcccagtttagtgattgctctagtgcaaaagctcgtggcgatcttggggccttcagcaggggacagatgcagaagccctttgaggatgcaagctttgcgctgagaacaggcgaaatgagcggccccgtcttcacagactcaggtatacatattattctgaggaccgaatag

SEQ ID NO: 162962 - DNA, 138 bp, Artificial Sequence
  derived and/or modified sequence
atgcagaaacctttcgaggatgcttcttttgctctgcgaacaggcgagatgtctgggccagtatttactgattcggggattcatatcatcctcaggacggagtgttggcggcagacaagaggcccgaactgtttctag

SEQ ID NO: 162963 - DNA, 438 bp, Artificial Sequence
  derived and/or modified sequence
atggcagatgaggagaagctccccccagggtgggaaaaaagaatgtcgcggtcttccgggagagtctactatttcaatcacattaccaacgcttcccagtgggagagacctagcggaaactcctcttccggaggaaagaatggccagggcgagccagcgagggtccggtgttcacatctgttggtgaagcactcccagtcccgtaggccttcttcatggcgtcaggaaaagatcacacggaccaaggaggaagccctcgagttgataaatggatatattcagaagatcaagagcggggaagaagatttcgagtccctcgccagccagttttctgactgtagcagtgccaaagcacggggagatttgggcgccttctcacgaggcgcccagggcatggggcttaccaggctaggggacccataccaccccgagggatag

SEQ ID NO: 162964 - DNA, 492 bp, Artificial Sequence
  derived and/or modified sequence
atggctgatgaggagaagctgcccccaggctgggagaagaggatgagccgcagcagcggccgggtgtactacttcaaccacatcaccaatgccagccagtgggagcggcccagcggcaacagcagcagcggcggcaagaatggccagggcgagcccgcccgggtgcgctgcagccacctgctggtgaagcacagccagagccggcggcccagctcctggaggcaggagaagatcaccaggaccaaggaggaggccctggagctgatcaatggctacatccagaagatcaagagcggggaggaggactttgagagcctggccagccagttcagtgactgcagcagcgccaaggcccggggggacctgggcgccttcagccggggccagatgcagaagccctttgaagatgccagctttgccctgaggactggagagatgagcggccctgtgttcacagacagcggcatccacatcatcctgaggacagaatag

SEQ ID NO: 162965 - DNA, 138 bp, Artificial Sequence
  derived and/or modified sequence
atgcagaagccctttgaagatgccagctttgccctgaggactggagagatgagcggccctgtgttcacagattctggcatccacatcatcctgaggacagagtgctggaggcagacccggggccccaactgcttctag

SEQ ID NO: 162966 - DNA, 438 bp, Artificial Sequence
  derived and/or modified sequence
atggctgatgaggagaagctgcccccaggctgggagaagaggatgagccgcagcagcggccgggtgtactacttcaaccacatcaccaatgccagccagtgggagcggcccagcggcaacagcagcagcggcggcaagaatggccagggcgagcccgcccgggtgcgctgcagccacctgctggtgaagcacagccagagccggcggcccagctcctggaggcaggagaagatcaccaggaccaaggaggaggccctggagctgatcaatggctacatccagaagatcaagagcggggaggaggactttgagagcctggccagccagttcagtgactgcagcagcgccaaggcccggggggacctgggcgccttcagcagaggagcccagggcatgggcctgacccggctgggggacccctaccaccctgagggctag

SEQ ID NO: 162967 - DNA, 492 bp, Artificial Sequence
  derived and/or modified sequence
atggccgacgaggagaagctgccccccggctgggagaagcggatgagtcgctcctcaggcagggtatactattttaaccacatcaccaatgcctcacagtgggagcggccaagcggcaattcgtcctctggtggaaaaaatggccaaggggaaccagcacgggtaagatgcagtcaccttctggtgaaacactctcagagccgaaggccctcctcatggaggcaagaaaaaatcactcgaaccaaagaagaggccttagagctgattaatggatatatccagaaaatcaaaagcggggaggaggatttcgaaagtttagcaagccagttctctgactgctccagtgctaaggctcgcggtgatctaggcgccttttctcgcggtcagatgcaaaagccgtttgaggatgcctcttttgccctgcgaacaggtgaaatgagtgggccggtgttcaccgattccggcattcatataattttgcgcaccgagtag

SEQ ID NO: 162968 - DNA, 138 bp, Artificial Sequence
  derived and/or modified sequence
atgcagaagcccttcgaggacgccagcttcgccctgcggaccggcgaaatgtccggcccggttttcactgactccggcattcacatcatccttagaactgagtgctggagacagacccggggccctaactgcttttag

SEQ ID NO: 162969 - DNA, 438 bp, Artificial Sequence
  derived and/or modified sequence
atggccgacgaggagaagctgccccccggctgggagaagcggatgagcaggtcaagcggaagagtgtattactttaatcatatcacaaatgcttcacaatgggaacggccgagcggcaattcaagcagcggcgggaagaacggacaaggcgagcccgcccgcgttcgttgtagccacctgctggtgaagcattctcagagcagaagacctagttcctggaggcaagaaaaaatcactaggactaaagaagaagctctagaattgatcaatggctacatccagaagatcaagagcggtgaagaggatttcgagagcctggccagccagttcagcgactgcagttcagctaaggcccggggggatctaggtgccttttctcggggcgcacagggcatgggtctcactcgcctcggcgatccgtaccaccctgagggatag

SEQ ID NO: 162970 - DNA, 492 bp, Artificial Sequence
  derived and/or modified sequence
atggccgacgaggaaaaactgccgcctggctgggagaagcggatgtctagaagttctgggagagtgtattatttcaaccatataactaacgcaagccagtgggaacgacccagcgggaactcctcttctggaggcaaaaatgggcaaggggagcctgctcgggtgcggtgtagtcatctgctcgtcaagcattcccaatcccgacgaccttcctcatggcgccaggaaaagattacccggactaaagaggaggcgttagaactgattaatggttacattcagaaaataaaaagcggagaagaagacttcgaatctctagcgtcccagttcagtgactgctcttccgctaaggccagaggtgacctgggggcatttagcagggggcaaatgcagaagccattcgaagacgccagtttcgccctcagaactggggagatgtctggacctgtgttcacggactccggcattcacataatcctgcgaacagagtag

SEQ ID NO: 162971 - DNA, 138 bp, Artificial Sequence
  derived and/or modified sequence
atgcaaaagcccttcgaagacgcttccttcgctttgagaacaggtgagatgtctggcccagtgtttactgacagtggcatccacattatcctcagaaccgagtgttggcgacagacaagaggtcccaactgtttttag

SEQ ID NO: 162972 - DNA, 438 bp, Artificial Sequence
  derived and/or modified sequence
atggcagacgaagagaagctcccaccagggtgggaaaagcgaatgagtcgatcctccggcagagtttattactttaatcacattaccaatgcgagccagtgggagcgaccatctggaaattcgtcttccggcggtaagaacggtcagggagaaccagccagggtacgttgtagccacctgcttgtgaagcactcccagtcccgcagaccaagcagctggagacaagagaaaatcacccgcactaaagaagaggccctcgaactgattaatggatacattcagaaaattaaatccggcgaggaggatttcgaaagtttggcatcacagtttagtgattgctccagtgccaaggcacgcggagaccttggcgcattcagtagaggagcccaggggatggggctgacaagactgggggacccataccaccccgagggctag

SEQ ID NO: 162973 - DNA, 997 bp, Artificial Sequence
  derived and/or modified sequence
aggcgctgcggcaggagggaagatggcggacgaggagaagctgccgcccggctgggagaagcgcatgagccgcagctcaggccgagtgtactacttcaaccacatcactaacgccagccagtgggagcggcccagcggcaacagcagcagtggtggcaaaaacgggcagggggagcctgccagggtccgctgctcgcacctgctggtgaagcacagccagtcacggcggccctcgtcctggcggcaggagaagatcacccggaccaaggaggaggccctggagctgatcaacggctacatccagaagatcaagtcgggagaggaggactttgagtctctggcctcacagttcagcgactgcagctcagccaaggccaggggagacctgggtgccttcagcagaggtcagatgcagaagccatttgaagacgcctcgtttgcgctgcggacgggggagatgagcgggcccgtgttcacggattccggcatccacatcatcctccgcactgagtgagggtggggagcccaggcctggcctcggggcagggcagggcggctaggccggccagctcccccttgcccgccagccagtggccgaaccccccactccctgccaccgtcacacagtatttattgttcccacaatggctgggagggggcccttccagattgggggccctggggtccccactccctgtccatccccagttggggctgcgaccgccagattctcccttaaggaattgacttcagcaggggtgggaggctcccagacccagggcagtgtggtgggaggggtgttccaaagagaaggcctggtcagcagagccgccccgtgtccccccaggtgctggaggcagactcgagggccgaattgtttctagttaggccacgctcctctgttcagtcgcaaaggtgaacactcatgcggcccagccatgggccctctgagcaactgtgcagcaccctttcacccccaattaaacccagaaccact

SEQ ID NO: 162974 - DNA, 1672 bp, Artificial Sequence
  derived and/or modified sequence
cgcgtaagcagggctcgagctcgccccttgggcgcggcggcagcgctgcctccctcccatggggtcctggctcttccgcgtcgtccccggggtaacggccccggcccgccctgttgtggggactgcgagcctcaggagccgccgggaagcctgaggaagctgaggcagggggctgggcgggtgagggtccggggagtccggggcgatggccctggccctgccggcccggctgatacctctcggcctaatgcacctgacaccccgggggacgtctctgcaccttgctgggcccgggggcacccctgggagggagacaccccagtaccctgcaaagggcgtagggtgttgcccggcctcgggtccacaacctacccctgctaacacccctactgtgtacacctaatgctgagtctgcgacatcgcccgtgacattctgccagacgatggcccctgtgcttaggcccgatttaagggttagccacaatgataatattgccagtaacagggcatgtttttctctgtgtcaagcgctttaagttctctctgaattgccgcaactctgggagccagatgagaaaactgaggtgcagggagattagagcccattgccaaggttttagagtgagtcagtagctcagctgcatttgcacctggaacccgcgctctcgcccaccctgctctagccctggcctgtggctgggacctccagcataaaccggatgctctgcccagctctgggcccatttctgctgtttctgctcagttcaaccctgatggcttcctttatgggtgacactccatgtcacccaggcgaactgtcagcctttggagtggcacccagtagggtctttacttccagtttcttgttcacagtcttcactccttcatacccctcactccctgggtaacatcgggccaccagtaatgctggttcctagctctgcaacaccatgcacggtgtagtagctaagagcagagctttcgggtgtgaagtacctgagtacagttcctgccttcccctgtgtgtgcctggaacagagtaaacactcaggaagcgttacccactgctgccattcccagagatgcaaaaggccgagtgtactacttcaaccacatcactaacgccagccagtgggagcggcccagcggcaacagcagcagtggtggcaaaaacgggcagggggagcctgccagggtccgctgctcgcacctgctggtgaagcacagccagtcacggcggccctcgtcctggcggcaggagaagatcacccggaccaaggaggaggccctggagctgatcaacggctacatccagaagatcaagtcgggagaggaggactttgagtctctggcctcacagttcagcgactgcagctcagccaaggccaggggagacctgggtgccttcagcagaggtcagatgcagaagccatttgaagacgcctcgtttgcgctgcggacgggggagatgagcgggcccgtgttcacggattccggcatccacatcatcctccgcactgagtgctggaggcagactcgagggccgaattgtttctagttaggccacgctcctctgttcagtcgcaaaggtgaacactcatgcggcccagccatgggccctctgagcaactgtgcagcaccctttcacccccaattaaacccagaaccactg

SEQ ID NO: 162975 - DNA, 1656 bp, Artificial Sequence
  derived and/or modified sequence
aggcgctgcggcaggagggaagatggcggacgaggagaagctgccgcccggctgggagaagcgcatgagccgcagctcaggccgagtgtactacttcaaccacatcactaacgccagccagtgggagcggcccagcggcaacagcagcagtggtggcaaaaacgggcagggggagcctgccagggtccgctgctcgcacctgctggtgaagcacagccagtcacggcggccctcgtcctggcggcaggagaagatcacccggaccaaggaggaggccctggagctgatcaacggctacatccagaagatcaagtcgggagaggaggactttgagtctctggcctcacagttcagcgactgcagctcagccaaggccaggggagacctgggtgccttcagcagaggtgcgcaaggaatgggcctcaccaggttgggggacccttaccaccctgaggggtagaggccaggagggtctgggcattgggctcccaggtgccacaccggccttcggggtccagcaggtggcagcacagccccttcctcaggcttcagaggctgctctgctgggcagggccagggccacacagggaggggggctgcagcactttcttcctggcatcatctctaccctggggggcatggtctcttgtgtgtctgtgcacgtgtcttagtggggtggggcggcagcatggggccagcagctgcccacctcctccgaggaggctggtgggacagatgacatggcagggctgggaaccaggcccagggagacgagttcactaccgaagtggcccctaaatgcacggcggcggccgtagccctgcctgctatccttcatgctgtcctcgggcttcccagggcctccttaatggccctgccacccccagctgggccgccgctcagcactggcaataaacatggtgacggatgagtgtggacgagtgtgaggctcagcgcaggcaggagccccatctgtcgcggctgccacccgccctgcctcatcctggcctctgccagcccagccctgacacccccaccgcccctcctggctcccaggtcagatgcagaagccatttgaagacgcctcgtttgcgctgcggacgggggagatgagcgggcccgtgttcacggattccggcatccacatcatcctccgcactgagtgagggtggggagcccaggcctggcctcggggcagggcagggcggctaggccggccagctcccccttgcccgccagccagtggccgaaccccccactccctgccaccgtcacacagtatttattgttcccacaatggctgggagggggcccttccagattgggggccctggggtccccactccctgtccatccccagttggggctgcgaccgccagattctcccttaaggaattgacttcagcaggggtgggaggctcccagacccagggcagtgtggtgggaggggtgttccaaagagaaggcctggtcagcagagccgccccgtgtccccccaggtgctggaggcagactcgagggccgaattgtttctagttaggccacgctcctctgttcagtcgcaaaggtgaacactcatgcggcccagccatgggccctctgagcaactgtgcagcaccctttcacccccaattaaacccagaaccactgctctgc

SEQ ID NO: 162976 - protein, 156 aa, Artificial Sequence
  derived and/or modified sequence
MPMAGLLKGLVRQLERFSVQQQASKMPPKGKSGSGKAGKGGAASGSDSADKKAQGPKGGGNAVKVRHILCEKHGKIMEAMEKLKSGMRFNEVAAQYSEDKARQGGDLGWMTRGSMVGPFQEAAFALPVSGMDKPVFTDPPVKTKFGYHIIMVEGRK

SEQ ID NO: 162977 - DNA, 471 bp, Artificial Sequence
  derived and/or modified sequence
atgccaatggccgggctgctcaaaggccttgtgcgacagctggaaagattcagcgttcagcagcaggcctccaagatgccacctaaaggcaagtctggttctggaaaggcagggaaggggggagctgccagcggctccgactccgcagataagaaggcccagggcccaaaaggcggcggaaacgccgtgaaagtcagacacatcctttgtgagaaacacggaaaaatcatggaggctatggagaagctaaagagcggtatgagatttaacgaggttgccgcccaatattccgaggacaaggcgcggcaggggggagacctgggatggatgacaagaggcagcatggtgggccctttccaagaggcagcctttgccctgcccgtatccggtatggacaaacccgtctttacagacccacctgtgaagaccaagttcggatatcatatcattatggtggagggccgcaaatag

SEQ ID NO: 162978 - DNA, 471 bp, Artificial Sequence
  derived and/or modified sequence
atgcccatggccggcctgctgaagggcctggtgcggcagctggagcgcttctctgtgcagcagcaggccagcaagatgccacccaagggcaagagcggcagcggcaaggccgggaaaggaggagctgccagcggcagtgacagcgctgacaagaaggcccagggccccaagggcggcggcaatgctgtgaaggtgcgccacatcctgtgtgagaagcacggcaagatcatggaggccatggagaagctgaagagcggcatgaggttcaatgaggtggccgcccagtacagcgaggacaaggcccggcagggcggggacctgggctggatgacccggggctccatggtgggccccttccaggaggccgcctttgccctgcctgtgtctggcatggacaagcctgtgttcacagatcctcctgtgaagaccaagtttggctaccacatcatcatggtggagggcaggaagtag

SEQ ID NO: 162979 - DNA, 471 bp, Artificial Sequence
  derived and/or modified sequence
atgcccatggccggcctgctgaagggcctggtgcggcagctggagcggttttcagtgcagcagcaagcgtctaaaatgccccctaagggcaaatctgggtctggtaaagcgggcaaagggggagccgctagtggctccgacagcgctgacaagaaggctcagggccctaaaggcggggggaatgctgtcaaggttcgccacatcctttgtgagaaacacggaaagattatggaggctatggaaaaacttaagtctgggatgcgatttaatgaggtagccgcacagtactctgaagacaaagcccgccaaggaggggacttagggtggatgacgcgcgggtccatggttggaccctttcaggaagcagcttttgctctccctgtcagcggcatggataaaccagtttttacagatccacccgttaagacaaaattcggataccacattattatggttgaaggacggaaatag

SEQ ID NO: 162980 - DNA, 471 bp, Artificial Sequence
  derived and/or modified sequence
atgccaatggccggactcttgaagggactggtcaggcagcttgaacggttttccgttcagcaacaagcttctaagatgccccctaagggcaaatcaggctccggtaaggcaggcaagggtggagcagccagcggatccgacagcgccgacaaaaaagctcagggccctaagggcggaggtaatgccgtaaaggtgaggcacattctctgcgagaaacacggcaagatcatggaagcaatggagaaacttaaaagcggcatgcgatttaacgaggtagccgcacagtattctgaggacaaggcaagacagggcggagatctgggatggatgacgcggggatccatggtgggcccatttcaggaggcagctttcgctttaccagtcagtgggatggacaagccagtgtttaccgaccctcctgttaagactaagttcggttaccacataataatggtggaaggacgtaagtag

SEQ ID NO: 162981 - DNA, 1321 bp, Artificial Sequence
  derived and/or modified sequence
tgagatgcggctttcaggcatttgtttaggacatgcccatggcggggcttctaaaggggcttgtacggcaactggagcggttcagcgttcaacaacaagcttccaagatgccgcccaaaggaaaaagtggttctggaaaagcggggaaagggggagcagcctctgggagtgacagtgctgacaagaaggctcaaggtcccaaaggtggtggcaatgcagtaaaggtcagacacattctatgtgaaaaacatggcaaaatcatggaagccatggaaaagttaaagtctgggatgagattcaatgaagtggccgcacagtatagtgaagataaagccaggcaagggggtgacttgggttggatgaccagagggtccatggtgggaccatttcaagaagcagcatttgccttgcctgtaagtgggatggataagcctgtgtttacagacccaccggttaagacaaaatttggatatcatattattatggtcgaaggaagaaaataaaatcatatgaaagactgaataagttttatacattttgtttctttaaaaggtattacatattcttttgagctggagctgcaaggaaatacaaaaatttttaaaaagaaaagatattggatgctccttgtattctgtgaaagctctaagtatgggtttgtaggtgtaagagagggtggggctaagtgaatgtcaactgtagtaggtattcagtcagtctttctcaaagagaagtcaagcagactccctttaacctgtattctctttcctcccagaactatatctgactctcagtctgtcccataaattaattcagaaaccatcttcaggggaagcagatatcaactcacactattcacacaactgaaaatattgggcatcaaatagattagtgtgtgagaatcataaaataagttcctagacaacatttgttttacatgttagtcaactctgatcttccaggacaggtggtattagctccactgtcttaacatagtacgtggcacgttatgcctttcagtgttaactcctttctttttaaataaatgtttattggaggaaaaaagcactcagttgttccatgagttgttttgtactagactaaccgagtgctggttaaagggagggatgtcagcataaaaatgtcattccctcatcttcagtgtatgggttacattaagactgtcctttccagggccaatgttctgtgcatctaaatttttaaaatttaaaatgccatatttatgacatataaaaaagtataaagattactaatataaatactatactgcttcaaaaataaaactttgccaacacagcta

SEQ ID NO: 162982 - DNA, 471 bp, Artificial Sequence
  derived and/or modified sequence
atgcccatggccggcctgctgaagggcctggtgagacagctggagagattcagcgtgcagcagcaggccagcaagatgccccccaagggcaagagcggcagcggcaaggccggcaagggcggcgccgccagcggcagcgacagcgccgacaagaaggcccagggccccaagggcggcggcaacgccgtgaaggtgagacacatcctgtgcgagaagcacggcaagatcatggaggccatggagaagctgaagagcggcatgagattcaacgaggtggccgcccagtacagcgaggacaaggccagacagggcggcgacctgggctggatgaccagaggcagcatggtgggccccttccaggaggccgccttcgccctgcccgtgagcggcatggacaagcccgtgttcaccgacccccccgtgaagaccaagttcggctaccacatcatcatggtggagggcagaaagtag

SEQ ID NO: 162983 - protein, 270 aa, Artificial Sequence
  derived and/or modified sequence
MVLLKEYRVILPVSVDEYQVGQLYSVAEASKNETGGGEGVEVLVNEPYEKDGEKGQYTHKIYHLQSKVPTFVRMLAPEGALNIHEKAWNAYPYCRTVITNEYMKEDFLIKIETWHKPDLGTQENVHKLEPEAWKHVEAVYIDIADRSQVLSKDYKAEEDPAKFKSIKTGRGPLGPNWKQELVNQKDCPYMCAYKLVTVKFKWWGLQNKVENFIHKQERRLFTNFHRQLFCWLDKWVDLTMDDIRRMEEETKRQLDEMRQKDPVKGMTADD

SEQ ID NO: 162984 - protein, 270 aa, Artificial Sequence [sequence omitted]

SEQ ID NO: 162985 - protein, 197 aa, Artificial Sequence
  derived and/or modified sequence
MLAPEGALNIHEKAWNAYPYCRTVLPNEYMKEDFLIKIETWHKPDLGTQENVHKLEPEAWKHVEAVYIDIADRSQVLSKDYKAEEDPAKFKSIKTGRGPLGPNWKQELVNQKDCPYMCAYKLVTVKFKWWGLQNKVENFIHKQERRLFTNFHRQLFCWLDKWVDLTMDDIRRMEEETKRQLDEMRQKDPVKGMTADD

SEQ ID NO: 162986 - DNA, 813 bp, Artificial Sequence
  derived and/or modified sequence
atggttctgctgaaggaatatcgcgttatcttacctgtttcagtcgatgagtaccaggtcgggcagctctactctgtggctgaggcatctaaaaatgagaccggcgggggagaaggcgttgaggtgttggtgaacgagccctacgaaaaggatggagaaaagggccagtacacccacaagatctatcacttgcagagcaaggttccaacttttgtgcggatgctggcacccgaaggagccttgaatattcacgagaaagcctggaacgcgtatccatattgtagaacagtcattactaatgaatacatgaaagaggacttcctcatcaaaatcgagacatggcacaaaccagatttgggaacccaggagaacgtacacaagctcgaaccagaggcatggaaacacgtcgaggcggtctatatagacatcgcggatcggagccaagtactctctaaggattacaaggcggaagaggaccctgccaagtttaagtccataaagacaggacgcggtcctctggggcccaattggaaacaagagctggtaaatcagaaggattgtccatacatgtgcgcctataagctcgtgacagtcaagtttaaatggtggggactgcagaacaaagtcgaaaattttattcacaaacaggagagacggctctttacaaactttcaccggcagcttttctgttggctggacaaatgggtggacctgactatggatgacattcgtcggatggaagaagagaccaagcggcagctggatgaaatgaggcaaaaagatcctgtcaagggtatgaccgccgacgattag

SEQ ID NO: 162987 - DNA, 813 bp, Artificial Sequence
  derived and/or modified sequence
atggtactcctcaaagaataccgggtgatcctccctgtgtctgtagatgaataccaggtgggacagttgtactcagtcgctgaagcctctaaaaacgagacgggagggggcgaaggggttgaggtcctcgttaacgagccttacgaaaaggatggcgagaagggccagtacacacataagatctaccatttgcagtctaaagttcctacatttgttcgcatgctggctcccgagggggctttgaacatccatgaaaaggcatggaatgcgtacccctattgtaggaccgtgcttcctaatgagtatatgaaggaggacttcttgatcaagatcgagacctggcacaagccagatctcggaacacaagagaacgtgcacaagctcgaaccagaagcatggaaacacgtggaggctgtatatatcgatattgcagaccggagccaggtcttatcaaaggattacaaggcagaggaggatcctgccaaatttaagagcatcaaaactggtagaggaccattgggacccaattggaaacaggaattggttaaccagaaggattgcccatacatgtgcgcatacaaactggttacagttaaatttaaatggtggggactgcagaacaaggtggagaattttatccataaacaagaacgtcgattattcacaaatttccatcgacagctcttttgctggctggataagtgggtagatttgaccatggatgatattcggcgcatggaggaagagacaaagcggcaactggacgagatgcggcagaaggatcccgttaaagggatgaccgccgacgactag

SEQ ID NO: 162988 - DNA, 813 bp, Artificial Sequence
  derived and/or modified sequence
atggtgctgctgaaggagtacagagtcatcctgcctgtgtctgtggatgagtaccaggtgggccagctgtacagcgtggccgaggccagcaagaatgagaccggcggcggggagggcgtggaggtgctggtgaatgagccctatgagaaggatggagagaagggccagtacacccacaagatctaccacctgcagagcaaggtgcccacctttgtgaggatgctggcccctgagggcgccctgaacatccacgagaaggcctggaatgcctacccctactgcaggacagtcatcaccaatgagtacatgaaggaggacttcctgatcaagattgagacctggcacaagccagacctgggcacccaggagaatgtgcacaagctggagcctgaggcctggaagcacgtggaggccgtgtacattgatattgctgacaggagccaggtgctgagcaaggactacaaggccgaggaggaccctgccaagttcaagagcatcaagacaggccggggccccctgggccccaactggaagcaggagctggtgaaccagaaggactgcccctacatgtgtgcctacaagctggtgacagtgaagttcaagtggtggggcctgcagaacaaggtggagaacttcatccacaagcaggagcggcggctcttcaccaacttccaccggcagctgttctgctggctggacaagtgggtggacctgaccatggatgacatccggaggatggaggaggagaccaagaggcagctggatgagatgaggcagaaggaccctgtgaagggcatgacagcagatgactag

SEQ ID NO: 162989 - DNA, 813 bp, Artificial Sequence
  derived and/or modified sequence
atggtgctgctgaaggagtacagagtcatcctgcctgtgtctgtggatgagtaccaggtgggccagctgtacagcgtggccgaggccagcaagaatgagaccggcggcggggagggcgtggaggtgctggtgaatgagccctatgagaaggatggagagaagggccagtacacccacaagatctaccacctgcagagcaaggtgcccacctttgtgaggatgctggcccctgagggcgccctgaacatccacgagaaggcctggaatgcctacccctactgcaggacagtgctgcccaatgagtacatgaaggaggacttcctgatcaagattgagacctggcacaagccagacctgggcacccaggagaatgtgcacaagctggagcctgaggcctggaagcacgtggaggccgtgtacattgatattgctgacaggagccaggtgctgagcaaggactacaaggccgaggaggaccctgccaagttcaagagcatcaagacaggccggggccccctgggccccaactggaagcaggagctggtgaaccagaaggactgcccctacatgtgtgcctacaagctggtgacagtgaagttcaagtggtggggcctgcagaacaaggtggagaacttcatccacaagcaggagcggcggctcttcaccaacttccaccggcagctgttctgctggctggacaagtgggtggacctgaccatggatgacatccggaggatggaggaggagaccaagaggcagctggatgagatgaggcagaaggaccctgtgaagggcatgacagcagatgactag

SEQ ID NO: 162990 - DNA, 813 bp, Artificial Sequence
  derived and/or modified sequence
atggtgctgctgaaggagtaccgggtgatcctgcccgtgagcgtggacgaataccaggttggccaactctacagcgtggccgaggcttctaaaaatgagacaggggggggagagggagtggaggtgctggtgaacgaaccatatgaaaaagatggcgaaaaaggccagtatactcacaagatctaccatctgcagtccaaggttccaacatttgttagaatgctggcgccggagggagcgctgaacatccatgaaaaggcgtggaatgcgtacccgtactgtcggactgtcatcacaaacgagtacatgaaagaggacttcctgattaagattgagacgtggcacaaaccggacctcggcacacaggagaatgtacacaagttggagccagaggcctggaaacacgttgaagccgtgtatatcgatatagctgacaggagtcaagttctgtctaaagattacaaagccgaggaagacccagcaaagttcaagtctattaagacaggccgtggcccccttgggccgaactggaagcaggagctcgtgaatcaaaaagattgcccatatatgtgcgcgtataaactggtcaccgtcaagtttaagtggtggggactacaaaataaagtggagaatttcatccacaagcaagaaagaagactcttcacaaattttcacagacagctgttttgttggctagataagtgggttgacctgacaatggacgacatccggcgaatggaagaggagacgaagcgacagcttgacgaaatgcggcagaaggaccctgtcaaaggcatgactgcagacgactag

SEQ ID NO: 162991 - DNA, 813 bp, Artificial Sequence
  derived and/or modified sequence
atggtgctgctgaaggagtaccgggtgatcctgcccgtgagcgtggatgagtaccaagtgggccagctgtactctgtggctgaggcgtcaaagaacgaaaccggagggggcgagggcgtggaagtgctggtgaatgagccatacgaaaaggacggcgagaaagggcagtacactcacaaaatctaccacctccagagcaaagtccctacatttgttcgcatgctggctccagaaggagcccttaatatccatgagaaagcatggaatgcctatccgtattgccgcacagtcctgccaaacgagtacatgaaggaggattttctgattaaaatagaaacgtggcacaagccagacctgggcacccaagaaaatgtccataagctggagcccgaggcctggaaacacgtcgaggcggtgtatatcgacattgccgatcgctctcaagtgctcagtaaggactacaaagcggaagaggacccagctaaattcaagagtattaagacggggcgtggcccactggggccaaattggaagcaggagctcgtaaaccagaaggattgcccctacatgtgtgcatataagctggtaactgtgaaattcaagtggtggggcctccagaataaggtcgagaattttatccacaaacaagagcgaaggctcttcacaaatttccacagacagctcttctgctggctggataaatgggtcgatctcactatggacgacatcaggcgaatggaagaggaaactaaaaggcaacttgatgagatgcggcagaaagaccccgtcaagggcatgaccgcggatgactag

SEQ ID NO: 162992 - DNA, 3637 bp, Artificial Sequence
  derived and/or modified sequence
ttgccgcagagacgccccgcccccgcgcggcgctgcggaaccggagctccgggcggcgtcggcagcggcgcgagaggcgacgaggcccgggcggcaggagccggcgcggcgaccgcggcgagggcggcggggacggagcagagcacgacgaagacgcacaggcagccgggccgggccgggccacggggagagcggccggcgggcagcgggcgggaggccgggcgggccgcgggcagccaccgagccgcgaagcgacatggtgctgctcaaggagtatcgagtaatcctgcctgtgtctgtagatgagtatcaagtggggcagctgtattctgtggctgaggccagtaaaaatgaaacgggtggtggcgaaggcgtggaggtcctggtgaatgagccctacgagaaggacggtgagaaaggccagtacacacacaagatctaccacctgcagagcaaagtacccacgtttgttcgaatgctggccccagagggagccctgaatatacacgagaaagcctggaatgcttacccctactgcagaaccgttattacaaatgagtacatgaaagaagactttctgattaaaattgaaacctggcacaaaccagatcttggcacgcaggagaatgtgcataagctggagcctgaggcgtggaaacacgtggaagccgtatatatagacattgcagatcgaagccaagtgctcagcaaggattacaaggcagaggaagacccagcaaaatttaaatctatcaaaacaggccgaggacccttgggccccaattggaagcaagagcttgtaaaccagaaggactgcccatatatgtgtgcatacaaactggtgaccgtcaagttcaagtggtggggcctgcagaacaaagtggagaacttcatccataagcaagagaggcgtctgtttacaaacttccacaggcagctgttctgttggctcgataagtgggttgacctgaccatggacgacattcgaaggatggaagaagagacgaagagacagctggatgaaatgagacaaaaggacccagtgaaaggaatgacagcagatgactaaagccgcctttcccctctgcactttttgcaagacagtggtcaacaggaagacccagcagctccaccctcccaagtgacaggccattttcggacgcagccgttctgtgcccattcttcaggcaactttcgattccttactgtagctaattctagatgcccttcagtattgtgaacaaatagaccgtctggtgtcacagagcccgcgtgtgcaggagcctgctcctccgagatacgtggcgtgtaggttgctgtagttacagcgcctccgtctctctccattgtgttccgatccatttctgtgtgttcccccaacctttatttccaagtgacattttcagtctttcaaatagctgccttttgtgatgtggtgatttaaatgatttaagttcatttgttctcaaccttggggtaaactgaggtattttgcttcctgggaagatcttcgcaattttgagtgctcctgtggggagcggggatgagctaaagatacaatgtttccctgccccgcaccgcttccacaaaatagcaatgtggttttgcagctctgacttctgctcccagtaacccatcgttagggcactctagcactatggaggtacccaaggctcagccagtctctatttaagaaaatttaacaaatacgagtaaccctgtcccaatcactgaatctctagttactactcttagaaacacctgtggcttcttggccctcctgttgcccgctctgaatctctctgcagtctacaaaatcgccccagtcaactctccacttggagggaattgtccagtgtggcccctagaattgagtcaccccctagataccaactgtctgaccccgaggagctctgtaagtccctgctcctcctcttccctttggggctggtgctgccactcagcaataatcctcttttctctgtgctttcttaggtccctgtcctctgtctttgaggctggttaggaagcaagagtcctgatctttcatgctgcacaatatgagcatgcaaaaagctttttccagcagaacatgttccctcgtctccagttgccggaaaggaatttggggatcaagaacttagctcgtcctacccccatgttgagttctgccctggaaaacccaaagcaagtagtgatcatagtacagaacccgaccaaagtaggctggtgaggaagtccaggctccaggggaacagacgctgcccagtgttcatagcttcctgcaacttgacagagcctgagtttgcctcttagtgggagaatgagagagagctgtagtgtcacctgacattccccaaaccttgtgaagcacgttggcctaagtgtgccgtgatcccagcccacactagcctgggtgcatctgctaatgggagaccaaatctttgtccgggaagcaagaagtgggtgggagaatgtatcctgtttttgtcagtttgtttgccttactcatttctaagtgcaataagggagtgtctcacaggattgcacctgtgacatcctgatggatgcttccctgtggccctcctggggcaagggtggacagactcagacccccagcatggttagcgctgaccttcattgaggtccctttggaaccagatgtcttgttacagacaccttcctctgtgtaagtctcctcaccttgaggggtctttagtaatgcatctgggtagcatctcaactgctggtagcatttatctgacttggaaagttggagaagaggcattcctactggagaaaaatgtcagtgttttcctataagctctgtgttagctattcattatatttgtgcttaaagatgttccttcattcatcaactaggggaagtccagatgcgggttatcttgaaagaaacaaactgacattctaggcagacagttgtctatgtggtctgagggtcagcagctgttagtctccttcctttggctcttgagacccacacatatcactttagccctaacaagggctcctcccacctccacctgttgccccagttgaaaagcatccattatgagctgaggtcagcctggatctggaattgcagcccacataaacataaaggaggatgtccctggtctgttccatccccacggatggtgttgctgctgggcaacagtgttggcttcttttaagtaccccctttcctcctcacccacctccaaactgactagcactcagagggacttatgataaaggttcagctccaggggtagtacctgagtgtgtgccatgccccttcagaccagctgcttccatcagaattccagggtcacagccccaacagaagcagcagtgcctctgtaggaggggtgctgggctctggccttctcatgcagagaggtccgggacagggtcagtatcgtgggcatgtgtatagcttcccaagttcttttacagtccctgctgggactccctgacttactttggttggttcctagtgctacttgttttacaaactacactttgtagaattgattagattaccttgtttatttaatgtgagtttgtgcctttttgtctcaatcttccaatacaggtatattgagaaaaaaagcagtctaataaaatcctagac

SEQ ID NO: 162993 - DNA, 3637 bp, Artificial Sequence
  derived and/or modified sequence
ttgccgcagagacgccccgcccccgcgcggcgctgcggaaccggagctccgggcggcgtcggcagcggcgcgagaggcgacgaggcccgggcggcaggagccggcgcggcgaccgcggcgagggcggcggggacggagcagagcacgacgaagacgcacaggcagccgggccgggccgggccacggggagagcggccggcgggcagcgggcgggaggccgggcgggccgcgggcagccaccgagccgcgaagcgacatggtgctgctcaaggagtatcgagtaatcctgcctgtgtctgtagatgagtatcaagtggggcagctgtattctgtggctgaggccagtaaaaatgaaacgggtggtggcgaaggcgtggaggtcctggtgaatgagccctacgagaaggacggtgagaaaggccagtacacacacaagatctaccacctgcagagcaaagtacccacgtttgttcgaatgctggccccagagggagccctgaatatacacgagaaagcctggaatgcttacccctactgcagaaccgttcttccaaatgagtacatgaaagaagactttctgattaaaattgaaacctggcacaaaccagatcttggcacgcaggagaatgtgcataagctggagcctgaggcgtggaaacacgtggaagccgtatatatagacattgcagatcgaagccaagtgctcagcaaggattacaaggcagaggaagacccagcaaaatttaaatctatcaaaacaggccgaggacccttgggccccaattggaagcaagagcttgtaaaccagaaggactgcccatatatgtgtgcatacaaactggtgaccgtcaagttcaagtggtggggcctgcagaacaaagtggagaacttcatccataagcaagagaggcgtctgtttacaaacttccacaggcagctgttctgttggctcgataagtgggttgacctgaccatggacgacattcgaaggatggaagaagagacgaagagacagctggatgaaatgagacaaaaggacccagtgaaaggaatgacagcagatgactaaagccgcctttcccctctgcactttttgcaagacagtggtcaacaggaagacccagcagctccaccctcccaagtgacaggccattttcggacgcagccgttctgtgcccattcttcaggcaactttcgattccttactgtagctaattctagatgcccttcagtattgtgaacaaatagaccgtctggtgtcacagagcccgcgtgtgcaggagcctgctcctccgagatacgtggcgtgtaggttgctgtagttacagcgcctccgtctctctccattgtgttccgatccatttctgtgtgttcccccaacctttatttccaagtgacattttcagtctttcaaatagctgccttttgtgatgtggtgatttaaatgatttaagttcatttgttctcaaccttggggtaaactgaggtattttgcttcctgggaagatcttcgcaattttgagtgctcctgtggggagcggggatgagctaaagatacaatgtttccctgccccgcaccgcttccacaaaatagcaatgtggttttgcagctctgacttctgctcccagtaacccatcgttagggcactctagcactatggaggtacccaaggctcagccagtctctatttaagaaaatttaacaaatacgagtaaccctgtcccaatcactgaatctctagttactactcttagaaacacctgtggcttcttggccctcctgttgcccgctctgaatctctctgcagtctacaaaatcgccccagtcaactctccacttggagggaattgtccagtgtggcccctagaattgagtcaccccctagataccaactgtctgaccccgaggagctctgtaagtccctgctcctcctcttccctttggggctggtgctgccactcagcaataatcctcttttctctgtgctttcttaggtccctgtcctctgtctttgaggctggttaggaagcaagagtcctgatctttcatgctgcacaatatgagcatgcaaaaagctttttccagcagaacatgttccctcgtctccagttgccggaaaggaatttggggatcaagaacttagctcgtcctacccccatgttgagttctgccctggaaaacccaaagcaagtagtgatcatagtacagaacccgaccaaagtaggctggtgaggaagtccaggctccaggggaacagacgctgcccagtgttcatagcttcctgcaacttgacagagcctgagtttgcctcttagtgggagaatgagagagagctgtagtgtcacctgacattccccaaaccttgtgaagcacgttggcctaagtgtgccgtgatcccagcccacactagcctgggtgcatctgctaatgggagaccaaatctttgtccgggaagcaagaagtgggtgggagaatgtatcctgtttttgtcagtttgtttgccttactcatttctaagtgcaataagggagtgtctcacaggattgcacctgtgacatcctgatggatgcttccctgtggccctcctggggcaagggtggacagactcagacccccagcatggttagcgctgaccttcattgaggtccctttggaaccagatgtcttgttacagacaccttcctctgtgtaagtctcctcaccttgaggggtctttagtaatgcatctgggtagcatctcaactgctggtagcatttatctgacttggaaagttggagaagaggcattcctactggagaaaaatgtcagtgttttcctataagctctgtgttagctattcattatatttgtgcttaaagatgttccttcattcatcaactaggggaagtccagatgcgggttatcttgaaagaaacaaactgacattctaggcagacagttgtctatgtggtctgagggtcagcagctgttagtctccttcctttggctcttgagacccacacatatcactttagccctaacaagggctcctcccacctccacctgttgccccagttgaaaagcatccattatgagctgaggtcagcctggatctggaattgcagcccacataaacataaaggaggatgtccctggtctgttccatccccacggatggtgttgctgctgggcaacagtgttggcttcttttaagtaccccctttcctcctcacccacctccaaactgactagcactcagagggacttatgataaaggttcagctccaggggtagtacctgagtgtgtgccatgccccttcagaccagctgcttccatcagaattccagggtcacagccccaacagaagcagcagtgcctctgtaggaggggtgctgggctctggccttctcatgcagagaggtccgggacagggtcagtatcgtgggcatgtgtatagcttcccaagttcttttacagtccctgctgggactccctgacttactttggttggttcctagtgctacttgttttacaaactacactttgtagaattgattagattaccttgtttatttaatgtgagtttgtgcctttttgtctcaatcttccaatacaggtatattgagaaaaaaagcagtctaataaaatcctagac

SEQ ID NO: 162994 - DNA, 1002 bp, Artificial Sequence
  derived and/or modified sequence
cctgctactttcctgcttggtgtcttgcctttgagtcgagtaatcctgcctgtgtctgtagatgagtatcaagtggggcagctgtattctgtggctgaggccagtaaaaatgaaacgggtggtggcgaaggcgtggaggtcctggtgaatgagccctacgagaaggacggtgagaaaggccagtacacacacaagatctaccacctgcagagcaaagtacccacgtttgttcgaatgctggccccagagggagccctgaatatacacgagaaagcctggaatgcttacccctactgcagaaccgttcttccaaatgagtacatgaaagaagactttctgattaaaattgaaacctggcacaaaccagatcttggcacgcaggagaatgtgcataagctggagcctgaggcgtggaaacacgtggaagccgtatatatagacattgcagatcgaagccaagtgctcagcaaggattacaaggcagaggaagacccagcaaaatttaaatctatcaaaacaggccgaggacccttgggccccaattggaagcaagagcttgtaaaccagaaggactgcccatatatgtgtgcatacaaactggtgaccgtcaagttcaagtggtggggcctgcagaacaaagtggagaacttcatccataagcaagagaggcgtctgtttacaaacttccacaggcagctgttctgttggctcgataagtgggttgacctgaccatggacgacattcgaaggatggaagaagagacgaagagacagctggatgaaatgagacaaaaggacccagtgaaaggaatgacagcagatgactaaagccgcctttcccctctgcactttttgcaagacagtggtcaacaggaagacccagcagctccaccctcccaagtgacaggccattttcggacgcagccgttctgtgcccattcttcaggcaactttcgattccttactgtagctaattctagatgcccttcagtattgtgaaca

SEQ ID NO: 162995 - DNA, 813 bp, Artificial Sequence
  derived and/or modified sequence
atggttttactgaaggagtatagggtgatcctgccggtgagtgtagacgagtaccaggtaggccagttgtactctgtggcggaggcatctaagaatgagacgggcggaggagagggcgtagaagtactggtcaatgaaccttacgaaaaagatggggagaagggccagtacacccacaagatctaccacctccagtctaaggtgcccacgttcgtgcggatgttagctcccgagggtgcactcaatatacacgaaaaagcatggaacgcctatccctattgccgaaccgtaataacgaacgagtacatgaaggaagacttcttgattaaaattgagacatggcacaagccagacctggggacccaggaaaacgtgcataaattggagcccgaggcatggaaacacgtggaggctgtgtatatcgatatcgctgatcggtctcaagtgttatctaaggactataaagcagaagaagaccccgctaaattcaagtcaatcaagactgggcgaggacccctgggtccaaattggaaacaggaactggtcaaccaaaaggattgtccctatatgtgtgcctataaactcgttacagtgaagttcaagtggtgggggctgcagaacaaggtggagaactttatccataaacaggagcgccgtctcttcaccaattttcaccgccaactgttctgttggctggataaatgggtcgacttgactatggacgatattagacgtatggaggaggagacaaaacgtcagcttgacgaaatgagacagaaggatccagtgaaagggatgaccgcggacgactag

SEQ ID NO: 162996 - DNA, 813 bp, Artificial Sequence
  derived and/or modified sequence
atggtgctgctgaaagaataccgggtaatcctgcccgtgtccgtagatgagtatcaggtaggccagttatattcagtcgccgaggcttcaaaaaacgagaccggagggggagaaggcgttgaggtattggtaaatgagccatacgaaaaggatggggagaagggccagtatactcacaagatttatcatctgcagtccaaggtcccaacctttgtaaggatgcttgcccctgagggggctctgaacatacacgagaaagcttggaatgcatacccctattgtcgaactgttttgcctaatgaatatatgaaggaagacttcctgatcaagattgagacttggcataagcccgatctgggaacccaggaaaacgtccataaactggagcccgaggcatggaaacatgtggaagcagtgtacatcgacatcgctgacaggtcccaagtcttgtcaaaggactataaggccgaagaggaccccgctaaatttaagagcatcaagacaggacggggacctctgggacctaattggaagcaggagctggtaaaccaaaaagattgcccttacatgtgcgcatacaaattagtgactgtgaaatttaaatggtggggactgcaaaacaaagtggagaactttatccataaacaagaacggcgtctgttcacaaattttcacaggcagctcttctgttggctggacaagtgggtcgatctgactatggatgacataaggaggatggaggaagagacaaaaaggcaactcgatgaaatgagacaaaaggaccctgtcaaaggcatgactgcagacgattag

SEQ ID NO: 162997 - DNA, 813 bp, Artificial Sequence
  derived and/or modified sequence
atggtgctgctgaaggagtacagagtgatcctgcccgtgagcgtggacgagtaccaggtgggccagctgtacagcgtggccgaggccagcaagaacgagaccggcggcggcgagggcgtggaggtgctggtgaacgagccctacgagaaggacggcgagaagggccagtacacccacaagatctaccacctgcagagcaaggtgcccaccttcgtgagaatgctggcccccgagggcgccctgaacatccacgagaaggcctggaacgcctacccctactgcagaaccgtgatcaccaacgagtacatgaaggaggacttcctgatcaagatcgagacctggcacaagcccgacctgggcacccaggagaacgtgcacaagctggagcccgaggcctggaagcacgtggaggccgtgtacatcgacatcgccgacagaagccaggtgctgagcaaggactacaaggccgaggaggaccccgccaagttcaagagcatcaagaccggcagaggccccctgggccccaactggaagcaggagctggtgaaccagaaggactgcccctacatgtgcgcctacaagctggtgaccgtgaagttcaagtggtggggcctgcagaacaaggtggagaacttcatccacaagcaggagagaagactgttcaccaacttccacagacagctgttctgctggctggacaagtgggtggacctgaccatggacgacatcagaagaatggaggaggagaccaagagacagctggacgagatgagacagaaggaccccgtgaagggcatgaccgccgacgactag

SEQ ID NO: 162998 - DNA, 813 bp, Artificial Sequence
  derived and/or modified sequence
atggtgctgctgaaggagtacagagtgatcctgcccgtgagcgtggacgagtaccaggtgggccagctgtacagcgtggccgaggccagcaagaacgagaccggcggcggcgagggcgtggaggtgctggtgaacgagccctacgagaaggacggcgagaagggccagtacacccacaagatctaccacctgcagagcaaggtgcccaccttcgtgagaatgctggcccccgagggcgccctgaacatccacgagaaggcctggaacgcctacccctactgcagaaccgtgctgcccaacgagtacatgaaggaggacttcctgatcaagatcgagacctggcacaagcccgacctgggcacccaggagaacgtgcacaagctggagcccgaggcctggaagcacgtggaggccgtgtacatcgacatcgccgacagaagccaggtgctgagcaaggactacaaggccgaggaggaccccgccaagttcaagagcatcaagaccggcagaggccccctgggccccaactggaagcaggagctggtgaaccagaaggactgcccctacatgtgcgcctacaagctggtgaccgtgaagttcaagtggtggggcctgcagaacaaggtggagaacttcatccacaagcaggagagaagactgttcaccaacttccacagacagctgttctgctggctggacaagtgggtggacctgaccatggacgacatcagaagaatggaggaggagaccaagagacagctggacgagatgagacagaaggaccccgtgaagggcatgaccgccgacgactag

SEQ ID NO: 162999 - protein, 756 aa, Artificial Sequence
  derived and/or modified sequence
MDSGRDFLTLHGLQDDEDLQALLKGSQLLKVKSSSWRRERFYKLQEDCKTIWQESRKVMRTPESQLFSIEDIQEVRMGHRTEGLEKFARDVPEDRCFSIVFKDQRNTLDLIAPSPADAQHWVLGLHKIIHHSGSMDQRQKLQHWIHSCLRKADKNKDNKMSFKELQNFLKELNIQVDDSYARKIFRECDHSQTDSLEDEEIEAFYKMLTQRVEIDRTFAEAAGSGETLSVDQLVTFLQHQQREEAAGPALALSLIERYEPSETAKAQRQMTKDGFLMYLLSADGSAFSLAHRRVYQDMGQPLSHYLVSSSHNTYLLEDQLAGPSSTEAYIRALCKGCRCLELDCWDGPNQEPIIYHGYTFTSKILFCDVLRAIRDYAFKASPYPVILSLENHCTLEQQRVMARHLHAILGPMLLNRPLDGVTNSLPSPEQLKGKILLKGKKLGGLLPPGGEGGPEATVVSDEDEAAEMEDEAVRSRVQHKPKEDKLRLAQELSDMVIYCKSVHFGGFSSPGTPGQAFYEMASFSENRALRLLQESGNGFVRHNVGHLSRIYPAGWRTDSSNYSPVEMWNGGCQIVALNFQTPGPEMDVYQGRFQDNGACGYVLKPAFLRDPNGTFNPRALAQGPWWARKRLNIRVISGQQLPKVNKNKNSIVDPKVTVEIHGVSRDVASRQTAVITNNGFNPWWDTEFAFEVVVPDLALIRFLVEDYDASSKNDFIGQSTIPLNSLKQGYRHVHLMSKNGDQHPSATLFVKISLQD

SEQ ID NO: 163000 - DNA, 2271 bp, Artificial Sequence
  derived and/or modified sequence
atggactccgggagggactttctgactctgcacggactgcaagatgatgaggacctgcaggccttgctgaaaggcagtcaactgcttaaggtgaagtcttcgtcatggcgaagggaaaggttttataaactgcaggaggattgcaagactatctggcaggaatccaggaaggtgatgcggactcctgagtcccagctcttctccatcgaagatatccaagaggtccggatggggcatcgaactgaggggttggagaaattcgcccgagacgtgcctgaggacaggtgcttttcgattgtcttcaaggatcaacgaaatactctcgatctgatcgctccctcacctgcagatgcgcagcactgggtgttgggtctgcataagattatacaccactccgggtcgatggaccagagacagaagctccaacactggatccattcctgcttgcggaaagcagacaagaacaaagacaacaaaatgtctttcaaagagctgcaaaattttctaaaggagctaaatatccaggtggatgactcttatgctaggaagattttcagagagtgcgaccacagccagacagatagtttggaagacgaagaaattgaggccttctataaaatgctaactcagagagttgaaatcgacagaaccttcgctgaagcggccggaagcggggaaacactgtccgtcgaccagctggttacctttctgcagcaccaacagagagaggaagcggcaggacccgctctggccctctcgctcattgagaggtacgaacctagcgagacagctaaagcccagcgacaaatgacaaaagacgggtttctaatgtatcttttgagcgccgatggcagcgcctttagtctcgcccaccggcgagtgtatcaggacatgggccaaccgctttcccattacctcgtttcttcctcacataacacatatcttcttgaggaccagctggcaggtccctcatccacagaggcctacattcgggctctatgtaaagggtgccgctgtctggagttggattgttgggatggcccaaaccaagagccaattatctatcatggttatacatttacatctaaaattctgttctgcgatgttctcagagcaataagagattatgccttcaaagcctcaccttatccagtgatcttgagccttgaaaaccattgcactctggagcagcagagagtgatggcccggcatctgcacgccattctcggtccaatgctgctgaacaggcccttagatggagtcacgaactccctgccctcccccgaacagctgaagggcaaaattctcctgaaaggtaagaagctggggggcctcttaccgccgggaggtgaggggggtccagaagcgactgtggtgtccgatgaagacgaggcggcggagatggaagatgaggccgtgagatcacgcgttcagcataagcccaaggaggataaactcagacttgcccaggaattgtcagacatggtcatatactgtaaatcagtgcattttggcggcttttcgtcgccaggtacaccaggacaggccttttatgaaatggccagttttagcgagaacagagctctccgcttactccaagagagcgggaatggctttgtaaggcacaacgtcggccacctgtcaaggatctatcccgccggttggagaacggacagcagcaattattcgccagtagaaatgtggaatggaggttgtcagattgtggcattgaacttccagacacccgggcctgaaatggatgtctatcaaggacggtttcaggataatggggcatgcggctacgtgttaaaaccggcgttcttacgcgatcccaacggtaccttcaaccccagagctcttgcacaagggccgtggtgggcacgtaagagactgaacattcgagtgatttcaggacaacaattaccaaaggttaataagaacaagaacagtattgtagatccaaaggtgactgtggagatccacggtgtgtctcgcgacgtggcaagccggcagacagcagtgattaccaataacgggtttaacccctggtgggatacagagtttgccttcgaggtcgtcgttccagacctagcccttatccgttttctcgtggaagattatgatgccagctccaagaatgatttcatcgggcagtccaccattcctttaaattctctaaaacagggctaccggcacgtgcacctgatgtcaaagaatggcgaccagcatccgtcggccactctctttgttaaaatctctctgcaggattag

SEQ ID NO: 163001 - DNA, 2271 bp, Artificial Sequence
  derived and/or modified sequence
atggattctggccgggacttcctgaccctgcacggcctgcaggatgatgaggacctgcaggccctgctgaagggcagccagctgctgaaggtgaagagcagctcctggaggcgggagcgcttctacaagctgcaggaggactgcaagaccatctggcaggagagcaggaaggtgatgaggaccccagagagccagctgttcagcattgaggacatccaggaggtgaggatgggccacaggacagagggcctggagaagtttgccagagatgtgcctgaagatcgctgcttcagcatcgtgttcaaggaccagaggaacaccctggacctgattgcccccagccctgcagatgcccagcactgggtgctgggcctgcacaagatcatccaccacagcggctccatggaccagaggcagaagctgcagcactggatccacagctgcctgaggaaggctgacaagaacaaggacaacaagatgtccttcaaggagctgcagaacttcctgaaggagctgaacatccaggtggatgacagctatgccaggaagatcttcagagaatgtgaccacagccagacagacagcctggaggatgaggagattgaggccttctacaagatgctgacccagagggtggagattgacaggacctttgctgaggccgccggcagcggggagaccctgtctgtggaccagctggtgaccttcctgcagcaccagcagcgggaggaggccgccggccctgccctggccctgagcctgattgaaagatatgagcccagcgagacagccaaggcccagaggcagatgaccaaggatggcttcctgatgtacctgctgtctgcagatggcagcgccttcagcctggcccaccggcgggtgtaccaggacatgggccagcccctgagccactacctggtgagcagcagccacaacacctacctgctggaggaccagctggccggccccagcagcacagaggcctacatccgggccctgtgcaagggctgccgctgcctggagctggactgctgggatggccccaaccaggagcccatcatctaccacggctacaccttcaccagcaagatcctcttctgtgatgtgctgcgggccatccgggactatgccttcaaggccagcccctaccctgtgatcctgagcctggagaaccactgcaccctggagcagcagagggtgatggcccggcacctgcacgccatcctgggccccatgctgctgaaccggcccctggatggagtgaccaacagcctgcccagccctgagcagctgaagggcaagatcctgctgaagggcaagaagctgggcggcctgctgcccccaggaggagagggcggccctgaggccaccgtggtgtctgatgaagatgaagctgctgagatggaggatgaggccgtgcgcagccgggtgcagcacaagcccaaggaggacaagctgcggctggcccaggagctgagtgacatggtgatctactgcaagtctgtgcactttggaggcttcagcagccctggcaccccaggccaggccttctatgagatggccagcttctctgaaaatagagccctgcggctgctgcaggagagcggaaatggatttgtgcgccacaacgtgggccacctgagccgcatctacccagctggctggaggacagacagcagcaactacagccctgtggagatgtggaatggaggctgccagatcgtggccctgaacttccagaccccaggccctgagatggatgtgtaccagggccgcttccaggacaacggggcctgtggctacgtgctgaagccagccttcctgcgggaccccaacggcaccttcaacccccgggccctggcccagggcccctggtgggccaggaagaggctgaacatccgggtcatcagcggccagcagctgcccaaggtgaacaagaacaagaacagcatcgtggaccccaaggtgacagtggagatccatggagtgtccagagatgtggccagccggcagacagctgtgatcaccaacaacggcttcaacccctggtgggacacagaatttgcctttgaggtggtggtgcctgacctggccctgatccgcttcctggtggaggactatgatgccagcagcaagaatgacttcatcggccagagcaccatccccctgaacagcctgaagcagggctaccgccacgtgcacctgatgagcaagaatggagaccagcaccccagcgccaccctgtttgtgaagatcagcctgcaggactag

SEQ ID NO: 163002 - DNA, 2271 bp, Artificial Sequence
  derived and/or modified sequence
atggacagcggccgggacttcctgaccctgcacggcctgcaggacgacgaagatctgcaggccctgcttaaagggtcccagctcctcaaggtgaagagctccagctggagaagggaaagattttataagctccaggaggattgtaaaacaatttggcaggaatcgcgaaaagtgatgcgcacaccagaatctcagctgttttccatagaagatatacaagaagtgcgaatgggccaccgaaccgaggggttagagaagttcgctcgtgacgtgccagaagacagatgtttttccatagtctttaaggatcagagaaacaccctggatctcatcgccccttcaccagccgatgcccaacattgggtacttgggctgcacaagatcattcatcactccggctctatggaccagcgccagaagctgcagcactggatccactcttgccttcgaaaggccgacaaaaacaaggacaacaaaatgagcttcaaagagctgcagaacttcttgaaagagctcaatatccaggtggacgattcttacgcacggaagatttttagagaatgcgatcattctcagaccgacagtctcgaggatgaagaaatagaagccttctacaagatgctgacacagcgggtcgagatcgatcggaccttcgccgaggccgcaggctctggcgagactttatcagtggatcagttggtgacattcttacagcaccagcagcgagaggaagccgcgggcccagctcttgcgctgtcgctgattgaacgatacgaacccagcgagacagcaaaggctcaaagacagatgactaaggatggattcctcatgtacctgctcagcgcggatgggtcggcgttcagcctggcacacaggcgggtctaccaagatatggggcagccactgagtcattacctggtttcatcctcccacaatacatacttgctggaagatcaacttgccggaccctctagtacagaagcctatatccgggcgctctgtaaaggatgtaggtgcctggagttagactgctgggacggccctaatcaggagccgattatttaccatggctatacatttacatcaaagattctcttttgcgacgtgctgagagcaatcagagattatgccttcaaagcttcaccctacccggtgattttgtcattggagaaccactgcaccctcgagcagcagcgcgttatggccaggcatcttcacgctatcctcggtccgatgctacttaaccggcctcttgacggggtgacgaactccctgccgagcccagagcagctgaagggtaaaatcctgttgaaaggtaagaagctgggcggacttctcccaccggggggcgagggcggccccgaggctactgtcgtgagcgacgaagacgaagctgccgaaatggaggacgaagccgtgcgcagccgggtccagcacaaacctaaggaagacaaattgaggctggcccaggagctttctgatatggtgatatattgcaagtcagttcactttggcggcttttcctcaccgggcactcctggacaggccttctacgagatggcatctttcagcgagaacagagctttacggctgcttcaggaatccggaaatgggttcgtacgccataacgttggtcatctctcaagaatctaccctgcaggctggcggaccgatagcagtaattatagccccgttgagatgtggaatggcggctgccagatcgtagcactgaatttccagacccctggaccggagatggatgtttatcaaggacggtttcaggataatggcgcctgtggttatgtcctcaagcccgcatttcttcgcgatccgaatggcacctttaacccccgcgctctggcccagggcccctggtgggccaggaaacgcctgaacatcagagtgatcagtggccagcaacttcccaaggtgaacaaaaataagaattccatcgtggacccgaaggtcactgtagagatacacggcgtgagtagggacgttgccagcaggcagaccgcagttatcacgaacaacggattcaacccatggtgggataccgagtttgctttcgaggtagtcgttcccgatctagcactcattaggttcctggtcgaggattacgacgcgtctagcaaaaacgacttcattggccagagcaccattccgctaaacagcctcaaacaggggtataggcacgtgcatctcatgtccaaaaatggcgatcaacacccatcagctacacttttcgttaagatctccctccaggattag

SEQ ID NO: 163003 - DNA, 2769 bp, Artificial Sequence
  derived and/or modified sequence
cgcgtccccagaagggggcggggagagacgagggttggcgggctcagggggcgggggcgcagggcagcgggggcggggcggtgtcccgggaccacccccggcctcctcccaccgcggtccattcaggtccctgcaccgcactccgctcggaccccaggccgccggtgctgtcgctactcaagtgagtcccgcggtgcccctcccgccgcgccgcccgtcgggcatggactcgggccgggacttcctgaccctgcacggcctacaggatgatgaggatctacaggcgctgctgaagggcagccagctcctgaaggtgaagtccagctcatggaggagagagcgcttctacaagttgcaggaggactgcaagaccatctggcaggagtcccgcaaggtcatgcggaccccggagtcccagctgttctccatcgaggacattcaggaggtgcgaatggggcaccgcacggagggtctggagaagttcgcccgtgatgtgcccgaggaccgctgcttctccattgtcttcaaggaccagcgcaatacactagacctcatcgccccatcgccagctgatgcccagcactgggtgctggggctgcacaagatcatccaccactcaggctccatggaccagcgtcagaagctacagcactggattcactcctgcttgcgaaaagctgacaaaaacaaggacaacaagatgagcttcaaggagctgcagaacttcctgaaggagctcaacatccaggtggacgacagctatgcccggaagatcttcagggagtgtgaccactcccagacagactccctggaggacgaggagattgaggccttctacaagatgctgacccagcgggtggagatcgaccgcaccttcgccgaggccgcgggctcaggggagactctgtcggtggatcagttagtgacgttcctgcagcaccagcagcgggaggaggcggcagggcctgcgctggccctctccctcattgagcgctacgagcccagcgagactgccaaggcgcagcggcagatgaccaaggacggcttcctcatgtacttactgtcggctgacggcagcgccttcagcctggcacaccgccgtgtctaccaggacatgggccagccacttagccactacctggtgtcctcttcacacaacacctacctgctggaggaccagctagccgggcccagcagcactgaagcctacatccgggcactgtgcaaaggctgccgatgcctggagcttgactgctgggacgggcccaaccaggaaccaatcatctaccacggctatactttcacttccaagatcctcttctgcgatgtgctcagggccatccgggactatgccttcaaggcgtccccctaccctgtcatcctatccctggagaaccactgcacactggagcagcagcgcgtgatggcgcggcacctgcatgccatcctgggccccatgctgttgaaccgaccactggatggggtcaccaacagcctgccctcccctgagcaactgaaggggaagatcctgctgaaggggaagaagctcggggggctcctgccccctggaggggagggtggccctgaggccactgtggtgtcagacgaagacgaggctgctgagatggaggatgaggcagtgaggagccgtgtgcagcacaagcccaaggaggacaagctcaggctagcacaggagctctctgacatggtcatttactgcaagagtgtccactttgggggcttctccagtcctggcacccctggacaggccttctacgagatggcgtccttctctgagaaccgtgcccttcgactgctccaagaatcaggaaacggctttgtccgccacaacgtggggcacctgagcagaatctacccggctggatggagaacagactcctccaactacagccccgtggagatgtggaatgggggctgccagatcgtggccctgaatttccagacacctgggccagagatggacgtgtaccagggccgcttccaggacaacggggcctgtgggtacgtgctgaagcccgccttcctgcgagaccccaacggcacctttaacccccgcgccctggctcaggggccctggtgggcacggaagcggctcaacatcagggtcatttcggggcagcagctgccaaaagtcaacaagaataagaattcaattgtggaccccaaagtgacagtggagatccatggcgtgagccgggacgtggccagccgccagactgctgtcatcaccaacaatggtttcaacccatggtgggacacggagtttgcgtttgaggtagttgtgcctgaccttgccctcatccgcttcttggtggaagattatgatgcctcctccaagaatgacttcattggccagagtaccatccccttgaacagcctcaagcaaggataccgccatgtccacctcatgtctaagaacggggaccagcatccatcagccaccctctttgtgaagatctccctccaggactaggctggaggaagccagtggggtcccccctgagtgggctgggccctctgtccacatgtggggacagggctggtgtggctgctcccagcctcttgctcagagctaggcccccaaattgccttcagccctaacatagtgtctgctgctgcctccctggggaccaggagctagcccagtccctggagctgtccttcattccgttaggaataacactgcagccctctccaccctccggccagcgagtggtcaaggatttttataaaaatcacgataagatt

SEQ ID NO: 163004 - DNA, 2271 bp, Artificial Sequence
  derived and/or modified sequence
atggattcggggagggacttcctgacactacatggtctacaagatgacgaggacttgcaggcgcttctcaagggttcacagctgctaaaagtcaagtctagctcctggaggcgagaacgcttctacaagttgcaggaggactgtaagactatttggcaagaatcacggaaagtgatgaggacaccagagtctcagttgttttcaatcgaggacatacaggaagtgcggatggggcacagaacggaggggcttgagaagttcgccagggacgtccccgaagacaggtgtttctcaatcgtatttaaggaccagcgtaataccctggaccttatagccccatcgccagcagatgcacagcattgggtgctgggactccataaaatcattcatcatagcggcagcatggaccagagacagaaacttcaacactggatccactcctgtctccgcaaagcggataaaaataaggataacaaaatgagttttaaggaactgcaaaactttctgaaggaactgaatatccaagtggacgattcgtacgctaggaaaatctttcgggagtgcgaccactcacagacagattcactggaggatgaagaaattgaagccttctacaagatgctgactcagcgcgtggagatcgacaggaccttcgcagaggctgccggatcaggcgaaaccctgtctgtggatcagctcgtgacttttctgcaacatcagcagagagaggaggccgcaggtcccgcactggccctctctctcatcgaaaggtatgagccctctgagaccgctaaggcccaacgacaaatgactaaagacgggtttctcatgtacctgttgtcagcagatgggtcggcgttttcactggcccaccggagggtttaccaagacatggggcagcctttaagccactacctggtgagctcatcccacaacacgtacttactggaggaccagctggctggcccttcatctacggaagcatacatccgggcactctgcaagggctgtaggtgtctggagcttgactgctgggatgggcctaatcaggagccaataatataccacggctacacctttacctcgaagattctgttctgtgatgtgctccgggcaatccgggattatgcatttaaggcttccccataccccgttatactgtccttggaaaatcattgcacgttggagcagcagagggtaatggcacgccatctgcacgcaatccttgggccaatgctcctaaacaggccgttggatggagtcacaaactccctgccgtcccccgagcagctgaaaggaaagatcttgttgaagggtaagaagctggggggactactcccccctggaggcgagggaggccctgaggccaccgtggtctcagacgaggacgaagctgccgagatggaggatgaggcggtacggagtcgtgtgcagcacaagcctaaggaggataagttaaggctcgctcaggagctaagcgatatggtaatttattgtaagagcgtgcatttcggagggttctcatcccccggaacgccagggcaggccttctatgagatggcttctttcagcgagaacagagcactcaggctcctgcaagaaagtggaaacggtttcgtgcggcacaatgttggccacctgtctcgaatatacccagctggctggagaacagattcatccaactactccccggtggagatgtggaatggcggatgtcaaattgtggcgctgaacttccagactccaggacccgagatggacgtgtaccaaggtaggttccaggataatggcgcatgcggatatgttttaaagcctgctttcctgcgagatcccaacggaactttcaatccccgagcactcgcacagggcccttggtgggcaagaaagaggctcaatataagggtgatctcgggccaacagcttcccaaggtgaataagaataagaacagcatcgtggaccctaaggtcaccgtcgaaatccacggtgtatcgcgggacgttgcttcccgacagactgctgtcattacaaataatggattcaatccttggtgggacacagagtttgcctttgaggtggttgttcctgaccttgcgctgatccgatttcttgtggaggattatgacgcaagttctaagaatgacttcattggtcagagtactattccacttaatagtttgaagcagggttacaggcatgtccatctgatgtctaagaacggcgaccagcatccttccgctacactctttgtgaagatctcacttcaggattag

SEQ ID NO: 163005 - DNA, 2271 bp, Artificial Sequence
  derived and/or modified sequence
atggacagcggcagagacttcctgaccctgcacggcctgcaggacgacgaggacctgcaggccctgctgaagggcagccagctgctgaaggtgaagagcagcagctggagaagagagagattctacaagctgcaggaggactgcaagaccatctggcaggagagcagaaaggtgatgagaacccccgagagccagctgttcagcatcgaggacatccaggaggtgagaatgggccacagaaccgagggcctggagaagttcgccagagacgtgcccgaggacagatgcttcagcatcgtgttcaaggaccagagaaacaccctggacctgatcgcccccagccccgccgacgcccagcactgggtgctgggcctgcacaagatcatccaccacagcggcagcatggaccagagacagaagctgcagcactggatccacagctgcctgagaaaggccgacaagaacaaggacaacaagatgagcttcaaggagctgcagaacttcctgaaggagctgaacatccaggtggacgacagctacgccagaaagatcttcagagagtgcgaccacagccagaccgacagcctggaggacgaggagatcgaggccttctacaagatgctgacccagagagtggagatcgacagaaccttcgccgaggccgccggcagcggcgagaccctgagcgtggaccagctggtgaccttcctgcagcaccagcagagagaggaggccgccggccccgccctggccctgagcctgatcgagagatacgagcccagcgagaccgccaaggcccagagacagatgaccaaggacggcttcctgatgtacctgctgagcgccgacggcagcgccttcagcctggcccacagaagagtgtaccaggacatgggccagcccctgagccactacctggtgagcagcagccacaacacctacctgctggaggaccagctggccggccccagcagcaccgaggcctacatcagagccctgtgcaagggctgcagatgcctggagctggactgctgggacggccccaaccaggagcccatcatctaccacggctacaccttcaccagcaagatcctgttctgcgacgtgctgagagccatcagagactacgccttcaaggccagcccctaccccgtgatcctgagcctggagaaccactgcaccctggagcagcagagagtgatggccagacacctgcacgccatcctgggccccatgctgctgaacagacccctggacggcgtgaccaacagcctgcccagccccgagcagctgaagggcaagatcctgctgaagggcaagaagctgggcggcctgctgccccccggcggcgagggcggccccgaggccaccgtggtgagcgacgaggacgaggccgccgagatggaggacgaggccgtgagaagcagagtgcagcacaagcccaaggaggacaagctgagactggcccaggagctgagcgacatggtgatctactgcaagagcgtgcacttcggcggcttcagcagccccggcacccccggccaggccttctacgagatggccagcttcagcgagaacagagccctgagactgctgcaggagagcggcaacggcttcgtgagacacaacgtgggccacctgagcagaatctaccccgccggctggagaaccgacagcagcaactacagccccgtggagatgtggaacggcggctgccagatcgtggccctgaacttccagacccccggccccgagatggacgtgtaccagggcagattccaggacaacggcgcctgcggctacgtgctgaagcccgccttcctgagagaccccaacggcaccttcaaccccagagccctggcccagggcccctggtgggccagaaagagactgaacatcagagtgatcagcggccagcagctgcccaaggtgaacaagaacaagaacagcatcgtggaccccaaggtgaccgtggagatccacggcgtgagcagagacgtggccagcagacagaccgccgtgatcaccaacaacggcttcaacccctggtgggacaccgagttcgccttcgaggtggtggtgcccgacctggccctgatcagattcctggtggaggactacgacgccagcagcaagaacgacttcatcggccagagcaccatccccctgaacagcctgaagcagggctacagacacgtgcacctgatgagcaagaacggcgaccagcaccccagcgccaccctgttcgtgaagatcagcctgcaggactag

SEQ ID NO: 163006 - protein, 1095 aa, Artificial Sequence
  derived and/or modified sequence
MAEGAAGREDPAPPDAAGGEDDPRVGPDAAGDCVTAASGGRMRDRRSGVALPGAAGTPADSEAGLLEAARATPRRSSIIKDPSNQKCGGRKKTVSFSSMPSEKKISSANDCISFMQAGCELKKVRPNSRIYNRFFTLDTDLQALRWEPSKKDLEKAKLDISAIKEIRLGKNTETFRNNGLADQICEDCAFSILHGENYESLDLVANSADVANIWVSGLRYLVSRSKQPLDFMEGNQNTPRFMWLKTVFEAADVDGNGIMLEDTSVELIKQLNPTLKEAKIRLKFKEIQKSKEKLTTRVTEEEFCEAFCELCTRPEVYFLLVQISKNKEYLDANDLMLFLEAEQGVTHITEDICLDIIRRYELSEEGRQKGFLAIDGFTQYLLSSECDIFDPEQKKVAQDMTQPLSHYYINASHNTYLIEDQFRGPADINGYIRALKMGCRSVELDVSDGSDNEPILCNRNNMTTHVSFRSVIEVINKFAFVASEYPLILCLGNHCSLPQQKVMAQQMKKVFGNKLYTEAPLPSESYLPSPEKLKRMIIVKGKKLPSDPDVLEGEVTDEDEEAEMSRRMSVDYNGEQKQIRLCRELSDLVSICKSVQYRDFELSMKSQNYWEMCSFSETEASRIANEYPEDFVNYNKKFLSRIYPSAMRIDSSNLNPQDFWNCGCQIVAMNFQTPGPMMDLHTGWFLQNGGCGYVLRPSIMRDEVSYFSANTKGILPGVSPLALHIKIISGQNFPKPKGACAKGDVIDPYVCIEIHGIPADCSEQRTKTVQQNSDNPIFDETFEFQVNLPELAMIRFVVLDDDYIGDEFIGQYTIPFECLQPGYRHVPLRSFVGDIMEHVTLFVHIAITNRSGGGKAQKRSLSVRMGKKVREYTMLRNIGLKTIDDIFKIAVHPLREAIDMRENMQNAIVSIKELCGLPPIASLKQCLLTLSSRLITSDNTPSVSLVMKDSFPYLEPLGAIPDVQKKMLTAYDLMIQESRFLIEMADTVQEKIVQCQKAGMEFHEELHNLGAKEGLKGRKLNKATESFAWNITVLKGQGDLLKNAKNEAIENMKQIQLACLSCGLSKAPSSSAEAKSKRSLEAIEEKESSEENGKL

SEQ ID NO: 163007 - protein, 997 aa, Artificial Sequence
  derived and/or modified sequence
MPSEKKISSANDCISFMQAGCELKKVRPNSRIYNRFFTLDTDLQALRWEPSKKDLEKAKLDISAIKEIRLGKNTETFRNNGLADQICEDCAFSILHGENYESLDLVANSADVANIWVSGLRYLVSRSKQPLDFMEGNQNTPRFMWLKTVFEAADVDGNGIMLEDTSVELIKQLNPTLKEAKIRLKFKEIQKSKEKLTTRVTEEEFCEAFCELCTRPEVYFLLVQISKNKEYLDANDLMLFLEAEQGVTHITEDICLDIIRRYELSEEGRQKGFLAIDGFTQYLLSSECDIFDPEQKKVAQDMTQPLSHYYINASHNTYLIEDQFRGPADINGYIRALKMGCRSVELDVSDGSDNEPILCNRNNMTTHVSFRSVIEVINKFAFVASEYPLILCLGNHCSLPQQKVMAQQMKKVFGNKLYTEAPLPSESYLPSPEKLKRMIIVKGKKLPSDPDVLEGEVTDEDEEAEMSRRMSVDYNGEQKQIRLCRELSDLVSICKSVQYRDFELSMKSQNYWEMCSFSETEASRIANEYPEDFVNYNKKFLSRIYPSAMRIDSSNLNPQDFWNCGCQIVAMNFQTPGPMMDLHTGWFLQNGGCGYVLRPSIMRDEVSYFSANTKGILPGVSPLALHIKIISGQNFPKPKGACAKGDVIDPYVCIEIHGIPADCSEQRTKTVQQNSDNPIFDETFEFQVNLPELAMIRFVVLDDDYIGDEFIGQYTIPFECLQPGYRHVPLRSFVGDIMEHVTLFVHIAITNRSGGGKAQKRSLSVRMGKKVREYTMLRNIGLKTIDDIFKIAVHPLREAIDMRENMQNAIVSIKELCGLPPIASLKQCLLTLSSRLITSDNTPSVSLVMKDSFPYLEPLGAIPDVQKKMLTAYDLMIQESRFLIEMADTVQEKIVQCQKAGMEFHEELHNLGAKEGLKGRKLNKATESFAWNITVLKGQGDLLKNAKNEAIENMKQIQLACLSCGLSKAPSSSAEAKSKRSLEAIEEKESSEENGKL

SEQ ID NO: 163008 - DNA, 3288 bp, Artificial Sequence
  derived and/or modified sequence
atggccgagggcgccgccggcagagaggaccccgccccccccgacgccgccggcggcgaggacgaccccagagtgggccccgacgccgccggcgactgcgtgaccgccgccagcggcggcagaatgagagacagaagaagcggcgtggccctgcccggcgccgccggcacccccgccgacagcgaggccggcctgctggaggccgccagagccacccccagaagaagcagcatcatcaaggaccccagcaaccagaagtgcggcggcagaaagaagaccgtgagcttcagcagcatgcccagcgagaagaagatcagcagcgccaacgactgcatcagcttcatgcaggccggctgcgagctgaagaaggtgagacccaacagcagaatctacaacagattcttcaccctggacaccgacctgcaggccctgagatgggagcccagcaagaaggacctggagaaggccaagctggacatcagcgccatcaaggagatcagactgggcaagaacaccgagaccttcagaaacaacggcctggccgaccagatctgcgaggactgcgccttcagcatcctgcacggcgagaactacgagagcctggacctggtggccaacagcgccgacgtggccaacatctgggtgagcggcctgagatacctggtgagcagaagcaagcagcccctggacttcatggagggcaaccagaacacccccagattcatgtggctgaagaccgtgttcgaggccgccgacgtggacggcaacggcatcatgctggaggacaccagcgtggagctgatcaagcagctgaaccccaccctgaaggaggccaagatcagactgaagttcaaggagatccagaagagcaaggagaagctgaccaccagagtgaccgaggaggagttctgcgaggccttctgcgagctgtgcaccagacccgaggtgtacttcctgctggtgcagatcagcaagaacaaggagtacctggacgccaacgacctgatgctgttcctggaggccgagcagggcgtgacccacatcaccgaggacatctgcctggacatcatcagaagatacgagctgagcgaggagggcagacagaagggcttcctggccatcgacggcttcacccagtacctgctgagcagcgagtgcgacatcttcgaccccgagcagaagaaggtggcccaggacatgacccagcccctgagccactactacatcaacgccagccacaacacctacctgatcgaggaccagttcagaggccccgccgacatcaacggctacatcagagccctgaagatgggctgcagaagcgtggagctggacgtgagcgacggcagcgacaacgagcccatcctgtgcaacagaaacaacatgaccacccacgtgagcttcagaagcgtgatcgaggtgatcaacaagttcgccttcgtggccagcgagtaccccctgatcctgtgcctgggcaaccactgcagcctgccccagcagaaggtgatggcccagcagatgaagaaggtgttcggcaacaagctgtacaccgaggcccccctgcccagcgagagctacctgcccagccccgagaagctgaagagaatgatcatcgtgaagggcaagaagctgcccagcgaccccgacgtgctggagggcgaggtgaccgacgaggacgaggaggccgagatgagcagaagaatgagcgtggactacaacggcgagcagaagcagatcagactgtgcagagagctgagcgacctggtgagcatctgcaagagcgtgcagtacagagacttcgagctgagcatgaagagccagaactactgggagatgtgcagcttcagcgagaccgaggccagcagaatcgccaacgagtaccccgaggacttcgtgaactacaacaagaagttcctgagcagaatctaccccagcgccatgagaatcgacagcagcaacctgaacccccaggacttctggaactgcggctgccagatcgtggccatgaacttccagacccccggccccatgatggacctgcacaccggctggttcctgcagaacggcggctgcggctacgtgctgagacccagcatcatgagagacgaggtgagctacttcagcgccaacaccaagggcatcctgcccggcgtgagccccctggccctgcacatcaagatcatcagcggccagaacttccccaagcccaagggcgcctgcgccaagggcgacgtgatcgacccctacgtgtgcatcgagatccacggcatccccgccgactgcagcgagcagagaaccaagaccgtgcagcagaacagcgacaaccccatcttcgacgagaccttcgagttccaggtgaacctgcccgagctggccatgatcagattcgtggtgctggacgacgactacatcggcgacgagttcatcggccagtacaccatccccttcgagtgcctgcagcccggctacagacacgtgcccctgagaagcttcgtgggcgacatcatggagcacgtgaccctgttcgtgcacatcgccatcaccaacagaagcggcggcggcaaggcccagaagagaagcctgagcgtgagaatgggcaagaaggtgagagagtacaccatgctgagaaacatcggcctgaagaccatcgacgacatcttcaagatcgccgtgcaccccctgagagaggccatcgacatgagagagaacatgcagaacgccatcgtgagcatcaaggagctgtgcggcctgccccccatcgccagcctgaagcagtgcctgctgaccctgagcagcagactgatcaccagcgacaacacccccagcgtgagcctggtgatgaaggacagcttcccctacctggagcccctgggcgccatccccgacgtgcagaagaagatgctgaccgcctacgacctgatgatccaggagagcagattcctgatcgagatggccgacaccgtgcaggagaagatcgtgcagtgccagaaggccggcatggagttccacgaggagctgcacaacctgggcgccaaggagggcctgaagggcagaaagctgaacaaggccaccgagagcttcgcctggaacatcaccgtgctgaagggccagggcgacctgctgaagaacgccaagaacgaggccatcgagaacatgaagcagatccagctggcctgcctgagctgcggcctgagcaaggcccccagcagcagcgccgaggccaagagcaagagaagcctggaggccatcgaggagaaggagagcagcgaggagaacggcaagctgtag

SEQ ID NO: 163009 - DNA, 2994 bp, Artificial Sequence
  derived and/or modified sequence
atgcccagcgagaagaagatcagcagcgccaacgactgcatcagcttcatgcaggccggctgcgagctgaagaaggtgagacccaacagcagaatctacaacagattcttcaccctggacaccgacctgcaggccctgagatgggagcccagcaagaaggacctggagaaggccaagctggacatcagcgccatcaaggagatcagactgggcaagaacaccgagaccttcagaaacaacggcctggccgaccagatctgcgaggactgcgccttcagcatcctgcacggcgagaactacgagagcctggacctggtggccaacagcgccgacgtggccaacatctgggtgagcggcctgagatacctggtgagcagaagcaagcagcccctggacttcatggagggcaaccagaacacccccagattcatgtggctgaagaccgtgttcgaggccgccgacgtggacggcaacggcatcatgctggaggacaccagcgtggagctgatcaagcagctgaaccccaccctgaaggaggccaagatcagactgaagttcaaggagatccagaagagcaaggagaagctgaccaccagagtgaccgaggaggagttctgcgaggccttctgcgagctgtgcaccagacccgaggtgtacttcctgctggtgcagatcagcaagaacaaggagtacctggacgccaacgacctgatgctgttcctggaggccgagcagggcgtgacccacatcaccgaggacatctgcctggacatcatcagaagatacgagctgagcgaggagggcagacagaagggcttcctggccatcgacggcttcacccagtacctgctgagcagcgagtgcgacatcttcgaccccgagcagaagaaggtggcccaggacatgacccagcccctgagccactactacatcaacgccagccacaacacctacctgatcgaggaccagttcagaggccccgccgacatcaacggctacatcagagccctgaagatgggctgcagaagcgtggagctggacgtgagcgacggcagcgacaacgagcccatcctgtgcaacagaaacaacatgaccacccacgtgagcttcagaagcgtgatcgaggtgatcaacaagttcgccttcgtggccagcgagtaccccctgatcctgtgcctgggcaaccactgcagcctgccccagcagaaggtgatggcccagcagatgaagaaggtgttcggcaacaagctgtacaccgaggcccccctgcccagcgagagctacctgcccagccccgagaagctgaagagaatgatcatcgtgaagggcaagaagctgcccagcgaccccgacgtgctggagggcgaggtgaccgacgaggacgaggaggccgagatgagcagaagaatgagcgtggactacaacggcgagcagaagcagatcagactgtgcagagagctgagcgacctggtgagcatctgcaagagcgtgcagtacagagacttcgagctgagcatgaagagccagaactactgggagatgtgcagcttcagcgagaccgaggccagcagaatcgccaacgagtaccccgaggacttcgtgaactacaacaagaagttcctgagcagaatctaccccagcgccatgagaatcgacagcagcaacctgaacccccaggacttctggaactgcggctgccagatcgtggccatgaacttccagacccccggccccatgatggacctgcacaccggctggttcctgcagaacggcggctgcggctacgtgctgagacccagcatcatgagagacgaggtgagctacttcagcgccaacaccaagggcatcctgcccggcgtgagccccctggccctgcacatcaagatcatcagcggccagaacttccccaagcccaagggcgcctgcgccaagggcgacgtgatcgacccctacgtgtgcatcgagatccacggcatccccgccgactgcagcgagcagagaaccaagaccgtgcagcagaacagcgacaaccccatcttcgacgagaccttcgagttccaggtgaacctgcccgagctggccatgatcagattcgtggtgctggacgacgactacatcggcgacgagttcatcggccagtacaccatccccttcgagtgcctgcagcccggctacagacacgtgcccctgagaagcttcgtgggcgacatcatggagcacgtgaccctgttcgtgcacatcgccatcaccaacagaagcggcggcggcaaggcccagaagagaagcctgagcgtgagaatgggcaagaaggtgagagagtacaccatgctgagaaacatcggcctgaagaccatcgacgacatcttcaagatcgccgtgcaccccctgagagaggccatcgacatgagagagaacatgcagaacgccatcgtgagcatcaaggagctgtgcggcctgccccccatcgccagcctgaagcagtgcctgctgaccctgagcagcagactgatcaccagcgacaacacccccagcgtgagcctggtgatgaaggacagcttcccctacctggagcccctgggcgccatccccgacgtgcagaagaagatgctgaccgcctacgacctgatgatccaggagagcagattcctgatcgagatggccgacaccgtgcaggagaagatcgtgcagtgccagaaggccggcatggagttccacgaggagctgcacaacctgggcgccaaggagggcctgaagggcagaaagctgaacaaggccaccgagagcttcgcctggaacatcaccgtgctgaagggccagggcgacctgctgaagaacgccaagaacgaggccatcgagaacatgaagcagatccagctggcctgcctgagctgcggcctgagcaaggcccccagcagcagcgccgaggccaagagcaagagaagcctggaggccatcgaggagaaggagagcagcgaggagaacggcaagctgtag

SEQ ID NO: 163010 - DNA, 3288 bp, Artificial Sequence
  derived and/or modified sequence
atggcagagggagcagccggaagggaggacccggctcctcccgatgccgctggcggggaggatgatcctcgtgtggggcccgatgccgctggcgactgtgtcactgcagcaagcggcggacggatgagggatagacgctctggtgtcgcgttacccggcgcagcggggacaccagcagattctgaagcgggtctgctggaggcagctcgcgcaacccctcgcaggagtagcatcataaaagacccatcaaaccaaaagtgtgggggcaggaagaaaacagtgagtttctcatcgatgccctcagagaagaagatcagcagcgctaacgattgcatttcattcatgcaggcaggttgcgaacttaagaaggtgcggcctaactcccgtatttataaccgattctttacattggatactgacctgcaggcacttagatgggagcccagcaaaaaggatctggaaaaggccaagctggacatcagcgccatcaaagaaatcaggctgggcaagaacaccgaaacattcagaaacaatggcctggccgatcaaatttgtgaggactgcgcattttccatactgcatggagagaattacgaatctctagaccttgtggctaacagtgctgacgtggctaacatctgggtgagcgggttgcgttacctggtctctagaagcaaacagcccttggactttatggagggcaatcagaacactccacggtttatgtggttaaaaacagtcttcgaggccgccgacgtagatggtaatggaatcatgctcgaagacacttctgtggagcttatcaaacaactcaacccaacgctcaaggaggcaaaaatcaggctgaagttcaaggagattcaaaagagtaaggaaaagttgacaacaagggtcacagaggaagagttttgcgaggcgttttgcgaattatgtacaagaccagaggtttattttttactcgtccagataagtaagaacaaggagtaccttgatgcaaacgacctgatgctcttcttagaggccgagcagggtgttacccatataacagaggatatctgcttggatatcattaggcgctatgagttaagtgaagaggggcgccaaaagggctttctcgctattgacgggtttacacagtacctcctgtcgtcagaatgtgacatttttgatccagaacagaaaaaggttgcacaggacatgacccaaccactttcccattattacataaacgctagccacaacacttatctcatcgaggaccagttccggggaccggctgatatcaacggctacatcagggctcttaaaatgggatgtcgctcagtcgaacttgacgtgagtgatggaagtgacaatgagcctattttatgcaataggaacaatatgacgacgcacgtctcctttcgcagcgtaatagaagtcatcaacaagtttgcattcgttgcatctgagtacccactgattttgtgtctcggcaaccactgttctctgcctcaacagaaggttatggcccagcagatgaaaaaggtttttggaaataaactgtacacggaagccccactaccttctgaaagttatctacccagccccgagaaattgaaacggatgataattgttaaaggaaaaaaactgccaagtgaccccgatgttctggagggagaggtaaccgacgaggacgaggaggcagaaatgtctagacggatgtctgttgactacaatggcgaacaaaaacagatcagattgtgccgggaactgagtgatctcgtcagcatatgcaagagcgtgcagtatagagacttcgaactatcaatgaagtcacaaaattattgggagatgtgcagcttttccgagaccgaagcttccaggatcgccaatgaatatccagaagacttcgtgaattataataagaaattcctcagtagaatttatccctctgccatgcggatagatagctcaaatcttaaccctcaggacttctggaactgtggctgccaaattgtcgcgatgaattttcaaactccaggcccaatgatggatctgcatactggttggtttcttcagaatgggggatgtggctatgtgcttagaccaagtattatgagagacgaagtctcctatttttctgctaatacgaaaggtatcctccctggtgtctcgccccttgctttacacattaagatcatcagcgggcaaaattttccaaagcccaagggtgcttgtgcgaagggcgacgttattgacccctacgtgtgcatcgagattcatggcattcctgccgactgttctgagcagcgaaccaaaacagtgcagcaaaattcagataatcccatattcgacgaaaccttcgagttccaggtcaatctgcctgaactcgccatgattcggttcgtcgtcctggacgatgactatatcggcgatgagttcatcggccaatacacaatccccttcgaatgcctgcagcctggataccgccatgttcctctgagaagctttgtgggtgacatcatggagcatgtgactttatttgtgcacatcgcaattacaaacagatccggcggtggcaaggctcagaaaagatcattgtccgtacgaatgggtaaaaaagtgcgcgagtatactatgctgcgaaatataggtctgaagacaatagacgatatcttcaagatcgctgtgcacccattgagggaggcaatcgatatgagggagaatatgcagaatgccatcgtatctatcaaggagctttgtggtctgccaccgatcgctagcctgaaacagtgcctgctcacactgtcatctaggctgattacttctgataataccccatccgttagtctggtgatgaaagatagttttccctacctcgaacccctcggcgccattccagatgtgcaaaaaaaaatgctaacagcgtatgatctgatgatccaggagagtcggtttcttattgagatggctgacacagtgcaggaaaagatagtgcagtgccagaaggctgggatggaatttcatgaggaactgcataacttgggagcgaaggaagggcttaaaggccgaaaattgaataaggcaaccgaaagctttgcttggaacatcacggttctgaaaggtcagggggatttgctcaaaaatgctaaaaacgaagcgattgagaatatgaaacagattcagcttgcatgtttgtcatgcgggctgtctaaggcccccagctcatctgccgaggccaagtcgaaacgttcactggaggctatcgaagaaaaggagtcctcggaagaaaatggtaagctatag

SEQ ID NO: 163011 - DNA, 2994 bp, Artificial Sequence
  derived and/or modified sequence
atgccatcggagaagaagattagtagtgccaacgactgcatttccttcatgcaggcaggatgtgagcttaaaaaggtccggcctaatagtagaatttataatagattcttcacacttgacactgacctgcaggcgctgcgctgggagcctagcaagaaggatctggagaaagccaagctcgatatctcagctatcaaggaaatcaggctggggaaaaatacagaaactttccggaataatgggcttgcagatcagatttgcgaggactgtgctttctccatcctgcatggcgaaaattatgaaagtctggatctcgtggccaactcagccgatgtagcgaatatttgggtctcaggactgagatatttggtctcacgttcaaaacagcccctggattttatggagggtaaccagaatacgcctaggtttatgtggctcaagacggtttttgaggccgctgacgtggacggaaatgggatcatgttggaggacacttcagtggagcttattaagcaactgaaccctactctcaaagaggccaaaatacgactgaagtttaaggaaattcagaagtccaaagagaagctaaccacgcgggtcacagaggaagaattctgcgaggccttttgtgagctctgtacccgccccgaggtatatttcctgctggtgcaaatttctaaaaataaagaatatctggatgctaacgaccttatgctcttcctcgaagccgaacagggagtcacacacattaccgaagacatttgcctggacattatcagacgctacgagctgagcgaggagggccgccagaaagggtttctggccatcgacggctttacccagtacctgttgtcgagtgaatgtgacatatttgaccccgagcagaagaaagttgcacaggacatgacacagccattaagccactactatatcaatgccagtcacaatacttacctgatcgaagaccagtttcgcgggcccgctgatatcaacggttacattagggccttgaaaatgggatgccgatccgtggaactcgacgtgagtgatgggagcgataatgaacccatcctctgtaatcggaataacatgactacacacgtcagcttccggtccgtaattgaagtgatcaacaaatttgcttttgtcgctagcgagtacccactgattttgtgtcttggcaatcactgtagccttcctcaacagaaggtgatggctcaacagatgaaaaaagtgttcgggaacaagttgtacacggaagcccctttacctagcgaaagctatctgccaagcccggaaaaactgaaacggatgatcattgtgaagggcaaaaagctcccgtccgaccccgacgtcctggagggtgaggtgacagacgaagacgaggaggctgagatgagtcgccggatgagcgtggactacaacggcgagcaaaagcagataaggctgtgccgggagttatcagacctggtaagtatctgcaaaagcgtgcagtaccgggactttgagttatctatgaaaagtcaaaactactgggaaatgtgttcgttttctgagaccgaggcctctcgtattgctaatgagtaccccgaagattttgtgaactataacaagaaatttttatctcggatctacccaagcgctatgcgtatcgacagttccaatttgaatccccaggatttttggaattgcggctgccagatcgtggctatgaacttccagacgcccggcccaatgatggacctgcacacaggatggtttttgcagaacggcggttgtggttatgtgctgaggccctctattatgcgagatgaggtgagttacttttccgcaaacacaaagggcatcctgcccggagtgtcccctttggccctgcacataaaaatcattagcggtcagaacttcccgaagcccaagggcgcttgtgccaagggtgatgtgatagacccgtacgtgtgtatcgaaatccacggaatacccgcggattgctccgaacagaggacaaagaccgttcagcagaactcagataaccctattttcgacgaaaccttcgagttccaggtcaaccttcccgagctggctatgattagattcgtggtgctggacgacgactacataggagacgaatttatcgggcagtacacaatcccctttgaatgtcttcagcctggatatagacatgtgccactgcgatccttcgtcggcgatatcatggagcatgtcactctctttgtgcacatcgctatcacaaatagaagcgggggggggaaagcacaaaaaaggagcctgagtgtgcggatgggcaagaaagtgcgcgagtacacgatgctgcggaacataggtcttaagaccatagatgatatattcaaaatcgccgtgcaccctctgagggaagcaatcgatatgagagaaaacatgcagaacgcaattgtcagcattaaagaactttgcgggctcccaccgatcgcgtctctgaaacagtgcttgctgacactcagctctaggttgattacttctgacaacactcccagtgtatcccttgttatgaaagactccttcccttacctggaacctctgggggctattcccgatgtccagaagaagatgctgaccgcttacgatctgatgattcaggaaagtaggtttcttatcgaaatggccgacacagttcaggagaagattgttcagtgtcagaaagcgggcatggaatttcatgaagagttacacaacctgggcgccaaggaagggctgaaaggtcgcaagcttaacaaggcgacggagagcttcgcctggaacatcacagtactcaagggacagggggatctgttaaagaatgcaaagaatgaggctattgagaacatgaagcagattcagcttgcctgcctctcttgcgggctgtccaaggcgcctagcagttccgccgaggctaagtccaagagatcactggaagcaatcgaagagaaggagtcttcagaagaaaatggaaaattgtag

SEQ ID NO: 163012 - DNA, 3288 bp, Artificial Sequence
  derived and/or modified sequence
atggccgagggcgccgccggcagagaagatcctgcccccccagatgctgctggaggagaagatgacccccgggtgggcccagatgctgctggggactgtgtgacagctgccagcggcggccgcatgagggacagaagaagtggagtggccctgcccggggctgctggcaccccagctgacagcgaggccggcctgctggaggccgcccgggccaccccccggcgcagcagcatcatcaaggaccccagcaaccagaagtgtggcggcaggaagaagacagtgtccttcagctccatgcccagcgagaagaagatcagcagcgccaatgactgcatctccttcatgcaggccggctgtgagctgaagaaggtgcggcccaacagccgcatctacaaccgcttcttcaccctggacacagacctgcaggccctgcgctgggagcccagcaagaaggacctggagaaggccaagctggacatcagcgccatcaaggagatccggctgggcaagaacacagagaccttcaggaacaacggcctggccgaccagatctgtgaggactgtgccttcagcatcctgcacggggagaactatgagagcctggacctggtggccaacagcgcagatgtggccaacatctgggtgtctggcctgcgctacctggtgagccgcagcaagcagcccctggacttcatggagggcaaccagaacaccccccgcttcatgtggctgaagacagtgtttgaggccgcagatgtggatggaaatggcatcatgctggaggacacctctgtggagctgatcaagcagctgaaccccaccctgaaggaggccaagatccggctgaagttcaaggagatccagaagagcaaggagaagctgaccaccagggtgacagaggaggagttctgtgaggccttctgtgagctgtgcaccaggcctgaggtgtacttcctgctggtgcagatcagcaagaacaaggagtacctggatgccaatgacctgatgctgttcctggaggccgagcagggcgtgacccacatcacagaggacatctgcctggacatcatccgccgctatgagctgtctgaggagggccggcagaagggcttcctggccattgatggcttcacccagtacctgctgagcagtgaatgtgacatctttgatcctgagcagaagaaggtggcccaggacatgacccagcccctgagccactactacatcaatgccagccacaacacctacctgattgaggaccagttccggggccctgctgacatcaatggctacatccgggccctgaagatgggctgccgctctgtggagctggatgtgtctgatggcagtgacaatgagcccatcctgtgcaacagaaacaacatgaccacccacgtgtccttccgcagcgtcatcgaggtgatcaacaagtttgcctttgtggccagcgagtaccccctcatcctgtgcctgggcaaccactgcagcctgccccagcagaaggtgatggcccagcagatgaagaaggtgtttggaaacaagctgtacacagaggcccccctgcccagcgagagctacctgcccagccctgagaagctgaagaggatgatcatcgtgaagggcaagaagctgcccagcgaccctgatgtgctggagggggaggtgacagatgaagatgaggaggccgagatgagcaggaggatgtctgtggactacaatggagagcagaagcagatccggctgtgccgggagctgagtgacctggtgtccatctgcaagtctgtgcagtacagagactttgagctgtccatgaagagccagaactactgggagatgtgcagcttcagcgagacagaggccagcagaattgccaatgagtacccagaagattttgtgaactacaacaagaagttcctgagccgcatctaccccagcgccatgagaattgacagcagcaacctgaacccccaggacttctggaactgtggctgccagatcgtggccatgaacttccagaccccaggccccatgatggacctgcacacaggctggttcctgcagaatggaggctgcggctacgtgctgcggcccagcatcatgagagatgaggtgtcctacttcagcgccaacaccaagggcatcctgcccggggtgagccccctggccctgcacatcaagatcatcagcggccagaacttccccaagcccaagggggcctgtgccaagggagatgtgattgacccctacgtgtgcatcgagatccacggcatcccagctgactgcagcgagcagaggaccaagacagtgcagcagaacagcgacaaccccatctttgatgagacctttgagttccaggtgaacctgcctgagctggccatgatccgctttgtggtgctggatgatgactacatcggagatgagttcatcggccagtacaccatcccctttgaatgtctgcagcccggctacagacatgtgcccctgcggagctttgtgggggacatcatggagcacgtgaccctgtttgtgcacatcgccatcaccaacagaagtggcggcggcaaggcccagaagaggagcctgtctgtgaggatgggcaagaaggtgcgggagtacaccatgctgaggaacatcggcctgaagaccattgatgacatcttcaagattgctgtgcaccccctgcgggaggccatcgacatgagggagaacatgcagaatgccatcgtgtccatcaaggagctgtgtggcctgccccccatcgccagcctgaagcagtgcctgctgaccctgagcagccgcctcatcaccagtgacaacacccccagcgtgtccctggtgatgaaggacagcttcccctacctggagcccctgggcgccatcccagatgtgcagaagaagatgctgacagcctatgacctgatgatccaggagagccgcttcctgattgagatggctgacacagtgcaggagaagatcgtgcagtgccagaaggccggcatggagttccacgaggagctgcacaacctgggcgccaaggagggcctgaagggcaggaagctgaacaaggccacagagagctttgcctggaacatcaccgtgctgaagggccagggcgacctgctgaagaatgccaagaatgaggccatcgagaacatgaagcagatccagctggcctgcctgagctgtggcctgagcaaggcccccagcagcagcgctgaggccaagagcaagaggagcctggaggccatcgaggagaaggagagcagtgaagaaaatggcaagctgtag

SEQ ID NO: 163013 - DNA, 2994 bp, Artificial Sequence
  derived and/or modified sequence
atgcccagcgagaagaagatcagcagcgccaatgactgcatctccttcatgcaggccggctgtgagctgaagaaggtgcggcccaacagccgcatctacaaccgcttcttcaccctggacacagacctgcaggccctgcgctgggagcccagcaagaaggacctggagaaggccaagctggacatcagcgccatcaaggagatccggctgggcaagaacacagagaccttcaggaacaacggcctggccgaccagatctgtgaggactgtgccttcagcatcctgcacggggagaactatgagagcctggacctggtggccaacagcgcagatgtggccaacatctgggtgtctggcctgcgctacctggtgagccgcagcaagcagcccctggacttcatggagggcaaccagaacaccccccgcttcatgtggctgaagacagtgtttgaggccgcagatgtggatggaaatggcatcatgctggaggacacctctgtggagctgatcaagcagctgaaccccaccctgaaggaggccaagatccggctgaagttcaaggagatccagaagagcaaggagaagctgaccaccagggtgacagaggaggagttctgtgaggccttctgtgagctgtgcaccaggcctgaggtgtacttcctgctggtgcagatcagcaagaacaaggagtacctggatgccaatgacctgatgctgttcctggaggccgagcagggcgtgacccacatcacagaggacatctgcctggacatcatccgccgctatgagctgtctgaggagggccggcagaagggcttcctggccattgatggcttcacccagtacctgctgagcagtgaatgtgacatctttgatcctgagcagaagaaggtggcccaggacatgacccagcccctgagccactactacatcaatgccagccacaacacctacctgattgaggaccagttccggggccctgctgacatcaatggctacatccgggccctgaagatgggctgccgctctgtggagctggatgtgtctgatggcagtgacaatgagcccatcctgtgcaacagaaacaacatgaccacccacgtgtccttccgcagcgtcatcgaggtgatcaacaagtttgcctttgtggccagcgagtaccccctcatcctgtgcctgggcaaccactgcagcctgccccagcagaaggtgatggcccagcagatgaagaaggtgtttggaaacaagctgtacacagaggcccccctgcccagcgagagctacctgcccagccctgagaagctgaagaggatgatcatcgtgaagggcaagaagctgcccagcgaccctgatgtgctggagggggaggtgacagatgaagatgaggaggccgagatgagcaggaggatgtctgtggactacaatggagagcagaagcagatccggctgtgccgggagctgagtgacctggtgtccatctgcaagtctgtgcagtacagagactttgagctgtccatgaagagccagaactactgggagatgtgcagcttcagcgagacagaggccagcagaattgccaatgagtacccagaagattttgtgaactacaacaagaagttcctgagccgcatctaccccagcgccatgagaattgacagcagcaacctgaacccccaggacttctggaactgtggctgccagatcgtggccatgaacttccagaccccaggccccatgatggacctgcacacaggctggttcctgcagaatggaggctgcggctacgtgctgcggcccagcatcatgagagatgaggtgtcctacttcagcgccaacaccaagggcatcctgcccggggtgagccccctggccctgcacatcaagatcatcagcggccagaacttccccaagcccaagggggcctgtgccaagggagatgtgattgacccctacgtgtgcatcgagatccacggcatcccagctgactgcagcgagcagaggaccaagacagtgcagcagaacagcgacaaccccatctttgatgagacctttgagttccaggtgaacctgcctgagctggccatgatccgctttgtggtgctggatgatgactacatcggagatgagttcatcggccagtacaccatcccctttgaatgtctgcagcccggctacagacatgtgcccctgcggagctttgtgggggacatcatggagcacgtgaccctgtttgtgcacatcgccatcaccaacagaagtggcggcggcaaggcccagaagaggagcctgtctgtgaggatgggcaagaaggtgcgggagtacaccatgctgaggaacatcggcctgaagaccattgatgacatcttcaagattgctgtgcaccccctgcgggaggccatcgacatgagggagaacatgcagaatgccatcgtgtccatcaaggagctgtgtggcctgccccccatcgccagcctgaagcagtgcctgctgaccctgagcagccgcctcatcaccagtgacaacacccccagcgtgtccctggtgatgaaggacagcttcccctacctggagcccctgggcgccatcccagatgtgcagaagaagatgctgacagcctatgacctgatgatccaggagagccgcttcctgattgagatggctgacacagtgcaggagaagatcgtgcagtgccagaaggccggcatggagttccacgaggagctgcacaacctgggcgccaaggagggcctgaagggcaggaagctgaacaaggccacagagagctttgcctggaacatcaccgtgctgaagggccagggcgacctgctgaagaatgccaagaatgaggccatcgagaacatgaagcagatccagctggcctgcctgagctgtggcctgagcaaggcccccagcagcagcgctgaggccaagagcaagaggagcctggaggccatcgaggagaaggagagcagtgaagaaaatggcaagctgtag

SEQ ID NO: 163014 - DNA, 3288 bp, Artificial Sequence
  derived and/or modified sequence
atggccgagggcgccgccggccgggaggaccccgccccccccgacgcagctggtggagaggacgaccctagagttggacccgacgcggcgggagactgtgtcaccgccgctagtggcggtcgtatgcgggacaggcggtcaggtgttgctcttcccggtgccgcgggaacccctgccgattcagaggctggtctcctcgaggctgccagagctacccccaggcggagctctatcatcaaggatccatcgaaccagaaatgtggaggcagaaaaaaaacggtgagtttttcatcaatgccatctgagaagaagatctcttccgccaatgactgcatttctttcatgcaggctggttgcgaattaaaaaaggtccgacccaactctcgtatttataacaggttcttcacactggacacagatttacaggcactgcggtgggagccgagcaagaaagatttagagaaggccaaattagacatttcagcaattaaagaaattcggctagggaaaaataccgaaacctttcgcaataatggattggctgatcaaatctgtgaagattgcgctttctctatccttcatggcgaaaattacgaaagcctagatcttgtcgccaactccgcagacgtggccaatatttgggtctctggtctgagatatctagtgagcaggtctaaacagcccctcgatttcatggaaggaaatcagaacactccccggttcatgtggctaaagaccgttttcgaggctgctgatgtggacggaaatggcatcatgttggaggatacgtcagtcgaacttatcaaacaactgaatcctacactgaaggaagccaaaatcaggttaaaattcaaggagatacaaaaaagtaaagagaagctgacaacacgggtgactgaagaagaattttgtgaggctttttgtgaactctgcactcggcccgaagtctatttcctgttagtgcagatcagcaaaaacaaagagtacctggatgctaatgatttgatgttgttcctcgaagcggagcagggagtcactcatataacagaggatatttgccttgacatcattcgaaggtatgagctgtccgaggagggtcgacagaagggattcttggcaatagatggtttcacgcagtacctgttgtcatctgaatgcgatatcttcgaccccgagcagaagaaagtggcccaggacatgacacagcccctgtcccactactacatcaatgcatcccacaatacgtatctcattgaggaccagttcagaggacccgccgacatcaatggctatatacgggctctcaagatgggctgtcggagcgtggagcttgacgtgagcgacgggtctgacaatgagccaatcctgtgtaaccggaacaatatgaccacacacgtctctttccgatcggtcattgaggtcatcaacaagtttgcttttgtcgcctcggagtaccccttgatcctctgcctgggaaaccactgcagcctccctcaacagaaagtgatggctcagcagatgaagaaagtgtttggcaacaagctgtacaccgaagccccactgccttctgaaagttacctgccaagtcctgaaaagctgaagcggatgattatcgttaaaggcaagaaactaccaagtgaccccgatgtcctggagggcgaagtcaccgacgaagacgaggaagcagaaatgtcacgtagaatgtcagtggactataacggcgaacagaaacagatccgtctctgccgggagctaagtgatttggtatccatttgcaaaagtgtccagtatcgtgacttcgaactgtccatgaaatcacagaattattgggagatgtgttccttctctgagaccgaagcctcacgcatagcaaacgaataccccgaagattttgtcaattataacaagaagttcctctctcggatatacccttctgccatgcgtattgattcttccaacctgaacccccaagatttctggaattgcgggtgccaaatcgtggccatgaattttcaaaccccaggccctatgatggacctgcatacaggatggtttttacaaaacggcggatgcggttacgtgctgagacccagtataatgagagacgaggtcagttacttttccgctaataccaagggcatactgcccggagtaagcccgttagcactacacataaaaattatctccggccagaatttccccaaaccaaagggagcttgtgcaaagggggatgtcatcgatccttatgtgtgtatcgaaattcatggcatacccgccgactgttcagagcagcggactaagacagtccagcaaaacagtgataaccctatttttgatgaaaccttcgagtttcaagttaatctcccagagctggccatgatcagatttgtcgtgctggatgatgattacatcggcgatgagtttataggccagtatacaatcccgttcgagtgtcttcagcccggctaccgccacgtgcctctccgatctttcgtgggagacattatggaacacgttaccctgttcgtacacattgctattacaaacagatctggcggcggcaaggctcaaaaaaggtctctcagcgttagaatgggcaagaaagtgagggagtacacaatgctgcgcaatattgggctgaagactatcgacgatatttttaaaatcgctgtccacccgcttcgcgaagcgatagatatgcgggagaacatgcagaatgccattgtgtctattaaggaactctgtggattgcctcctatagcctctttaaagcagtgtcttctaacccttagttcacgcctcattacttcagacaacactccgagcgtgagcctggtgatgaaggactctttcccctacctggagccactcggcgctatccccgacgtgcagaagaagatgctgaccgcatatgatttgatgattcaggagagcagattcctcatcgaaatggctgacaccgtgcaggagaaaatagtccaatgtcagaaggccggaatggaatttcacgaagagctgcacaacctgggcgcaaaagaaggcctgaaggggcgcaagctgaacaaagccacagaaagttttgcttggaacattactgtcctcaagggccagggagacctcctgaagaatgcgaagaacgaggcgattgagaacatgaagcaaattcagctcgcttgccttagttgcgggcttagcaaagccccatcgtcatccgctgaagcgaagagcaaaagaagcctggaagcaatcgaggagaaagaatctagcgaagaaaatggtaagctgtag

SEQ ID NO: 163015 - DNA, 2994 bp, Artificial Sequence
  derived and/or modified sequence
atgcccagcgagaagaagatcagcagcgccaacgactgcatcagctttatgcaagcaggctgtgaattgaagaaagtgcgccctaacagcaggatatataaccggttcttcactctcgacacagatctgcaggcccttcgctgggagccttccaagaaggacctggaaaaggccaagttagacatcagcgctattaaggagattcgccttggcaagaacacggaaacttttcgaaataatggcttagcggaccagatttgcgaggattgtgcgtttagcattctgcacggtgaaaactacgagtcgcttgacttagtcgccaacagtgcagacgtcgctaacatctgggttagcggcttaaggtatctggttagtaggtctaaacagccgctggacttcatggagggaaaccagaatactccccggttcatgtggctgaaaactgtctttgaagctgcagacgtggacggaaacgggattatgctggaggacacaagtgtagaattgattaaacagctgaacccaacactgaaggaagcaaaaatcagactaaagtttaaggaaatccaaaagtcgaaagagaaactcacaacaagagtgaccgaagaagagttttgcgaggccttttgcgagctctgtacccgtcccgaggtttacttcctgctagttcaaatctctaaaaataaggagtatttagatgcgaacgatctgatgctcttcctggaggccgaacaaggggtgacccatattaccgaggacatctgcctggatataattcgacgatacgaactgtccgaggaaggccgccagaagggattcttagcgattgatggttttacccaatatctgcttagttccgaatgtgatatctttgatcctgagcagaagaaggtggcacaggatatgacccagcccctgtcccattactatattaatgccagccataacacgtaccttattgaggaccaattcagaggccctgccgacattaatggttatattcgagcactgaagatgggctgccgctctgtcgaactggacgtgagtgacggcagcgacaacgagcccattctttgcaatcgcaacaacatgacaacgcatgtgtcctttcgctctgtcatcgaagtaattaataagtttgctttcgttgcaagtgagtatcccctgatactttgtcttggcaatcactgttctttgcctcagcagaaggtaatggcgcagcagatgaaaaaggtatttggaaacaagctttacaccgaagctcctctgccatccgagagctatctgccttcacccgaaaagttgaagcgaatgatcatcgtgaaaggaaagaaactcccaagcgatcccgatgtactggaaggtgaagtgaccgatgaagacgaggaagcagaaatgagccggaggatgtctgtggattacaatggtgaacagaagcagatccggctgtgcagagaactgtctgatctcgtgtcgatttgtaaaagtgttcaatatagggactttgaactgtctatgaaaagtcaaaattactgggaaatgtgcagttttagcgaaacggaggctagcaggattgcaaacgaatatcccgaggattttgttaactacaataaaaaatttctctcccgtatatatccttccgcgatgagaatcgactcctctaatttgaatccacaggatttttggaactgtggctgtcagatcgtggccatgaattttcagaccccgggccccatgatggacctgcacacagggtggttcctgcaaaacggcggatgcggatacgtgctgcgccccagcattatgagggacgaagtatcgtacttctctgccaacactaagggcatcctgcccggtgtgagtccactggcacttcacattaaaattatttccggccaaaatttccccaagccaaaaggtgcttgtgccaagggggacgtcattgatccctacgtctgtatcgaaatccatggaattccagcagactgcagtgagcaacgtaccaaaactgttcagcagaactcagataaccccatcttcgatgaaactttcgaattccaggtgaatctcccagaactcgcaatgattaggttcgtggttcttgatgacgattacatcggtgatgaatttattgggcaatacaccattccctttgaatgtctgcaacccggatatagacatgtgcctctgcgctccttcgttggcgacattatggagcacgtcactcttttcgttcatatagcaataacaaacaggtccggcggtggcaaagcgcaaaaacggagcctttcagtgaggatgggcaagaaagtgcgggaatatacaatgctccgcaatatcggtttgaagaccatagacgatattttcaaaatcgcagttcatcccttgagagaggcaatcgacatgagagaaaacatgcagaacgccatagtcagcatcaaagagctttgtggtttacctccaatcgcctcattaaagcagtgccttctgacgctcagttcgcgcttgataaccagcgataacactcccagcgtttcactcgtcatgaaagacagcttcccttatttagagccattgggggctatccccgatgtccagaaaaagatgctgactgcgtacgatctgatgattcaggagtcacggtttcttattgaaatggcagatacggtccaagaaaaaattgtgcagtgccaaaaagccggaatggaatttcacgaggagctgcacaacttgggtgctaaagagggcctgaaagggagaaagctgaataaggcgaccgagtcattcgcatggaatataaccgtcctgaagggacagggggacttgctgaaaaatgccaaaaacgaggcaatagaaaacatgaagcagatccaattagcctgtttgtcgtgtgggctgagcaaagctccctcaagttccgccgaggccaagtcgaagcgttcacttgaggccatcgaagagaaagagtcctcagaagaaaacgggaaactgtag

SEQ ID NO: 163016 - DNA, 3288 bp, Artificial Sequence
  derived and/or modified sequence
atggctgagggagcagctggcagagaagacccagcccctcctgacgccgctgggggagaagatgatcctcgcgtgggcccagacgctgccggagattgtgtgactgcagcttccggaggccgtatgcgggatagacgtagcggtgtagcgttgcccggagccgcaggtacaccagccgattctgaggccggactcctagaggccgctagagccacccctcggagatccagcattataaaggacccctccaaccagaaatgcggcggaagaaaaaaaacagtcagcttttccagcatgcctagtgagaaaaagatctctagtgccaacgattgtatttcgtttatgcaagcaggatgcgagctgaaaaaggtgagaccaaactctcggatttataacagattcttcacgctcgatactgatctccaggccctgcgttgggaaccaagcaagaaagacttagagaaggccaagctagatatctcagctataaaagagattcgactgggaaagaatactgagacctttaggaataatggcctcgccgaccagatatgtgaagactgtgcctttagtattcttcatggtgaaaattatgagagccttgacctcgtggctaatagcgcagacgtggcaaacatatgggtgagtggactaaggtaccttgtgagcagatctaagcagccactggattttatggaaggtaatcaaaacacacccagatttatgtggttaaaaacggtatttgaggctgctgatgtggatggcaatggaattatgttggaagacacctccgttgagctcattaaacagctgaacccgaccttaaaggaagccaaaatccggctcaagttcaaagaaatccagaagtctaaagaaaagctgacgacgcgagtaacagaagaagaattttgtgaggctttttgcgaactgtgcacaaggcccgaggtctatttcctgctagtacagatcagcaaaaataaggaatatctggacgctaacgacttgatgctgttccttgaggctgaacagggggtaacacatataacagaggacatttgcctggacatcattaggagatacgagctttctgaagaaggccgtcagaagggttttctggccatcgacgggtttacccagtatctgttgtcatcagaatgcgacatctttgaccctgaacagaagaaggtcgctcaggacatgactcagcccctaagccattattatattaacgccagccacaacacctatctgattgaggatcagtttaggggaccagccgacataaatgggtacatccgcgctcttaagatgggctgcaggagcgtggagcttgacgtctcagacggcagtgacaacgagcctatcctgtgtaatcgcaacaatatgactacccacgttagcttccgatccgtcatcgaggtcatcaataaattcgccttcgtggcgtcagaataccccctgattctgtgtctcggtaaccactgtagtctgccacaacagaaggtgatggcacagcagatgaagaaggtgtttggaaataaactgtacaccgaagcccctcttccgagcgaaagctatctgcccagccccgagaagctgaaaagaatgatcatcgttaagggtaaaaaactgcccagcgaccctgatgtcctggaaggcgaggttactgacgaggacgaggaggccgaaatgagcagacgaatgtctgtggactacaacggggagcaaaaacaaatacgcctgtgcagagagctgagcgatctcgtgtcaatttgtaaaagcgtgcagtaccgggattttgaactctctatgaagagccaaaactactgggagatgtgctccttttctgaaacagaagccagcaggatcgcgaatgaataccccgaggattttgtcaactataataagaaattcctgtctagaatctatccatcagcgatgcggattgactcttccaacctgaacccgcaggacttttggaattgtggatgccagattgtcgccatgaactttcagactccaggacctatgatggatttgcacacgggctggttcctccagaacggaggatgcgggtacgtcctgcggccatctattatgcgcgatgaggtgtcatactttagcgcgaacacgaaagggatcctgccaggtgtcagccctctcgcactacatatcaagattatttccgggcagaatttccccaaacccaaaggagcctgcgctaagggggacgtaattgatccctacgtgtgcatcgagattcacggcatccccgcagactgctcagagcaaagaactaaaactgtacagcaaaatagcgataatccgattttcgacgagactttcgagttccaagtcaacctccccgaattggctatgataagattcgtggttctcgatgacgactacataggagacgaattcattggacagtacactattccatttgaatgcctgcagcccggataccggcatgtgcccctgaggagctttgtgggagatatcatggagcatgtgaccctttttgtacatatcgctatcactaataggtctggaggcggtaaggctcaaaaacgcagtctgtccgtcaggatgggcaagaaagttcgcgagtataccatgctccgcaacatcggtttgaaaactattgacgacatcttcaaaatcgcagtgcatccactcagggaggccatcgatatgcgggaaaacatgcagaacgccattgttagtatcaaagagctgtgcggcctccccccaatagcttcactaaaacaatgcctgctgactctgtcttcccggctgattacgagcgataatactccctccgtatccttagttatgaaggactcttttccctaccttgaacctcttggagctattcccgatgtgcagaaaaagatgctcaccgcgtacgacttgatgatccaggaatccagattcctaatagagatggctgatacagtgcaagagaaaatagtgcaatgtcaaaaagccggaatggagtttcacgaggaactccataatctaggggcaaaggagggcctcaagggaagaaaactgaataaggcaacagagtcgttcgcctggaacatcaccgtgttgaaagggcaaggtgacctgttgaaaaatgcaaaaaacgaggccatcgagaatatgaaacaaatccagttggcatgtctgtcttgtggattgagcaaggccccatccagttccgcagaggccaaaagtaaaaggtcacttgaggccatcgaggaaaaggagagctctgaagaaaacggcaagctgtag

SEQ ID NO: 163017 - DNA, 2994 bp, Artificial Sequence
  derived and/or modified sequence
atgcccagcgagaagaagatctcatccgctaacgattgcatctcttttatgcaggctgggtgcgagctgaagaaagtgcgtcccaattctcgaatttacaatcgtttctttactctcgatacagacctgcaggccttgcgctgggaaccgagtaagaaagacctcgaaaaagccaaacttgacatttcggccatcaaagaaataagactcggaaagaacaccgaaacattccgcaataatggtctcgccgaccagatatgtgaggattgcgctttctcgatcctgcacggggagaactatgaatccttggatctggtggctaattctgctgacgttgccaatatatgggttagtggactgagatacctggtatcacgcagtaaacaacccctcgatttcatggaagggaatcagaacacgcctcgttttatgtggctaaagactgtgtttgaagctgccgacgttgacgggaacggtattatgctcgaggatacgtcagtcgagctgatcaaacagctcaatcccactctgaaggaagcgaaaatcagactgaagttcaaagagattcagaagtcaaaggagaaattgacgacccgcgtaactgaagaagagttctgcgaagcgttttgcgagttatgtacgagaccggaggtgtacttcctcctagtgcaaatttcgaagaataaagagtacctggacgcaaacgacctgatgctcttcctggaggcagagcagggcgtcacccacatcaccgaggacatttgcctagatattatcaggaggtatgaattaagtgaagagggccgacagaaggggtttctcgctattgacggctttactcaatatctgttaagctccgaatgtgacatcttcgaccctgaacaaaagaaggttgcacaggatatgacccaacctttgtcacattactatattaatgcatcgcacaatacatacctgatcgaagatcagttcagagggccagcagatatcaacggctatatccgcgctttgaagatgggttgtcggtcggtggaactcgacgtttctgacgggtccgataacgaacctatattatgtaaccggaataatatgacaacccatgtgtcttttcggtccgttattgaagtcatcaataaatttgccttcgtggcgtctgagtacccgcttatcctgtgtttaggaaaccattgttcccttccgcagcagaaagtgatggcacagcagatgaagaaggtctttgggaacaaactgtacaccgaggcccctttgcccagcgaaagttaccttccctctcctgaaaagctgaaaaggatgatcatcgtcaaaggaaaaaagctaccctccgacccagatgtacttgagggggaggtgacagatgaggacgaggaggcggagatgtcccgaaggatgtcggtagactacaatggcgagcagaagcagattaggctttgccgagaactcagtgacctcgtctccatctgcaaaagtgtgcagtatcgggacttcgagttgtccatgaaaagccagaattattgggagatgtgttctttctcagaaaccgaagcctcgaggatagctaatgaataccccgaggactttgtcaactataataagaaattcctgtcgcgcatctacccttctgcgatgagaattgactcatctaatctgaacccacaggacttctggaactgcggctgccagatagtggcgatgaattttcagacccctggtccgatgatggaccttcacacaggttggtttcttcaaaatggagggtgcggatatgtcctgaggccgtctattatgcgcgacgaggtcagctatttctcagccaacacaaagggaatcttgccaggcgtgagtcctttggcactgcacatcaagatcatatccggtcagaattttccgaagccaaagggggcttgcgcaaagggcgacgtgattgatccctacgtgtgcatcgagatccacggcattccagctgattgtagcgaacagaggacgaaaacagtgcagcagaactctgacaatccgatattcgatgagacatttgaatttcaggtaaacctgccggaactggccatgatcagatttgtggtcctggatgacgactacatcggggatgagttcatcggacagtataccatccccttcgagtgcctgcagccagggtaccgtcacgtgccattacgttcttttgttggggatattatggagcatgtgaccctgttcgtgcacattgccattacaaacaggtctgggggaggcaaagctcaaaagcgctcactcagcgtgcggatgggcaagaaggtccgagagtacaccatgctgcgcaatataggcctcaaaaccatcgacgatatctttaagatcgccgtgcacccactgagggaggcaatcgatatgagagaaaatatgcagaacgctattgttagcattaaagaactgtgtggcctgccgccaattgccagccttaagcagtgcctgctaacgcttagtagtcgccttatcactagcgacaatacgccctcagtgagcctagttatgaaggactcattcccgtacctcgagcctctcggcgctattcctgatgtacaaaaaaagatgctgaccgcctacgatctaatgatccaggaatctcgctttctaattgagatggcggacaccgtccaggagaaaatcgtacagtgccagaaggccggaatggaattccatgaggaacttcacaacctgggagctaaagaggggctcaaaggccgtaagcttaataaagcaacagagtcatttgcctggaacataaccgtcctgaagggccaaggagacctgctgaagaatgccaagaatgaggctatcgagaatatgaagcagatccagctggcttgcttgtcctgcggcttgtctaaagcccctagcagttcagcagaagctaagtctaaacgatcactagaggctatagaggagaaggaaagctctgaggaaaacggtaaactgtag

SEQ ID NO: 163018 - DNA, 5125 bp, Artificial Sequence
  derived and/or modified sequence
atcgggccgccggcgtccgggctccagaggccgcctggctgggcgcccggtgccttttgtctggcgcagggccggcgtttgcatcacatttcggatacctccctctctttttcgcctctccttctgcctcccgctcacatcgcctccccactcccgccaccgtcccccgccggactgctagcctcctagaccgaagcccgaggacgtctctgcccgagcgatgtcccctctccagaaagttgccgccgccgccgccgccgccgccactgccgccgctgggcggtgaaacaaagtctggcggggccgcctcccggtgcaggagcgcaccggtgcctagcggctggactccgctgccgggcgtcccgctttcccccggggagccctaaacgctccaggccatggccgagggcgcggccggcagggaggatccggcgccgcccgacgcggcggggggcgaagacgacccccgagtgggcccggatgccgccggggactgcgtgacggcggcctctgggggccggatgagggaccgtcgcagcggggtcgcactgccaggcgccgcggggaccccagcggacagcgaggcgggcctcctggaggcagcacgggcgaccccccggcgcagcagcatcatcaaggatccttcaaaccaaaaatgtggtggaagaaagaaaaccgtgtctttcagcagcatgccatcggaaaagaaaattagcagtgcaaatgactgcatcagcttcatgcaagctggctgtgagttgaagaaagtccggccaaattctcgcatttacaaccgttttttcactctggacacagaccttcaagctcttcgctgggaaccttcaaagaaagacctcgagaaagccaagcttgatatttctgccataaaagagatcagactggggaaaaacacggaaacatttagaaacaatggccttgctgaccagatctgtgaggactgtgccttttccatactccacggggaaaactatgagtctctggacctagttgccaattcagcagatgtggcaaacatctgggtgtctgggttacggtacctggtttctcgaagtaagcagcctcttgattttatggagggcaaccagaacacaccacggttcatgtggttgaaaacagtgtttgaagcagcagatgttgatgggaatgggattatgttggaagacacctctgtagagttaataaaacaactcaaccctactctgaaggaagccaagatcaggttaaagtttaaagaaatccagaagagcaaggaaaaactaaccacccgcgtgaccgaagaggaattttgtgaagctttttgtgaactttgcaccaggccagaagtgtatttcttacttgtacagatatctaaaaacaaagaatatttggatgccaatgatctcatgctctttttagaagctgagcaaggagtcacccatatcaccgaggatatatgcttagacatcataaggagatacgaactttctgaagagggacgtcaaaaagggtttcttgcaattgatggctttacccagtatttattgtcatcagaatgtgacatttttgatcctgagcaaaagaaggttgcccaagatatgacccagccattatctcactactatatcaatgcctctcataacacctatctaatagaagaccagttcagggggccagctgacatcaatgggtacattagagctttgaaaatgggctgtcgaagcgttgaactcgatgtaagtgatggttcagataatgaaccaatcctttgtaatcgaaataacatgacaacccatgtttcctttcgaagtgtcatagaggtaataaataaatttgcctttgttgcttctgaatacccactcattctttgcttgggaaatcactgctccttgccgcagcagaaggtaatggctcaacagatgaaaaaggtctttggcaataaactctatactgaagcacctttgccctcagaatcctacctcccatcaccagaaaaattaaaaagaatgatcattgtgaaaggaaagaagttgccttctgatccagatgtgttagaaggagaagtaacagatgaagatgaagaagctgaaatgtctcgaaggatgtcggtagattacaatggtgagcagaagcaaatccgactctgtagggagctctctgatttggtgtctatttgtaaatctgttcaatacagggattttgaactatctatgaaaagccaaaactattgggaaatgtgttcatttagtgaaacagaggccagccgcattgcaaatgagtacccagaggattttgttaattataataagaagttcttatcaagaatctatccaagtgccatgaggatcgattccagtaacttgaatccacaggacttttggaattgtggctgtcagattgtagcaatgaattttcagactccgggtccaatgatggaccttcacacgggctggtttcttcaaaacgggggatgtggttatgttctaaggccgtctataatgcgagatgaagtttcttacttcagcgcaaatacaaagggcattctacctggggtgtctcctctagctcttcatatcaagatcatcagtggtcagaatttcccaaagcccaagggagcttgtgccaaaggggatgtcatagatccctatgtttgtatagagatacacggaattccagcggattgttcggaacaaagaactaaaactgtacagcaaaacagtgataatcctatttttgatgaaacttttgagttccaagtaaacctacctgagctggccatgatccgttttgttgttctggatgatgactacattggggatgagtttatagggcaatatacgataccatttgaatgtttgcagcctggatatcggcatgttcccctgcgttcttttgtgggtgacatcatggagcacgtaaccctttttgtccacatagcaataactaatcgaagtggaggaggaaaggcacagaagcgcagtctttcagtgagaatggggaagaaagttcgggaatataccatgctcaggaatatcggtcttaaaaccattgatgacatctttaaaatagcggttcatccattacgagaagccatagatatgagagaaaatatgcagaatgcaatcgtgtctattaaggaactatgtggactccctccaattgccagtctgaagcagtgcctgttaactctgtcatctcggctcatcaccagtgacaatactccttcagtctcacttgtgatgaaagacagctttccttacctggagcctctgggtgcaattccagatgtgcagaaaaagatgctgactgcttatgatctgatgattcaagagagccggtttctcatagaaatggcggacacagtccaggaaaagattgtacagtgtcagaaagcagggatggagttccatgaagaacttcataatttgggggcaaaagaaggcttgaagggaagaaaactcaacaaagcaactgagagctttgcttggaacattacagtattgaagggccaaggagatctgttgaagaatgccaagaatgaagctatagaaaacatgaagcagatccagctggcatgcctgtcctgtggactgagtaaagcccccagcagcagtgctgaggccaagagcaagcgcagcctggaagccatagaggagaaggaaagtagtgaggagaatgggaagctgtgactctgggcattatcgacacgttcacccatcttatcaaggactctggtttctcattcttgttttctttctttaaatgttttataagttcacaaaatggtgccctatatggggtattggacatagatattttcacaatgtcagtatttcagtgtagttaatttatctaaattaaagcctttagtatcagtgttttaaattctgagacatgtgtcaacacccctgtgtggatgcctgtggaagagtgtgtgtgtgtgtgtgtgtgtgtgtgtgtggcagagagagagaaagagagagagagagagaaattctgttaaaatctattctgtgttgcattattcatttagtgagttattccttgatcattttgggacaattgttttaatctgaaattctaaagagcacttactgtaacctgttgctgtgtttaatttgacttctctgcctttgacatttaatttagtgatcttagcatagcttattattgaaggaagccaaatttatcaaagcatagatgttttggtagattaaatatagattagaaaaattcctaagaatcagagtagaaataaaagtgaatgaaagattaaacagatgatgagaatttctaaaaagattagcaaggtcatttcttcagtcagaaaactttaaaaaatatttattaaataaaatcaatttttaggaagttttctgtagtcatttactaaacatatgatttcactagaaaagctgatcataagtgaatttatacctacctgtgtggtactctgaaacacactgaaagctctgttgcaattaggattttgatgtgacaataatattgttgtataatttcgagatttgtaggaaggtctcattcttccaagctgagagtctagcactcattttctataacagatatggcagcttagaggtgttggctttgtttggatgtaatttagggtactaaatttaaatttaaagatattgttcaaacaatatcatatcatcacattgagctgatataaattctgtgggtccgataatatctttgtgataatttaagagctaaccagttaccacacatctatgatataaccctaacacacacagaaaagcatacatgcaaaaagaaatgactaattagggtacatttataattgcatctaggtaatttttaccctaatgtcttcataaagtacttgagtgtaatgtttgttacctccaacagaactaaatgttctatggttatgaaagaatatatttatttaaagcattgcttttattttgaaaagcttcttaattaatttgattaacaaatatgctaatttggggaaacctagagaagataattgttgaaattttgcaaatataaacatctcctatagcttctgtgttatttctgacttcttaacactattatgtttatgttgcacattactgaaagagtaaagatatgaaaa

SEQ ID NO: 163019 - DNA, 4426 bp, Artificial Sequence
  derived and/or modified sequence
atgccatcggaaaagaaaattagcagtgcaaatgactgcatcagcttcatgcaagctggctgtgagttgaagaaagtccggccaaattctcgcatttacaaccgttttttcactctggacacagaccttcaagctcttcgctgggaaccttcaaagaaagacctcgagaaagccaagcttgatatttctgccataaaagagatcagactggggaaaaacacggaaacatttagaaacaatggccttgctgaccagatctgtgaggactgtgccttttccatactccacggggaaaactatgagtctctggacctagttgccaattcagcagatgtggcaaacatctgggtgtctgggttacggtacctggtttctcgaagtaagcagcctcttgattttatggagggcaaccagaacacaccacggttcatgtggttgaaaacagtgtttgaagcagcagatgttgatgggaatgggattatgttggaagacacctctgtagagttaataaaacaactcaaccctactctgaaggaagccaagatcaggttaaagtttaaagaaatccagaagagcaaggaaaaactaaccacccgcgtgaccgaagaggaattttgtgaagctttttgtgaactttgcaccaggccagaagtgtatttcttacttgtacagatatctaaaaacaaagaatatttggatgccaatgatctcatgctctttttagaagctgagcaaggagtcacccatatcaccgaggatatatgcttagacatcataaggagatacgaactttctgaagagggacgtcaaaaagggtttcttgcaattgatggctttacccagtatttattgtcatcagaatgtgacatttttgatcctgagcaaaagaaggttgcccaagatatgacccagccattatctcactactatatcaatgcctctcataacacctatctaatagaagaccagttcagggggccagctgacatcaatgggtacattagagctttgaaaatgggctgtcgaagcgttgaactcgatgtaagtgatggttcagataatgaaccaatcctttgtaatcgaaataacatgacaacccatgtttcctttcgaagtgtcatagaggtaataaataaatttgcctttgttgcttctgaatacccactcattctttgcttgggaaatcactgctccttgccgcagcagaaggtaatggctcaacagatgaaaaaggtctttggcaataaactctatactgaagcacctttgccctcagaatcctacctcccatcaccagaaaaattaaaaagaatgatcattgtgaaaggaaagaagttgccttctgatccagatgtgttagaaggagaagtaacagatgaagatgaagaagctgaaatgtctcgaaggatgtcggtagattacaatggtgagcagaagcaaatccgactctgtagggagctctctgatttggtgtctatttgtaaatctgttcaatacagggattttgaactatctatgaaaagccaaaactattgggaaatgtgttcatttagtgaaacagaggccagccgcattgcaaatgagtacccagaggattttgttaattataataagaagttcttatcaagaatctatccaagtgccatgaggatcgattccagtaacttgaatccacaggacttttggaattgtggctgtcagattgtagcaatgaattttcagactccgggtccaatgatggaccttcacacgggctggtttcttcaaaacgggggatgtggttatgttctaaggccgtctataatgcgagatgaagtttcttacttcagcgcaaatacaaagggcattctacctggggtgtctcctctagctcttcatatcaagatcatcagtggtcagaatttcccaaagcccaagggagcttgtgccaaaggggatgtcatagatccctatgtttgtatagagatacacggaattccagcggattgttcggaacaaagaactaaaactgtacagcaaaacagtgataatcctatttttgatgaaacttttgagttccaagtaaacctacctgagctggccatgatccgttttgttgttctggatgatgactacattggggatgagtttatagggcaatatacgataccatttgaatgtttgcagcctggatatcggcatgttcccctgcgttcttttgtgggtgacatcatggagcacgtaaccctttttgtccacatagcaataactaatcgaagtggaggaggaaaggcacagaagcgcagtctttcagtgagaatggggaagaaagttcgggaatataccatgctcaggaatatcggtcttaaaaccattgatgacatctttaaaatagcggttcatccattacgagaagccatagatatgagagaaaatatgcagaatgcaatcgtgtctattaaggaactatgtggactccctccaattgccagtctgaagcagtgcctgttaactctgtcatctcggctcatcaccagtgacaatactccttcagtctcacttgtgatgaaagacagctttccttacctggagcctctgggtgcaattccagatgtgcagaaaaagatgctgactgcttatgatctgatgattcaagagagccggtttctcatagaaatggcggacacagtccaggaaaagattgtacagtgtcagaaagcagggatggagttccatgaagaacttcataatttgggggcaaaagaaggcttgaagggaagaaaactcaacaaagcaactgagagctttgcttggaacattacagtattgaagggccaaggagatctgttgaagaatgccaagaatgaagctatagaaaacatgaagcagatccagctggcatgcctgtcctgtggactgagtaaagcccccagcagcagtgctgaggccaagagcaagcgcagcctggaagccatagaggagaaggaaagtagtgaggagaatgggaagctgtgactctgggcattatcgacacgttcacccatcttatcaaggactctggtttctcattcttgttttctttctttaaatgttttataagttcacaaaatggtgccctatatggggtattggacatagatattttcacaatgtcagtatttcagtgtagttaatttatctaaattaaagcctttagtatcagtgttttaaattctgagacatgtgtcaacacccctgtgtggatgcctgtggaagagtgtgtgtgtgtgtgtgtgtgtgtgtgtgtggcagagagagagaaagagagagagagagagaaattctgttaaaatctattctgtgttgcattattcatttagtgagttattccttgatcattttgggacaattgttttaatctgaaattctaaagagcacttactgtaacctgttgctgtgtttaatttgacttctctgcctttgacatttaatttagtgatcttagcatagcttattattgaaggaagccaaatttatcaaagcatagatgttttggtagattaaatatagattagaaaaattcctaagaatcagagtagaaataaaagtgaatgaaagattaaacagatgatgagaatttctaaaaagattagcaaggtcatttcttcagtcagaaaactttaaaaaatatttattaaataaaatcaatttttaggaagttttctgtagtcatttactaaacatatgatttcactagaaaagctgatcataagtgaatttatacctacctgtgtggtactctgaaacacactgaaagctctgttgcaattaggattttgatgtgacaataatattgttgtataatttcgagatttgtaggaaggtctcattcttccaagctgagagtctagcactcattttctataacagatatggcagcttagaggtgttggctttgtttggatgtaatttagggtactaaatttaaatttaaagatattgttcaaacaatatcatatcatcacattgagctgatataaattctgtgggtccgataatatctttgtgataatttaagagctaaccagttaccacacatctatgatataaccctaacacacacagaaaagcatacatgcaaaaagaaatgactaattagggtacatttataattgcatctaggtaatttttaccctaatgtcttcataaagtacttgagtgtaatgtttgttacctccaacagaactaaatgttctatggttatgaaagaatatatttatttaaagcattgcttttattttgaaaagcttcttaattaatttgattaacaaatatgctaatttggggaaacctagagaagataattgttgaaattttgcaaatataaacatctcctatagcttctgtgttatttctgacttcttaacactattatgtttatgttgcacattactgaaagagtaaagat

SEQ ID NO: 163020 - protein, 493 aa, Artificial Sequence
  derived and/or modified sequence
MALFGALFLALLAGAHAEFPGCKIRVTSKALELVKQEGLRFLEQELETITIPDLRGKEGHFYYNISEVKVTELQLTSSELDFQPQQELMLQITNASLGLRFRRQLLYWFFYDGGYINASAEGVSIRTGLELSRDPAGRMKVSNVSCQASVSRMHAAFGGTFKKVYDFLSTFITSGMRFLLNQQICPVLYHAGTVLLNSLLDTVPVRSSVDELVGIDYSLMKDPVASTSNLDMDFRGAFFPLTERNWSLPNRAVEPQLQEEERMVYVAFSEFFFDSAMESYFRAGALQLLLVGDKVPHDLDMLLRATYFGSIVLLSPAVIDSPLKLELRVLAPPRCTIKPSGTTISVTASVTIALVPPDQPEVQLSSMTMDARLSAKMALRGKALRTQLDLRRFRIYSNHSALESLALIPLQAPLKTMLQIGVMPMLNERTWRGVQIPLPEGINFVHEVVTNHAGFLTIGADLHFAKGLREVIEKNRPADVRASTAPTPSTAAV

SEQ ID NO: 163021 - protein, 513 aa, Artificial Sequence
  derived and/or modified sequence
MGLSGSDNSCDPTPPPGPLAMALFGALFLALLAGAHAEFPGCKIRVTSKALELVKQEGLRFLEQELETITIPDLRGKEGHFYYNISEVKVTELQLTSSELDFQPQQELMLQITNASLGLRFRRQLLYWFFYDGGYINASAEGVSIRTGLELSRDPAGRMKVSNVSCQASVSRMHAAFGGTFKKVYDFLSTFITSGMRFLLNQQICPVLYHAGTVLLNSLLDTVPVRSSVDELVGIDYSLMKDPVASTSNLDMDFRGAFFPLTERNWSLPNRAVEPQLQEEERMVYVAFSEFFFDSAMESYFRAGALQLLLVGDKVPHDLDMLLRATYFGSIVLLSPAVIDSPLKLELRVLAPPRCTIKPSGTTISVTASVTIALVPPDQPEVQLSSMTMDARLSAKMALRGKALRTQLDLRRFRIYSNHSALESLALIPLQAPLKTMLQIGVMPMLNERTWRGVQIPLPEGINFVHEVVTNHAGFLTIGADLHFAKGLREVIEKNRPADVRASTAPTPSTAAV

SEQ ID NO: 163022 - protein, 405 aa, Artificial Sequence
  derived and/or modified sequence
MLQITNASLGLRFRRQLLYWFFYDGGYINASAEGVSIRTGLELSRDPAGRMKVSNVSCQASVSRMHAAFGGTFKKVYDFLSTFITSGMRFLLNQQICPVLYHAGTVLLNSLLDTVPVRSSVDELVGIDYSLMKDPVASTSNLDMDFRGAFFPLTERNWSLPNRAVEPQLQEEERMVYVAFSEFFFDSAMESYFRAGALQLLLVGDKVPHDLDMLLRATYFGSIVLLSPAVIDSPLKLELRVLAPPRCTIKPSGTTISVTASVTIALVPPDQPEVQLSSMTMDARLSAKMALRGKALRTQLDLRRFRIYSNHSALESLALIPLQAPLKTMLQIGVMPMLNERTWRGVQIPLPEGINFVHEVVTNHAGFLTIGADLHFAKGLREVIEKNRPADVRASTAPTPSTAAV

SEQ ID NO: 163023 - DNA, 1482 bp, Artificial Sequence
  derived and/or modified sequence
atggctctgttcggcgccctttttctagccttactcgcaggggcccacgctgagttccctgggtgcaagattagagtgacgagcaaggctctggaactggtaaaacaggaaggcctccggtttctcgagcaggagctggagaccataacaatcccggacttgagagggaaggaaggtcacttctattacaatatcagcgaagtgaaggtcaccgaactgcagctcacttcctccgaactggacttccagccccagcaggagctgatgctccagataacaaatgcatccctgggccttcgattccgccgccaactactgtattggttcttctatgacggtggctacattaacgcaagtgctgagggtgtcagcatcagaactgggctggaactctcccgggatccggccggcagaatgaaagtgtcaaacgtgtcttgccaagcgagtgtgtcaagaatgcacgctgcgttcggggggacgtttaagaaagtttacgatttcctctctacatttatcacctccgggatgcgcttcctgctcaaccagcagatttgtccagttttataccacgctggcactgtgctcttgaacagccttctggataccgttcccgtgcgttcatcggtggacgaattagtcggtatcgactactccctgatgaaagatcccgtagcgagtacctctaatctggacatggacttcagaggcgcctttttccctttgaccgaacggaactggtccttaccgaaccgtgctgttgaaccccaattgcaggaggaggaacgaatggtatatgtcgcattcagcgagttcttcttcgattccgcaatggagtcatattttcgagcgggagcgctgcagctgctgttggtcggggacaaggtcccacatgatctggacatgttactgagagcaacatacttcgggagtatcgtccttctgagccccgccgttatcgacagccctctgaaactggagctccgggtgctggctccccctcgctgcacaatcaagccttcaggcacaactatctccgtcaccgctagcgtgaccatcgcacttgtgcctcctgatcagcctgaggtacagttgagctctatgacgatggatgcaagactgagcgcaaagatggccctgagggggaaggccctgagaactcaactggacctccgaaggttccggatctactccaatcattccgccctcgaatctctggcgctcatcccactgcaggctccactcaagacaatgctgcagattggagtgatgccaatgctcaacgagagaacctggcgcggtgtgcagatccccctacccgagggcattaattttgtccacgaagtcgtgaccaaccatgcaggctttttaaccattggggccgatctgcactttgcgaaaggtttgcgggaagtgatcgaaaaaaaccgccctgctgacgtcagggcctccaccgccccaacgccttctaccgcagctgtctag

SEQ ID NO: 163024 - DNA, 1482 bp, Artificial Sequence
  derived and/or modified sequence
atggcattgtttggcgcgctgttcctcgcattgctggcaggagctcacgcggaattcccagggtgcaagattcgcgtgaccagcaaggcacttgagcttgtcaagcaggaaggtctgaggttcctggagcaggaactggaaacaataactattcctgacctgagaggcaaagaagggcacttctactataatatttccgaagtgaaagtgacagaactgcaactgacctctagtgagcttgactttcagcctcagcaggaattgatgctccagattacaaatgcctctctaggactgcgcttccgaaggcagcttttatactggttcttttacgacggcggctatataaatgcaagcgccgaaggagtatcaatccggacggggttggagctgtcaagagatcccgcgggcaggatgaaagtgagtaatgtgtcttgtcaggcgagcgtttctcggatgcatgctgcctttggcggcactttcaagaaggtgtacgactttctcagtacatttattaccagtgggatgcgattcctgctcaaccagcagatttgtccggtgttgtatcatgctggcacagtgctacttaactccctcttggacaccgtgccggttagaagctctgtggatgagctggtagggatcgactactcgttgatgaaggatccagtggcctccaccagcaatctggacatggacttccgcggagcattcttcccgttgactgaacggaattggtccctgcctaacagagccgtggaaccacaacttcaagaggaagaaaggatggtgtacgttgctttctccgaatttttcttcgattctgccatggaatcctacttccgcgccggagcactacaactcctgctggtgggagacaaggtgccacacgatttagatatgctgttgcgggccacatattttggatctatcgtgttactgagtcctgccgtgattgattctcctttaaaattagagcttcgggttctggccccacccagatgtactattaagccctccggcactactatttccgtaactgcaagtgtcacaatcgccttagttccccctgatcagccagaggtacagctgagtagtatgactatggatgccaggctttccgctaaaatggccctacgcggtaaggccttgcggacacagctcgacctccgcagatttcggatatactctaaccattctgcactggaatccctggcattgatccccctgcaagcaccgctcaaaaccatgctgcagattggcgttatgccaatgctaaacgagcggacttggaggggagttcagatccccctgcccgagggtatcaatttcgtgcatgaagtggtgaccaatcacgccggcttcctgaccattggggcagatttacactttgcaaagggcctgagggaggttatcgagaaaaacagacccgcagacgttcgcgccagtactgcacctaccccgtccacagccgccgtgtag

SEQ ID NO: 163025 - DNA, 1542 bp, Artificial Sequence
  derived and/or modified sequence
atgggtctgagtggttctgacaatagctgtgatccgaccccacctcccggcccactggccatggctctgtttggtgccctctttctggctctacttgccggcgctcacgccgagtttcccgggtgcaagatccgcgtgacttccaaggccttggagctagtgaaacaggaaggccttaggtttctcgaacaggagctagaaacgatcacgatccctgatctccggggcaaagaggggcacttctattataatatcagtgaggttaaggtcaccgagctacaattaacgagctctgagcttgattttcaacctcagcaggaactgatgctgcagattaccaatgcaagtctgggcctaagatttcggagacagttactgtactggtttttttacgacggtggctacattaatgcttctgcagagggggtgtccatcaggactgggttggagcttagccgagatcctgccggccgaatgaaggtgagtaacgtcagctgtcaggcgtccgtaagtagaatgcacgccgctttcggaggaactttcaagaaggtttacgattttctctccactttcataacatcggggatgcgatttctgctgaatcagcagatctgtccagtgctctatcacgccgggacggtgctcctaaactccctgttggataccgtgccagttaggtcctcggtggatgagctggtcggcattgattactccttaatgaaggaccccgtggcatctacttccaacctggatatggacttccggggtgcatttttccccctgaccgagaggaattggtccttacccaaccgagccgtggaaccacagttgcaggaggaagagcgcatggtatacgtggctttctccgaattcttcttcgattctgcgatggagagctatttccgggccggagctctgcagctcctcctggttggagacaaagtgccacatgatctggacatgctcctgagggcaacatattttggttccattgtacttctttcccctgccgtgatagattctcccctgaaactcgagctgagggttttggctccgcccaggtgcacgatcaaaccgagcggcactactatctctgtgaccgcaagcgtgactattgctctggtcccacccgaccagcccgaggtccagcttagttcaatgacaatggatgccaggctcagcgccaagatggcactgcggggaaaagcgctgcggacccagctggacttgcgaaggtttcgcatatactccaaccactctgccctggagagcctggccctgatcccgttgcaggcgcccctgaaaaccatgctccagattggcgtaatgcccatgctcaatgagcgaacgtggcgaggagtacagatccccttgcccgaggggatcaactttgtacacgaagtcgtgaccaaccatgctggatttctcacaatcggggcggatctccacttcgccaagggtttgcgggaagttatcgaaaagaaccggccagctgatgtgagagcttctaccgcccctaccccgagtacggccgcagtgtag

SEQ ID NO: 163026 - DNA, 1482 bp, Artificial Sequence
  derived and/or modified sequence
atggccctgtttggagccctcttcctggccctgctggccggggcccatgctgagttccctggctgcaagatccgggtgaccagcaaggccctggagctggtgaagcaggagggcctgcgcttcctggagcaggagctggagaccatcaccatcccagacctgcggggcaaggagggccacttctactacaacatcagcgaggtgaaggtgacagagctgcagctgaccagcagcgagctggacttccagccccagcaggagctgatgctgcagatcaccaatgccagcctgggcctgcgcttccggcggcagctgctgtactggttcttctatgatggcggctacatcaatgccagcgctgagggcgtgtccatcagaacaggcctggagctgagccgggaccctgctggccgcatgaaggtgtccaatgtgtcctgccaggcctctgtgtccaggatgcatgctgcctttggaggcaccttcaagaaggtgtatgacttcctgagcaccttcatcaccagcggcatgaggttcctgctgaaccagcagatctgccctgtgctgtaccacgccggcaccgtgctgctgaacagcctgctggacacagtgcctgtgcgcagctctgtggatgagctggtgggcatcgactacagcctgatgaaggaccctgtggccagcaccagcaacctggacatggacttccggggggccttcttccccctgacagagaggaactggagcctgcccaacagagctgtggagccccagctgcaggaggaggagaggatggtgtatgtggccttcagcgagttcttctttgattctgccatggagagctacttccgggccggggccctgcagctgctgctggtgggggacaaggtgccccatgacctggacatgctgctgcgggccacctacttcggcagcatcgtgctgctgagccctgctgtgattgacagccccctgaagctggagctgcgggtgctggccccaccccgctgcaccatcaagcccagcggcaccaccatctctgtgacagcctctgtgaccatcgccctggtgcccccagaccagcctgaggtgcagctgagctccatgaccatggatgcccggctgagcgccaagatggccctgcggggcaaggccctgcggacccagctggacctgcggcgcttccgcatctacagcaaccacagcgccctggagagcctggccctgatccccctgcaggcccccctgaagaccatgctgcagatcggcgtgatgcccatgctgaatgaaagaacctggaggggcgtgcagatccccctgcctgagggcatcaactttgtgcatgaggtggtgaccaaccacgccggcttcctgaccatcggggctgacctgcactttgccaagggcctgcgggaggtgattgagaagaacagaccagcagatgtgcgggccagcacagcccccacccccagcacagctgctgtgtag

SEQ ID NO: 163027 - DNA, 1542 bp, Artificial Sequence
  derived and/or modified sequence
atgggcctgagcggcagtgacaacagctgtgaccccaccccacctcctggccccctggccatggccctgtttggagccctcttcctggccctgctggccggggcccatgctgagttccctggctgcaagatccgggtgaccagcaaggccctggagctggtgaagcaggagggcctgcgcttcctggagcaggagctggagaccatcaccatcccagacctgcggggcaaggagggccacttctactacaacatcagcgaggtgaaggtgacagagctgcagctgaccagcagcgagctggacttccagccccagcaggagctgatgctgcagatcaccaatgccagcctgggcctgcgcttccggcggcagctgctgtactggttcttctatgatggcggctacatcaatgccagcgctgagggcgtgtccatcagaacaggcctggagctgagccgggaccctgctggccgcatgaaggtgtccaatgtgtcctgccaggcctctgtgtccaggatgcatgctgcctttggaggcaccttcaagaaggtgtatgacttcctgagcaccttcatcaccagcggcatgaggttcctgctgaaccagcagatctgccctgtgctgtaccacgccggcaccgtgctgctgaacagcctgctggacacagtgcctgtgcgcagctctgtggatgagctggtgggcatcgactacagcctgatgaaggaccctgtggccagcaccagcaacctggacatggacttccggggggccttcttccccctgacagagaggaactggagcctgcccaacagagctgtggagccccagctgcaggaggaggagaggatggtgtatgtggccttcagcgagttcttctttgattctgccatggagagctacttccgggccggggccctgcagctgctgctggtgggggacaaggtgccccatgacctggacatgctgctgcgggccacctacttcggcagcatcgtgctgctgagccctgctgtgattgacagccccctgaagctggagctgcgggtgctggccccaccccgctgcaccatcaagcccagcggcaccaccatctctgtgacagcctctgtgaccatcgccctggtgcccccagaccagcctgaggtgcagctgagctccatgaccatggatgcccggctgagcgccaagatggccctgcggggcaaggccctgcggacccagctggacctgcggcgcttccgcatctacagcaaccacagcgccctggagagcctggccctgatccccctgcaggcccccctgaagaccatgctgcagatcggcgtgatgcccatgctgaatgaaagaacctggaggggcgtgcagatccccctgcctgagggcatcaactttgtgcatgaggtggtgaccaaccacgccggcttcctgaccatcggggctgacctgcactttgccaagggcctgcgggaggtgattgagaagaacagaccagcagatgtgcgggccagcacagcccccacccccagcacagctgctgtgtag

SEQ ID NO: 163028 - DNA, 1482 bp, Artificial Sequence
  derived and/or modified sequence
atggccctgttcggcgccctgttcctggccctgctggccggcgcccatgccgagtttccaggatgcaagattcgagttaccagcaaggctctcgagcttgttaaacaagaggggctcagattcttggagcaggaactcgaaaccatcaccatcccggatctgagagggaaggaaggtcacttctattataacatcagcgaggtgaaggtaacagagctacagctcacctcttccgaattggacttccaacctcaacaggaactcatgctccaaattacaaacgcaagtttaggacttcggtttaggcgtcagctattgtactggttcttttatgatggcggctacattaacgccagcgccgagggggtgagcatcaggactggactggagctgtctcgtgaccctgcggggaggatgaaagtgagcaacgtgtcgtgtcaggctagtgtgtcccgtatgcacgcggctttcggcgggaccttcaagaaggtgtacgactttctgtcaacatttattaccagtggaatgcggttcctgctgaaccaacaaatttgtcccgtcttgtaccatgccggcactgttctgctaaattcactgctggacacggtgcccgttcggtcgtctgtggacgagttagtggggattgattacagcctgatgaaagaccctgtagcttctacctctaatttggatatggacttccgaggcgccttcttccctctgacagaaagaaattggtccctgccgaatcgtgccgtcgagccacagctacaggaggaagaaaggatggtgtatgtggctttttccgaatttttcttcgacagcgctatggagtcctattttagggcgggagccctccaacttttgctcgtcggagataaagtcccacatgacctggatatgttactgagggccacctattttggtagtatcgttctcctgtcccctgccgtcatcgatagtccgctcaagctggaacttcgggtgctggcgcccccccgatgcacaattaaaccgagcggcacgacgatatcagtgacggcaagcgtgactattgccctcgtgcctcctgaccagcccgaggttcagctctcctctatgacaatggacgcacggttaagtgccaagatggccttgcgcggcaaggcccttcgcacccagttggaccttaggcgattcagaatctattcaaaccactctgccctggagagcttagccctaattcctctccaggcgcccctgaagactatgctgcaaattggagtgatgcctatgttaaacgagcgtacctggcgtggagttcagataccactacctgagggaattaatttcgttcacgaagtggtgacaaaccacgctggttttctcaccatcggtgctgatttacacttcgctaaggggcttagagaggttatcgaaaagaaccgacctgccgacgtgcgggcctcaacggcgcccaccccgtcaacagccgccgtgtag

SEQ ID NO: 163029 - DNA, 1482 bp, Artificial Sequence
  derived and/or modified sequence
atggccctgttcggcgccctgttcctggccctgctggccggcgcccacgccgaattccccggctgtaaaattagagtcacctcaaaagctcttgaacttgtgaaacaggaaggtctgcgcttcctagaacaagaactggagaccataaccatcccagacttgagggggaaggagggacatttctactataacatctccgaagttaaagtgacagaattacagctgacctcttccgaattggatttccaaccacaacaggaactcatgttacaaatcaccaacgcttctctgggactgagatttcgaaggcagttgctctactggttcttttacgacggaggttacatcaacgctagtgccgaaggggtgagtattcgtactggactggagctctctcgggaccctgcagggcgcatgaaggtgtcaaatgtttcgtgccaggcatcagtcagccgcatgcatgctgctttcggtgggacattcaagaaggtgtatgatttcttgtccactttcataacctccggcatgaggtttctactcaatcagcaaatttgccccgtactgtaccacgccggaaccgttctcctgaattctctacttgacacagtgcctgtccgcagtagcgttgatgaactggtgggcatcgattactccctcatgaaggacccagtagcatctaccagcaatctggacatggatttcaggggcgctttctttccactgacggaacgaaattggtccttgcccaatagggctgttgaacctcagctgcaggaagaagagcgaatggtctacgttgctttcagtgaattcttcttcgattctgccatggagtcttatttcagagccggtgctctgcagctgcttctcgtgggagataaggtgcctcacgatctggacatgttactgcgcgcgacctactttggaagtatcgtgctgctgtcccccgccgtcattgactctccgctcaaactagagctcagggtcttagcccccccccgttgcactattaaaccctcgggtactactatctcagttaccgcgtccgttaccatcgcccttgtgccaccggatcagccagaagtccagctctccagtatgactatggacgcaagactatctgctaaaatggcccttaggggcaaggcgctccgcacgcaactggatttgcggcggtttagaatctatagcaatcattccgctctggagagcctggcactgataccactccaagctcccttgaaaaccatgcttcaaatcggcgtcatgcctatgctgaatgagcggacgtggaggggcgttcagattccccttcctgaagggataaactttgttcacgaggtggtgactaatcacgccggattccttactatcggagccgacttgcactttgccaaggggcttagggaagttatagagaaaaaccgccccgctgacgtgcgagcttctacagctccaacaccaagcacagctgccgtatag

SEQ ID NO: 163030 - DNA, 1542 bp, Artificial Sequence
  derived and/or modified sequence
atgggcctgagcggcagcgacaacagctgcgaccccacccccccccctggtcccttggcgatggccctgtttggcgcgttgtttctggccctgttggccggcgcccatgctgaattccccggttgcaagatcagagtaactagtaaggcccttgaactcgtgaagcaggaaggactgaggtttctggaacaagaactggagaccatcacaattccagacctgaggggcaaggagggtcacttctattataacatatccgaggtcaaagtgactgagctgcaactgacatcttccgaactggactttcagcctcagcaagagctcatgctgcagataacgaacgcctcattgggtctacgcttcagacgccagctgctgtattggttcttttatgatggcggatacataaacgcttctgccgaaggcgtatctatccgtacagggttagagctttctcgggacccagcagggcgcatgaaagtatcaaatgtttcgtgtcaggcttcagtgtctcgtatgcacgcggcctttggaggcaccttcaagaaggtctacgattttctgtctacttttattacctccggcatgagattcctgctgaatcaacagatctgtccagtactatatcacgccggcactgtcctgcttaactctcttctggacacagtgcctgtacgctcatccgtcgatgagcttgtgggcattgattattctctgatgaaggatcccgttgcttcaaccagcaaccttgacatggattttcgaggagcattctttcccttgacagaaagaaattggtctctccctaatcgggccgtcgagccccagcttcaagaagaggaacggatggtctacgtggctttctctgagtttttttttgactctgcaatggagtcgtattttcgcgctggagccctgcagctgttgcttgtgggcgataaggtcccacacgaccttgacatgctgctccgggcgacttatttcgggtccattgtactgctgtctccagcggtgatcgactcacctctgaagttagaactacgcgtgctggctcccccaagatgcacaattaagccttcaggcactactatctctgtgactgccagcgtgaccatcgccctcgttccccccgaccagcctgaggtccagctatcaagtatgaccatggatgcaaggctgagtgcaaaaatggcgctgcggggaaaagctctgaggactcaactcgacctgcgccggttcaggatttattccaatcactccgccctggagtctctggctttaatacctctgcaggccccgctcaaaacgatgctgcaaattggggtcatgccaatgctcaatgagcgaacatggcgcggggtgcagatccctctgccagagggaataaacttcgtccacgaggtggttactaaccacgccggcttcctaactataggtgcagatctgcatttcgccaagggactgagagaggtgattgagaagaataggcccgcagacgtgcgcgcgtccacagcacctaccccttctactgccgcagtgtag

SEQ ID NO: 163031 - DNA, 1743 bp, Artificial Sequence
  derived and/or modified sequence
ccgtcgcccggatcccctgagctgcccgccatcccacgtgaccgcgccgccccccagctccaccgctgagcccgctcgccatggccctcttcggggccctcttcctagcgctgctggcaggcgcacatgcagagttcccaggctgcaagatccgcgtcacctccaaggcgctggagctggtgaagcaggaggggctgcgctttctggagcaagagctggagactatcaccattccggacctgcggggcaaagaaggccacttctactacaacatctctgaggtgaaggtcacagagctgcaactgacatcttccgagctcgatttccagccacagcaggagctgatgcttcaaatcaccaatgcctccttggggctgcgcttccggagacagctgctctactggttcttctatgatgggggctacatcaacgcctcagctgagggtgtgtccatccgcactggtctggagctctcccgggatcccgctggacggatgaaagtgtccaatgtctcctgccaggcctctgtctccagaatgcacgcggccttcgggggaaccttcaagaaggtgtatgattttctctccacgttcatcacctcagggatgcgcttcctcctcaaccagcagatctgccctgtcctctaccacgcagggacggtcctgctcaactccctcctggacaccgtgcctgtgcgcagttctgtggacgagcttgttggcattgactattccctcatgaaggatcctgtggcttccaccagcaacctggacatggacttccggggggccttcttccccctgactgagaggaactggagcctccccaaccgggcagtggagccccagctgcaggaggaagagcggatggtgtatgtggccttctctgagttcttcttcgactctgccatggagagctacttccgggcgggggccctgcagctgttgctggtgggggacaaggtgccccacgacctggacatgctgctgagggccacctactttgggagcattgtcctgctgagcccagcagtgattgactccccattgaagctggagctgcgggtcctggccccaccgcgctgcaccatcaagccctctggcaccaccatctctgtcactgctagcgtcaccattgccctggtcccaccagaccagcctgaggtccagctgtccagcatgactatggacgcccgtctcagcgccaagatggctctccgggggaaggccctgcgcacgcagctggacctgcgcaggttccgaatctattccaaccattctgcactggagtcgctggctctgatcccattacaggcccctctgaagaccatgctgcagattggggtgatgcccatgctcaatgagcggacctggcgtggggtgcagatcccactacctgagggcatcaactttgtgcatgaggtggtgacgaaccatgcgggattcctcaccatcggggctgatctccactttgccaaagggctgcgagaggtgattgagaagaaccggcctgctgatgtcagggcgtccactgcccccacaccgtccacagcagctgtctgagccctcaatccccaagctggcagctgtcattcaggaccccaacccctctcagcccctcttttcccacattcatagcctgtagtgccccctctaacccccagtgccacagagaagacgggatttgaagctgtacccaatttaattccataatcaatctatcaattacagtccgtccaccacc

SEQ ID NO: 163032 - DNA, 2255 bp, Artificial Sequence
  derived and/or modified sequence
agtccctcgccgagccgcgtggtgcactgaagccggcgtggggaggagagccgatgaaggagaacgctaacatgggggctccaggcagaatctctaatgggagagatttaggacctgagggagccgggagacccgggagcccacggtctggtcggccacctcctctcctccccgggcgcgaggcctatgagaccgcaagccaccctccaagaatgcgcgtgcagtcgttgccgtggcaacgtgcaagcctgcatgggcccaccgctaaaggaaaggggaggttgttgggggtgtgggggctggtcccctggaggtccaaactcatcacgcggcggtagcacgagggaactgggaacgtcccctcccccgtgtcccaaatcctctgggagccagaacgcaagtcgcatcgcctctctgagcctcagtttccacatctgccatatggaggcaagattattggttccaagttccccgaagagttatctggagggtaacgatccaggctagttcccacttatggttggacgtccaaggaatgggtttaagcggctcagataactcctgcgaccccaccccacccccaggcccgctcgccatggccctcttcggggccctcttcctagcgctgctggcaggcgcacatgcagagttcccaggctgcaagatccgcgtcacctccaaggcgctggagctggtgaagcaggaggggctgcgctttctggagcaagagctggagactatcaccattccggacctgcggggcaaagaaggccacttctactacaacatctctgaggtgaaggtcacagagctgcaactgacatcttccgagctcgatttccagccacagcaggagctgatgcttcaaatcaccaatgcctccttggggctgcgcttccggagacagctgctctactggttcttctatgatgggggctacatcaacgcctcagctgagggtgtgtccatccgcactggtctggagctctcccgggatcccgctggacggatgaaagtgtccaatgtctcctgccaggcctctgtctccagaatgcacgcggccttcgggggaaccttcaagaaggtgtatgattttctctccacgttcatcacctcagggatgcgcttcctcctcaaccagcagatctgccctgtcctctaccacgcagggacggtcctgctcaactccctcctggacaccgtgcctgtgcgcagttctgtggacgagcttgttggcattgactattccctcatgaaggatcctgtggcttccaccagcaacctggacatggacttccggggggccttcttccccctgactgagaggaactggagcctccccaaccgggcagtggagccccagctgcaggaggaagagcggatggtgtatgtggccttctctgagttcttcttcgactctgccatggagagctacttccgggcgggggccctgcagctgttgctggtgggggacaaggtgccccacgacctggacatgctgctgagggccacctactttgggagcattgtcctgctgagcccagcagtgattgactccccattgaagctggagctgcgggtcctggccccaccgcgctgcaccatcaagccctctggcaccaccatctctgtcactgctagcgtcaccattgccctggtcccaccagaccagcctgaggtccagctgtccagcatgactatggacgcccgtctcagcgccaagatggctctccgggggaaggccctgcgcacgcagctggacctgcgcaggttccgaatctattccaaccattctgcactggagtcgctggctctgatcccattacaggcccctctgaagaccatgctgcagattggggtgatgcccatgctcaatgagcggacctggcgtggggtgcagatcccactacctgagggcatcaactttgtgcatgaggtggtgacgaaccatgcgggattcctcaccatcggggctgatctccactttgccaaagggctgcgagaggtgattgagaagaaccggcctgctgatgtcagggcgtccactgcccccacaccgtccacagcagctgtctgagccctcaatccccaagctggcagctgtcattcaggaccccaacccctctcagcccctcttttcccacattcatagcctgtagtgccccctctaacccccagtgccacagagaagacgggatttgaagctgtacccaatttaattccataatcaatctatcaattacagtccgtccacc

SEQ ID NO: 163033 - DNA, 1530 bp, Artificial Sequence
  derived and/or modified sequence
atgtagagggggccaagaaggaagcaggaccagtggatgtgaggcgtggtcgaagaacaacagaaagggtgaaggtcacagagctgcaactgacatcttccgagctcgatttccagccacagcaggagctgatgcttcaaatcaccaatgcctccttggggctgcgcttccggagacagctgctctactggttcttctatgatgggggctacatcaacgcctcagctgagggtgtgtccatccgcactggtctggagctctcccgggatcccgctggacggatgaaagtgtccaatgtctcctgccaggcctctgtctccagaatgcacgcggccttcgggggaaccttcaagaaggtgtatgattttctctccacgttcatcacctcagggatgcgcttcctcctcaaccagcagatctgccctgtcctctaccacgcagggacggtcctgctcaactccctcctggacaccgtgcctgtgcgcagttctgtggacgagcttgttggcattgactattccctcatgaaggatcctgtggcttccaccagcaacctggacatggacttccggggggccttcttccccctgactgagaggaactggagcctccccaaccgggcagtggagccccagctgcaggaggaagagcggatggtgtatgtggccttctctgagttcttcttcgactctgccatggagagctacttccgggcgggggccctgcagctgttgctggtgggggacaaggtgccccacgacctggacatgctgctgagggccacctactttgggagcattgtcctgctgagcccagcagtgattgactccccattgaagctggagctgcgggtcctggccccaccgcgctgcaccatcaagccctctggcaccaccatctctgtcactgctagcgtcaccattgccctggtcccaccagaccagcctgaggtccagctgtccagcatgactatggacgcccgtctcagcgccaagatggctctccgggggaaggccctgcgcacgcagctggacctgcgcaggttccgaatctattccaaccattctgcactggagtcgctggctctgatcccattacaggcccctctgaagaccatgctgcagattggggtgatgcccatgctcaatgagcggacctggcgtggggtgcagatcccactacctgagggcatcaactttgtgcatgaggtggtgacgaaccatgcgggattcctcaccatcggggctgatctccactttgccaaagggctgcgagaggtgattgagaagaaccggcctgctgatgtcagggcgtccactgcccccacaccgtccacagcagctgtctgagccctcaatccccaagctggcagctgtcattcaggaccccaacccctctcagcccctcttttcccacattcatagcctgtagtgccccctctaacccccagtgccacagagaagacgggatttgaagctgtacccaatttaattccataatcaatctatcaattacagtccgtccaccacc

SEQ ID NO: 163034 - DNA, 1482 bp, Artificial Sequence
  derived and/or modified sequence
atggcactgttcggggcattgttcttggccctattggcaggggctcatgcagagtttccagggtgtaagatcagagtcaccagcaaggcactcgaactggtgaaacaggagggcttacgtttcctcgaacaggagctggaaaccattacaattcccgatcttaggggtaaagagggccacttctactacaatatcagcgaagtgaaggtgacagagctgcaactgacatcctccgagcttgactttcagcctcaacaggagctaatgctccagataactaatgctagtcttggccttcgttttcggcgacagttactgtactggttcttctatgacgggggatatataaacgcctcagcagagggcgtgagcatccggactggcctggaactatctcgcgaccccgcaggtcggatgaaggtgtctaacgtgagttgtcaggcgagcgtcagccgtatgcacgccgcattcggcggaaccttcaagaaagtgtacgattttctgtctacctttatcacgtccggaatgaggttcctgttgaaccaacagatttgtccggtcctctaccatgcaggtacagtcctactcaattccttactggatacagtcccagtacgctctagtgtggacgaactggtcggaatagactattctcttatgaaggatccagtagcttcaactagtaatctggacatggattttaggggcgctttctttccactgactgagcgcaattggagtctgccaaatagggccgtggagcctcagctgcaggaggaagagagaatggtctacgtggccttctccgaattcttcttcgacagcgcaatggagtcctatttcagagctggagctctgcaactactgctggtgggtgacaaagtaccgcacgacctcgacatgttgctgagggcaacttacttcggatcgatcgtgctgctgagccctgcggtgattgatagccccctgaagctcgagctccgcgtactcgcaccgccaagatgcaccatcaaaccctcaggtacgaccatttccgttacagcgtctgtaactattgcactggtgcccccagaccagcccgaggttcagctgagctctatgaccatggatgctcgcttgtcggctaaaatggccctccggggtaaagccctgaggacccagctggacctgcgcaggttccggatttactcgaaccattcagcccttgagtcgctcgctctgattcccctacaagcccctctgaagaccatgttgcagataggggttatgccaatgttaaatgagcgcacttggcgtggggtgcagatacccctccccgagggcatcaactttgttcacgaggtggtgacaaatcatgcgggattcctaacaattggagccgaccttcactttgctaaggggctgagagaagtcattgagaagaacaggcccgcagatgtgagggcttctactgcccctacaccgagtaccgccgctgtctag

SEQ ID NO: 163035 - DNA, 1482 bp, Artificial Sequence
  derived and/or modified sequence
atggccctgtttggcgcactctttctggcactcctggcgggtgcccatgccgagttcccgggttgtaagatcagagttacctccaaagccctcgaactggtgaaacaggaggggttgcggtttctagagcaggaactggagactattactattcccgacctgcgtggtaaagagggccatttctattacaacataagcgaggtgaaagtgacagaactgcagctaaccagttctgaactggatttccaaccgcagcaagagcttatgttgcagattaccaacgcttccctggggctgagattccgcagacagctgctttattggttcttctacgatggcggttatattaacgcaagtgctgaaggcgtgtcgattcgtacaggattagaactctcccgcgaccctgcagggaggatgaaagtcagcaatgtaagttgccaggctagcgtttccaggatgcacgccgcattcgggggaacattcaaaaaagtgtatgactttcttagtacgtttatcacttctggcatgaggttccttctgaaccagcagatctgccccgttctttaccacgctggtactgtcctgctgaactccttacttgatactgtgccggtgcgctcctctgtggacgaattagtagggatagactactctttaatgaaggatcctgtggcctctactagcaacctagatatggactttcggggagccttcttccccctgactgaaaggaattggtccttacctaatcgcgctgttgaaccacaattacaggaggaagaacgtatggtgtacgttgccttttccgaattcttctttgactctgcaatggaatcttacttcagggctggggctctccagttgcttctggtgggagacaaggtgccacacgatctggatatgcttctgcgcgctacgtactttggatccatcgttcttctgtcacccgctgtgattgactctcctctcaaactggagttgcgagtgctggctcctcccaggtgtactatcaaaccatccggtacgacgatcagcgtgaccgcgtctgtgacgatcgccctcgtgccaccggatcagccagaagtgcagctgtctagtatgactatggatgccaggttgtctgcaaagatggctctgcgcggaaaggcccttcgaacgcaactcgatctccggcgatttagaatctactcaaatcattcagctctggagtcacttgccttaatcccactccaagcccctttgaagaccatgttgcagatcggagttatgccaatgcttaacgaacgcacatggaggggggtgcagattcccctacccgagggaattaatttcgtccacgaagtggtcactaaccacgcgggatttcttacaattggggcagatttgcatttcgccaaagggctcagagaggtcatcgagaaaaatagacccgcagatgtccgggcaagcactgctccaacgccgtccacagcagcagtctag

SEQ ID NO: 163036 - DNA, 1542 bp, Artificial Sequence
  derived and/or modified sequence
atgggcctgtctggcagtgataatagctgcgatcctacacctccgccaggcccactggcgatggccctgtttggggcactattcctagctctgctggccggtgcacatgccgagttccccggatgcaagattagagtgacgagtaaggccctcgagctggttaaacaggagggcctgcgattcctggagcaggagttggagaccatcaccatccccgacttaagaggaaaggagggccacttctattacaatatctccgaagtgaaagtaactgaactgcagctaacctcttctgaactggattttcagcctcagcaggagttgatgctgcaaataactaatgcatctctggggttgagatttcgacgacagctgctttattggtttttttatgatgggggatacattaatgcctccgccgaaggcgtttccattcgtaccggtctcgaactcagcagggaccccgctggccgaatgaaggtatctaatgttagctgccaggcttccgtaagtcggatgcacgctgctttcggaggcactttcaagaaggtttacgactttctgtctaccttcattacctccggcatgcggtttctcctgaatcaacagatctgcccagtcctgtaccatgccggtacagtgctactcaactccctgctagacactgtccccgtcaggtcctctgtcgacgagctagtcgggattgactacagccttatgaaagatcccgtggcctctacatctaacctggacatggactttcgaggtgcatttttccccctcactgagcgtaattggtctcttcctaatcgcgctgttgagccacagctgcaagaagaggaacggatggtatatgttgcgttttcggaattcttcttcgattccgcaatggaaagctacttccgggctggcgctctccagctgttgctcgttggcgataaggtgcctcatgatctggacatgctgttacgcgctacctatttcggctctatcgtgctattatcccccgcagtgatcgattctccattaaaattggaactgagagttctggcacctcctcggtgtaccatcaaacccagcggcacaactatatctgtgactgctagtgttacaattgcactggtcccacccgatcaaccagaggtacagctgagttcaatgaccatggatgccaggctatcagctaagatggctttaagaggcaaggctttgagaacacagttagaccttcgtaggttcaggatttatagcaaccatagcgctcttgagagcctggccctgatacctctccaggccccactgaagactatgctgcaaatcggagttatgccaatgcttaacgaaagaacgtggagaggcgtgcagattcctctgccagaggggataaacttcgtacatgaagtcgtcaccaatcacgcagggttcctgaccatcggggcagaccttcattttgctaaagggcttcgggaagtaatcgagaaaaacagaccagccgacgttagggcttctacggccccaacccccagcacagcggcagtttag

SEQ ID NO: 163037 - DNA, 1482 bp, Artificial Sequence
  derived and/or modified sequence
atggccctgttcggcgccctgttcctggccctgctggccggcgcccacgccgagttccccggctgcaagatcagagtgaccagcaaggccctggagctggtgaagcaggagggcctgagattcctggagcaggagctggagaccatcaccatccccgacctgagaggcaaggagggccacttctactacaacatcagcgaggtgaaggtgaccgagctgcagctgaccagcagcgagctggacttccagccccagcaggagctgatgctgcagatcaccaacgccagcctgggcctgagattcagaagacagctgctgtactggttcttctacgacggcggctacatcaacgccagcgccgagggcgtgagcatcagaaccggcctggagctgagcagagaccccgccggcagaatgaaggtgagcaacgtgagctgccaggccagcgtgagcagaatgcacgccgccttcggcggcaccttcaagaaggtgtacgacttcctgagcaccttcatcaccagcggcatgagattcctgctgaaccagcagatctgccccgtgctgtaccacgccggcaccgtgctgctgaacagcctgctggacaccgtgcccgtgagaagcagcgtggacgagctggtgggcatcgactacagcctgatgaaggaccccgtggccagcaccagcaacctggacatggacttcagaggcgccttcttccccctgaccgagagaaactggagcctgcccaacagagccgtggagccccagctgcaggaggaggagagaatggtgtacgtggccttcagcgagttcttcttcgacagcgccatggagagctacttcagagccggcgccctgcagctgctgctggtgggcgacaaggtgccccacgacctggacatgctgctgagagccacctacttcggcagcatcgtgctgctgagccccgccgtgatcgacagccccctgaagctggagctgagagtgctggccccccccagatgcaccatcaagcccagcggcaccaccatcagcgtgaccgccagcgtgaccatcgccctggtgccccccgaccagcccgaggtgcagctgagcagcatgaccatggacgccagactgagcgccaagatggccctgagaggcaaggccctgagaacccagctggacctgagaagattcagaatctacagcaaccacagcgccctggagagcctggccctgatccccctgcaggcccccctgaagaccatgctgcagatcggcgtgatgcccatgctgaacgagagaacctggagaggcgtgcagatccccctgcccgagggcatcaacttcgtgcacgaggtggtgaccaaccacgccggcttcctgaccatcggcgccgacctgcacttcgccaagggcctgagagaggtgatcgagaagaacagacccgccgacgtgagagccagcaccgcccccacccccagcaccgccgccgtgtag

SEQ ID NO: 163038 - DNA, 1542 bp, Artificial Sequence
  derived and/or modified sequence
atgggcctgagcggcagcgacaacagctgcgaccccacccccccccccggccccctggccatggccctgttcggcgccctgttcctggccctgctggccggcgcccacgccgagttccccggctgcaagatcagagtgaccagcaaggccctggagctggtgaagcaggagggcctgagattcctggagcaggagctggagaccatcaccatccccgacctgagaggcaaggagggccacttctactacaacatcagcgaggtgaaggtgaccgagctgcagctgaccagcagcgagctggacttccagccccagcaggagctgatgctgcagatcaccaacgccagcctgggcctgagattcagaagacagctgctgtactggttcttctacgacggcggctacatcaacgccagcgccgagggcgtgagcatcagaaccggcctggagctgagcagagaccccgccggcagaatgaaggtgagcaacgtgagctgccaggccagcgtgagcagaatgcacgccgccttcggcggcaccttcaagaaggtgtacgacttcctgagcaccttcatcaccagcggcatgagattcctgctgaaccagcagatctgccccgtgctgtaccacgccggcaccgtgctgctgaacagcctgctggacaccgtgcccgtgagaagcagcgtggacgagctggtgggcatcgactacagcctgatgaaggaccccgtggccagcaccagcaacctggacatggacttcagaggcgccttcttccccctgaccgagagaaactggagcctgcccaacagagccgtggagccccagctgcaggaggaggagagaatggtgtacgtggccttcagcgagttcttcttcgacagcgccatggagagctacttcagagccggcgccctgcagctgctgctggtgggcgacaaggtgccccacgacctggacatgctgctgagagccacctacttcggcagcatcgtgctgctgagccccgccgtgatcgacagccccctgaagctggagctgagagtgctggccccccccagatgcaccatcaagcccagcggcaccaccatcagcgtgaccgccagcgtgaccatcgccctggtgccccccgaccagcccgaggtgcagctgagcagcatgaccatggacgccagactgagcgccaagatggccctgagaggcaaggccctgagaacccagctggacctgagaagattcagaatctacagcaaccacagcgccctggagagcctggccctgatccccctgcaggcccccctgaagaccatgctgcagatcggcgtgatgcccatgctgaacgagagaacctggagaggcgtgcagatccccctgcccgagggcatcaacttcgtgcacgaggtggtgaccaaccacgccggcttcctgaccatcggcgccgacctgcacttcgccaagggcctgagagaggtgatcgagaagaacagacccgccgacgtgagagccagcaccgcccccacccccagcaccgccgccgtgtag

SEQ ID NO: 163039 - protein, 176 aa, Artificial Sequence
  derived and/or modified sequence
MKVLLCDLLLLSLFSSVFSSCQRDCLTCQEKLHPALDSFDLEVCILECEEKVFPSPLWTPCTKVMARSSWQLSPAAPEHVAAALYQPRASEMQHLRRMPRVRSLFQEQEEPEPGMEEAGEMEQKQLQKRFGGFTGARKSARKLANQKRFSEFMRQYLVLSMQSSQRRRTLHQNGNV

SEQ ID NO: 163040 - protein, 154 aa, Artificial Sequence
  derived and/or modified sequence
MKVLLCDLLLLSLFSSVFSSCQRDCLTCQEKLHPALDSFDLEVCILECEEKVFPSPLWTPCTKVMARSSWQLSPAAPEHVAAALYQPRASEMQHLRRMPRVRSLFQEQEEPEPGMEEAGEMEQKQLQKRFGGFTGARKSARKLANQKRFSEFMR

SEQ ID NO: 163041 - DNA, 531 bp, Artificial Sequence
  derived and/or modified sequence
atgaaagtgctcttatgtgacctgcttcttctgtctctgttcagttctgtgttcagtagctgccagcgagactgcctcacatgccaggagaagctccaccccgcactggactcctttgatctcgaggtgtgtatcctcgaatgcgaggagaaagtgttcccctcccctctgtggacaccatgcactaaggtgatggctagaagttcctggcagttatctcctgctgcgcctgagcacgtggccgctgcactttaccagcccagagcatctgagatgcagcatcttcgcagaatgccacgtgtgaggtcactttttcaagaacaggaagaacctgaaccaggaatggaggaggccggagagatggagcagaaacagttgcaaaagagattcggggggttcacaggggcacgaaaatcagcccgcaagctggctaatcagaagcgcttttccgaattcatgaggcagtacctggtattgtcaatgcaatcatctcaacggaggagaacacttcatcagaacggcaatgtgtag

SEQ ID NO: 163042 - DNA, 465 bp, Artificial Sequence
  derived and/or modified sequence
atgaaggtgctcctctgtgatctactactactgtctctattctccagtgtgttttcctcatgtcaacgcgactgcctgacctgccaagagaaactccatccggctttagatagtttcgacctggaagtctgtatactcgagtgcgaggagaaggtgtttccctctcctctgtggaccccttgcactaaggtgatggcccgcagctcatggcagctgtcccctgcggccccggagcacgtggccgccgctttgtaccaacccagggctagcgaaatgcagcacctgaggcggatgcctagggtgaggtcactctttcaggagcaggaagagccagagccgggcatggaggaggccggtgagatggaacagaagcaactgcagaaacggttcggcggcttcaccggggccaggaagtccgcacggaagctcgccaaccagaaacgctttagcgagtttatgcgctag

SEQ ID NO: 163043 - DNA, 531 bp, Artificial Sequence
  derived and/or modified sequence
atgaaggtgctgctgtgtgacctgctgctgctgagcctcttcagcagcgtcttcagcagctgccagagggactgcctgacctgccaggagaagctgcacccagccctggacagctttgacctggaggtgtgcatcctggagtgtgaggagaaggtgttccccagccccctgtggaccccctgcaccaaggtgatggcccggagctcctggcagctgagccctgctgcccctgagcacgtggccgccgccctgtaccagccccgggccagcgagatgcagcacctgcggaggatgccccgggtgcgcagcctcttccaggagcaggaggagcctgagcccggcatggaggaggccggggagatggagcagaagcagctgcagaagagatttggaggcttcaccggggccaggaagagcgccaggaagctggccaaccagaagcgcttcagcgagttcatgaggcagtacctggtgctgtccatgcagagcagccagaggaggaggaccctgcaccagaatggaaatgtgtag

SEQ ID NO: 163044 - DNA, 465 bp, Artificial Sequence
  derived and/or modified sequence
atgaaggtgctgctgtgtgacctgctgctgctgagcctcttcagcagcgtcttcagcagctgccagagggactgcctgacctgccaggagaagctgcacccagccctggacagctttgacctggaggtgtgcatcctggagtgtgaggagaaggtgttccccagccccctgtggaccccctgcaccaaggtgatggcccggagctcctggcagctgagccctgctgcccctgagcacgtggccgccgccctgtaccagccccgggccagcgagatgcagcacctgcggaggatgccccgggtgcgcagcctcttccaggagcaggaggagcctgagcccggcatggaggaggccggggagatggagcagaagcagctgcagaagagatttggaggcttcaccggggccaggaagagcgccaggaagctggccaaccagaagcgcttcagcgagttcatgaggtag

SEQ ID NO: 163045 - DNA, 531 bp, Artificial Sequence
  derived and/or modified sequence
atgaaggtgctgctgtgcgacctgctgctgctgagcctgttcagcagcgtgttctcctcttgccagagagattgcctcacctgccaagagaagcttcatcccgctctcgactctttcgacctggaggtgtgcattctcgaatgcgaagaaaaggtgtttccctctcccctttggactccttgcacgaaagtcatggctcgctcatcatggcaactctcccccgctgcgccggagcatgtggcggccgccctgtaccagccgcgtgcctccgagatgcagcacttgcggagaatgcctcgagtcaggagtctctttcaggagcaggaggagccagagcctggtatggaagaagcaggggaaatggagcagaagcaactgcagaaacggttcggggggttcacaggggcgaggaaatcggccagaaagctggcaaaccagaagcgattttcagagttcatgaggcagtacctcgttctttccatgcaatcctctcaacggaggagaactctacatcagaatggcaacgtctag

SEQ ID NO: 163046 - DNA, 465 bp, Artificial Sequence
  derived and/or modified sequence
atgaaggtgctgctgtgcgacctgctgctgctgagcctgttcagctccgtcttttcctcctgtcaacgtgactgcttaacctgccaggaaaaactgcatccagccctcgatagttttgatctagaggtctgcatactggagtgcgaagaaaaggtgttcccatctcccctgtggacaccctgcacaaaagtaatggctagatcctcttggcagctttctcctgcggcccccgaacacgtagccgctgcactttaccagccccgggctagcgaaatgcaacatctccggcgcatgccacgggtccgcagtctgttccaagagcaggaggagcctgaacctggtatggaggaagccggggagatggagcagaagcagctgcagaagagattcggcgggttcactggtgctagaaaaagcgctagaaagctcgccaaccagaagaggttcagtgaatttatgagatag

SEQ ID NO: 163047 - DNA, 1200 bp, Artificial Sequence
  derived and/or modified sequence
gccaggaaggcttgcaggttctgctgtttggttgctgaagggggtcagtgtgtgtatgtgtcatggaggtgggcagggaaggggagggctgtgcgtgggggagaggatatatatgctggtgtggctgagaaagcggaaccgagcctcgcatccatcggagggagccggggactgacagctctcagcacctgcttcctgctcctgcaccatgaaagtcctgctttgtgacctgctgctgctcagtctcttctccagtgtgttcagcagttgtcagagggactgtctcacatgccaggagaagctccacccagccctggacagcttcgacctggaggtgtgcatcctcgagtgtgaagagaaggtcttccccagccccctctggactccatgcaccaaggtcatggccaggagctcttggcagctcagccctgccgccccagagcatgtggcggctgctctctaccagccgagagcttcggagatgcagcatctgcggcgaatgccccgagtccggagcttgttccaggagcaggaagagcccgagcctggcatggaggaggctggtgagatggagcagaagcagctgcagaagagatttgggggcttcaccggggcccggaagtcggccaggaagttggccaatcagaagcggttcagtgagtttatgaggcaatacttggtcctgagcatgcagtccagccagcgccggcgcaccctgcaccagaatggtaatgtgtagccggaaggggcgctcctcccagctgtaccggccactgcaacccatgagcgtccaggtgatcccccaaacagcatgtgctcagccccagacctgccgcctgggaatcaggattccttcttccccaaggcactgagcgcctgcagatcccgcaggcttcgtttgcctccagaaccttcccgtctgattgttcctccccagccccctggcatgtttcaccacaaccctgttgctacatcagagtgtatttttgtaattcctctagctaccatttcaatagccccatctctcctgctcacccgcctcttgccccttctaggggcaggtgaaaggaataggaaattgaacctggggttttgacttgccactgccataacttgtttgtaaaagagctgttctttttgactgattgttttaaacaacgatttctccattaaacttctactgagcaaatggttaataaa

SEQ ID NO: 163048 - DNA, 554 bp, Artificial Sequence
  derived and/or modified sequence
tcagtcctcacagagcctctggaagcacagggaaggcagctgtgggatcctggctgaacagagtccagcacctgcttcctgctcctgcaccatgaaagtcctgctttgtgacctgctgctgctcagtctcttctccagtgtgttcagcagttgtcagagggactgtctcacatgccaggagaagctccacccagccctggacagcttcgacctggaggtgtgcatcctcgagtgtgaagagaaggtcttccccagccccctctggactccatgcaccaaggtcatggccaggagctcttggcagctcagccctgccgccccagagcatgtggcggctgctctctaccagccgagagcttcggagatgcagcatctgcggcgaatgccccgagtccggagcttgttccaggagcaggaagagcccgagcctggcatggaggaggctggtgagatggagcagaagcagctgcagaagagatttgggggcttcaccggggcccggaagtcggccaggaagttggccaatcagaagcggttcagtgagtttatgaggc

SEQ ID NO: 163049 - DNA, 531 bp, Artificial Sequence
  derived and/or modified sequence
atgaaggtgcttttgtgcgaccttctacttttgagtctgttctcatccgtgttttcttcgtgccaaagagactgcctaacttgccaggaaaagctgcacccagctctggattcttttgacctcgaagtgtgtatcctagagtgcgaagagaaagtctttccaagcccgctgtggactccatgtactaaggtcatggcacggtccagctggcagctctcgcccgcagctccagagcacgtagcagcagccctctaccagccaagggcctcggagatgcaacacctgcgcagaatgccaagagttcgctccctcttccaagagcaagaggagccagagccaggtatggaagaagctggcgagatggagcaaaaacagctacaaaagagattcggaggattcacaggtgccagaaaaagcgcccgtaagctcgccaaccagaagagatttagcgaatttatgcggcaatacctggtcctttctatgcagtccagccagcgcaggagaacactccatcagaacggcaacgtgtag

SEQ ID NO: 163050 - DNA, 465 bp, Artificial Sequence
  derived and/or modified sequence
atgaaggtgttgctgtgcgacttgcttctcctgtctctgttttcatctgtgtttagctcgtgccagcgggactgtctaacctgccaggaaaaactccatcccgcacttgactccttcgatctagaagtgtgtatcttggagtgtgaagagaaagtctttccctctcccttgtggacaccctgtaccaaagttatggcaagaagttcctggcagctgtcccccgcagctccagagcacgtcgccgctgctctgtaccagccacgagcaagcgagatgcaacatttgcgcaggatgccacgcgtgaggtcactgttccaggagcaggaagagcctgagccaggtatggaggaggccggtgagatggaacagaagcagctgcaaaagcgctttgggggttttactggagcaagaaaaagtgcaagaaaactggccaaccagaagcgttttagcgagttcatgcgctag

SEQ ID NO: 163051 - DNA, 531 bp, Artificial Sequence
  derived and/or modified sequence
atgaaggtgctgctgtgcgacctgctgctgctgagcctgttcagcagcgtgttcagcagctgccagagagactgcctgacctgccaggagaagctgcaccccgccctggacagcttcgacctggaggtgtgcatcctggagtgcgaggagaaggtgttccccagccccctgtggaccccctgcaccaaggtgatggccagaagcagctggcagctgagccccgccgcccccgagcacgtggccgccgccctgtaccagcccagagccagcgagatgcagcacctgagaagaatgcccagagtgagaagcctgttccaggagcaggaggagcccgagcccggcatggaggaggccggcgagatggagcagaagcagctgcagaagagattcggcggcttcaccggcgccagaaagagcgccagaaagctggccaaccagaagagattcagcgagttcatgagacagtacctggtgctgagcatgcagagcagccagagaagaagaaccctgcaccagaacggcaacgtgtag

SEQ ID NO: 163052 - DNA, 465 bp, Artificial Sequence
  derived and/or modified sequence
atgaaggtgctgctgtgcgacctgctgctgctgagcctgttcagcagcgtgttcagcagctgccagagagactgcctgacctgccaggagaagctgcaccccgccctggacagcttcgacctggaggtgtgcatcctggagtgcgaggagaaggtgttccccagccccctgtggaccccctgcaccaaggtgatggccagaagcagctggcagctgagccccgccgcccccgagcacgtggccgccgccctgtaccagcccagagccagcgagatgcagcacctgagaagaatgcccagagtgagaagcctgttccaggagcaggaggagcccgagcccggcatggaggaggccggcgagatggagcagaagcagctgcagaagagattcggcggcttcaccggcgccagaaagagcgccagaaagctggccaaccagaagagattcagcgagttcatgagatag

SEQ ID NO: 163053 - protein, 2286 aa, Artificial Sequence
  derived and/or modified sequence
MSLRSGGRRRADPGADGEASRDDGATSSVSALKRLERSQWTDKMDLRFGFERLKEPGEKTGWLINMHPTEILDEDKRLGSAVDYYFIQDDGSRFKVALPYKPYFYIATRKGCEREVSSFLSKKFQGKIAKVETVPKEDLDLPNHLVGLKRNYIRLSFHTVEDLVKVRKEISPAVKKNREQDHASDAYTALLSSVLQRGGVITDEEETSKKIADQLDNIVDMREYDVPYHIRLSIDLKIHVAHWYNVRYRGNAFPVEITRRDDLVERPDPVVLAFDIETTKLPLKFPDAETDQIMMISYMIDGQGYLITNREIVSEDIEDFEFTPKPEYEGPFCVFNEPDEAHLIQRWFEHVQETKPTIMVTYNGDFFDWPFVEARAAVHGLSMQQEIGFQKDSQGEYKAPQCIHMDCLRWVKRDSYLPVGSHNLKAAAKAKLGYDPVELDPEDMCRMATEQPQTLATYSVSDAVATYYLYMKYVHPFIFALCTIIPMEPDEVLRKGSGTLCEALLMVQAFHANIIFPNKQEQEFNKLTDDGHVLDSETYVGGHVEALESGVFRSDIPCRFRMNPAAFDFLLQRVEKTLRHALEEEEKVPVEQVTNFEEVCDEIKSKLASLKDVPSRIECPLIYHLDVGAMYPNIILTNRLQPSAMVDEATCAACDFNKPGANCQRKMAWQWRGEFMPASRSEYHRIQHQLESEKFPPLFPEGPARAFHELSREEQAKYEKRRLADYCRKAYKKIHITKVEERLTTICQRENSFYVDTVRAFRDRRYEFKGLHKVWKKKLSAAVEVGDAAEVKRCKNMEVLYDSLQLAHKCILNSFYGYVMRKGARWYSMEMAGIVCFTGANIITQARELIEQIGRPLELDTDGIWCVLPNSFPENFVFKTTNVKKPKVTISYPGAMLNIMVKEGFTNDQYQELAEPSSLTYVTRSENSIFFEVDGPYLAMILPASKEEGKKLKKRYAVFNEDGSLAELKGFEVKRRGELQLIKIFQSSVFEAFLKGSTLEEVYGSVAKVADYWLDVLYSKAANMPDSELFELISENRSMSRKLEDYGEQKSTSISTAKRLAEFLGDQMVKDAGLSCRYIISRKPEGSPVTERAIPLAIFQAEPTVRKHFLRKWLKSSSLQDFDIRAILDWDYYIERLGSAIQKIITIPAALQQVKNPVPRVKHPDWLHKKLLEKNDVYKQKKISELFTLEGRRQVTMAEASEDSPRPSAPDMEDFGLVKLPHPAAPVTVKRKRVLWESQEESQDLTPTVPWQEILGQPPALGTSQEEWLVWLRFHKKKWQLQARQRLARRKRQRLESAEGVLRPGAIRDGPATGLGSFLRRTARSILDLPWQIVQISETSQAGLFRLWALVGSDLHCIRLSIPRVFYVNQRVAKAEEGASYRKVNRVLPRSNMVYNLYEYSVPEDMYQEHINEINAELSAPDIEGVYETQVPLLFRALVHLGCVCVVNKQLVRHLSGWEAETFALEHLEMRSLAQFSYLEPGSIRHIYLYHHAQAHKALFGIFIPSQRRASVFVLDTVRSNQMPSLGALYSAEHGLLLEKVGPELLPPPKHTFEVRAETDLKTICRAIQRFLLAYKEERRGPTLIAVQSSWELKRLASEIPVLEEFPLVPICVADKINYGVLDWQRHGARRMIRHYLNLDTCLSQAFEMSRYFHIPIGNLPEDISTFGSDLFFARHLQRHNHLLWLSPTARPDLGGKEADDNCLVMEFDDQATVEINSSGCYSTVCVELDLQNLAVNTILQSHHVNDMEGADSMGISFDVIQQASLEDMITGGQAASAPASYDETALCSNTFRILKSMVVGWVKEITQYHNIYADNQVMHFYRWLRSPSSLLHDPALHRTLHNMMKKLFLQLIAEFKRLGSSVIYANFNRIILCTKKRRVEDAIAYVEYITSSIHSKETFHSLTISFSRCWEFLLWMDPSNYGGIKGKVSSRIHCGLQDSQKAGGAEDEQENEDDEEERDGEEEEEAEESNVEDLLENNWNILQFLPQAASCQNYFLMIVSAYIVAVYHCMKDGLRRSAPGSTPVRRRGASQLSQEAEGAVGALPGMITFSQDYVANELTQSFFTITQKIQKKVTGSRNSTELSEMFPVLPGSHLLLNNPALEFIKYVCKVLSLDTNITNQVNKLNRDLLRLVDVGEFSEEAQFRDPCRSYVLPEVICRSCNFCRDLDLCKDSSFSEDGAVLPQWLCSNCQAPYDSSAIEMTLVEVLQKKLMAFTLQDLVCLKCRGVKETSMPVYCSCAGDFALTIHTQVFMEQIGIFRNIAQHYGMSYLLETLEWLLQKNPQLGH

SEQ ID NO: 163054 - protein, 1109 aa, Artificial Sequence
  derived and/or modified sequence
MHPTEILDEDKRLGSAVDYYFIQDDGSRFKVALPYKPYFYIATRKGCEREVSSFLSKKFQGKIAKVETVPKEDLDLPNHLVGLKRNYIRLSFHTVEDLVKVRKEISPAVKKNREQDHASDAYTALLSSVLQRGGVITDEEETSKKIADQLDNIVDMREYDVPYHIRLSIDLKIHVAHWYNVRYRGNAFPVEITRRDDLVERPDPVVLAFDIETTKLPLKFPDAETDQIMMISYMIDGQGYLITNREIVSEDIEDFEFTPKPEYEGPFCVFNEPDEAHLIQRWFEHVQETKPTIMVTYNGDFFDWPFVEARAAVHGLSMQQEIGFQKDSQGEYKAPQCIHMDCLRWVKRDSYLPVGSHNLKAAAKAKLGYDPVELDPEDMCRMATEQPQTLATYSVSDAVATYYLYMKYVHPFIFALCTIIPMEPDEVLRKGSGTLCEALLMVQAFHANIIFPNKQEQEFNKLTDDGHVLDSETYVGGHVEALESGVFRSDIPCRFRMNPAAFDFLLQRVEKTLRHALEEEEKVPVEQVTNFEEVCDEIKSKLASLKDVPSRIECPLIYHLDVGAMYPNIILTNRLQPSAMVDEATCAACDFNKPGANCQRKMAWQWRGEFMPASRSEYHRIQHQLESEKFPPLFPEGPARAFHELSREEQAKYEKRRLADYCRKAYKKIHITKVEERLTTICQRENSFYVDTVRAFRDRRYEFKGLHKVWKKKLSAAVEVGDAAEVKRCKNMEVLYDSLQLAHKCILNSFYGYVMRKGARWYSMEMAGIVCFTGANIITQARELIEQIGRPLELDTDGIWCVLPNSFPENFVFKTTNVKKPKVTISYPGAMLNIMVKEGFTNDQYQELAEPSSLTYVTRSENSIFFEVDGPYLAMILPASKEEGKKLKKRYAVFNEDGSLAELKGFEVKRRGELQLIKIFQSSVFEAFLKGSTLEEVYGSVAKVADYWLDVLYSKAANMPDSELFELISENRSMSRKLEDYGEQKSTSISTAKRLAEFLGDQMVKDAGLSCRYIISRKPEGSPVTERAIPLAIFQAEPTVRKHFLRKWLKSSSLQDFDIRAILDWDYYIERLGSAIQKIITIPAALQQVKNPVPRVKHPDWLHKTAGEE

SEQ ID NO: 163055 - protein, 496 aa, Artificial Sequence
  derived and/or modified sequence
MEGILKSMVVGWVKEITQYHNIYADNQVMHFYRWLRSPSSLLHDPALHRTLHNMMKKLFLQLIAEFKRLGSSVIYANFNRIILCTKKRRVEDAIAYVEYITSSIHSKETFHSLTISFSRCWEFLLWMDPSNYGGIKGKVSSRIHCGLQDSQKAGGAEDEQENEDDEEERDGEEEEEAEESNVEDLLENNWNILQFLPQAASCQNYFLMIVSAYIVAVYHCMKDGLRRSAPGSTPVRRRGASQLSQEAEGAVGALPGMITFSQDYVANELTQSFFTITQKIQKKVTGSRNSTELSEMFPVLPGSHLLLNNPALEFIKYVCKVLSLDTNITNQVNKLNRDLLRLVDVGEFSEEAQFRDPCRSYVLPEVICRSCNFCRDLDLCKDSSFSEDGAVLPQWLCSNCQAPYDSSAIEMTLVEVLQKKLMAFTLQDLVCLKCRGVKETSMPVYCSCAGDFALTIHTQVFMEQIGIFRNIAQHYGMSYLLETLEWLLQKNPQLGH

SEQ ID NO: 163056 - protein, 2297 aa, Artificial Sequence
  derived and/or modified sequence
MSRPLGLKSFPRHKQAPLPLSLTFHGCLLLRRDDGATSSVSALKRLERSQWTDKMDLRFGFERLKEPGEKTGWLINMHPTEILDEDKRLGSAVDYYFIQDDGSRFKVALPYKPYFYIATRKGCEREVSSFLSKKFQGKIAKVETVPKEDLDLPNHLVGLKRNYIRLSFHTVEDLVKVRKEISPAVKKNREQDHASDAYTALLSSVLQRGGVITDEEETSKKIADQLDNIVDMREYDVPYHIRLSIDLKIHVAHWYNVRYRGNAFPVEITRRDDLVERPDPVVLAFDIETTKLPLKFPDAETDQIMMISYMIDGQGYLITNREIVSEDIEDFEFTPKPEYEGPFCVFNEPDEAHLIQRWFEHVQETKPTIMVTYNGDFFDWPFVEARAAVHGLSMQQEIGFQKDSQGEYKAPQCIHMDCLRWVKRDSYLPVGSHNLKAAAKAKLGYDPVELDPEDMCRMATEQPQTLATYSVSDAVATYYLYMKYVHPFIFALCTIIPMEPDEVLRKGSGTLCEALLMVQAFHANIIFPNKQEQEFNKLTDDGHVLDSETYVGGHVEALESGVFRSDIPCRFRMNPAAFDFLLQRVEKTLRHALEEEEKVPVEQVTNFEEVCDEIKSKLASLKDVPSRIECPLIYHLDVGAMYPNIILTNRLQPSAMVDEATCAACDFNKPGANCQRKMAWQWRGEFMPASRSEYHRIQHQLESEKFPPLFPEGPARAFHELSREEQAKYEKRRLADYCRKAYKKIHITKVEERLTTICQRENSFYVDTVRAFRDRRYEFKGLHKVWKKKLSAAVEVGDAAEVKRCKNMEVLYDSLQLAHKCILNSFYGYVMRKGARWYSMEMAGIVCFTGANIITQARELIEQIGRPLELDTDGIWCVLPNSFPENFVFKTTNVKKPKVTISYPGAMLNIMVKEGFTNDQYQELAEPSSLTYVTRSENSIFFEVDGPYLAMILPASKEEGKKLKKRYAVFNEDGSLAELKGFEVKRRGELQLIKIFQSSVFEAFLKGSTLEEVYGSVAKVADYWLDVLYSKAANMPDSELFELISENRSMSRKLEDYGEQKSTSISTAKRLAEFLGDQMVKDAGLSCRYIISRKPEGSPVTERAIPLAIFQAEPTVRKHFLRKWLKSSSLQDFDIRAILDWDYYIERLGSAIQKIITIPAALQQVKNPVPRVKHPDWLHKKLLEKNDVYKQKKISELFTLEGRRQVTMAEASEDSPRPSAPDMEDFGLVKLPHPAAPVTVKRKRVLWESQEESQDLTPTVPWQEILGQPPALGTSQEEWLVWLRFHKKKWQLQARQRLARRKRQRLESAEGVLRPGAIRDGPATGLGSFLRRTARSILDLPWQIVQISETSQAGLFRLWALVGSDLHCIRLSIPRVFYVNQRVAKAEEGASYRKVNRVLPRSNMVYNLYEYSVPEDMYQEHINEINAELSAPDIEGVYETQVPLLFRALVHLGCVCVVNKQLVRHLSGWEAETFALEHLEMRSLAQFSYLEPGSIRHIYLYHHAQAHKALFGIFIPSQRRASVFVLDTVRSNQMPSLGALYSAEHGLLLEKVGPELLPPPKHTFEVRAETDLKTICRAIQRFLLAYKEERRGPTLIAVQSSWELKRLASEIPVLEEFPLVPICVADKINYGVLDWQRHGARRMIRHYLNLDTCLSQAFEMSRYFHIPIGNLPEDISTFGSDLFFARHLQRHNHLLWLSPTARPDLGGKEADDNCLVMEFDDQATVEINSSGCYSTVCVELDLQNLAVNTILQSHHVNDMEGADSMGISFDVIQQASLEDMITGGQAASAPASYDETALCSNTFRILKSMVVGWVKEITQYHNIYADNQVMHFYRWLRSPSSLLHDPALHRTLHNMMKKLFLQLIAEFKRLGSSVIYANFNRIILCTKKRRVEDAIAYVEYITSSIHSKETFHSLTISFSRCWEFLLWMDPSNYGGIKGKVSSRIHCGLQDSQKAGGAEDEQENEDDEEERDGEEEEEAEESNVEDLLENNWNILQFLPQAASCQNYFLMIVSAYIVAVYHCMKDGLRRSAPGSTPVRRRGASQLSQEAEGAVGALPGMITFSQDYVANELTQSFFTITQKIQKKVTGSRNSTELSEMFPVLPGSHLLLNNPALEFIKYVCKVLSLDTNITNQVNKLNRDLLRLVDVGEFSEEAQFRDPCRSYVLPEVICRSCNFCRDLDLCKDSSFSEDGAVLPQWLCSNCQAPYDSSAIEMTLVEVLQKKLMAFTLQDLVCLKCRGVKETSMPVYCSCAGDFALTIHTQVFMEQIGIFRNIAQHYGMSYLLETLEWLLQKNPQLGH

SEQ ID NO: 163057 - protein, 2259 aa, Artificial Sequence
  derived and/or modified sequence
MSLRSGGRRRADPGADGEASRDDGATSSVSALKRLERSQWTDKMDLRFGFERLKEPGEKTGWLINMHPVALPYKPYFYIATRKGCEREVSSFLSKKFQGKIAKVETVPKEDLDLPNHLVGLKRNYIRLSFHTVEDLVKVRKEISPAVKKNREQDHASDAYTALLSSVLQRGGVITDEEETSKKIADQLDNIVDMREYDVPYHIRLSIDLKIHVAHWYNVRYRGNAFPVEITRRDDLVERPDPVVLAFDIETTKLPLKFPDAETDQIMMISYMIDGQGYLITNREIVSEDIEDFEFTPKPEYEGPFCVFNEPDEAHLIQRWFEHVQETKPTIMVTYNGDFFDWPFVEARAAVHGLSMQQEIGFQKDSQGEYKAPQCIHMDCLRWVKRDSYLPVGSHNLKAAAKAKLGYDPVELDPEDMCRMATEQPQTLATYSVSDAVATYYLYMKYVHPFIFALCTIIPMEPDEVLRKGSGTLCEALLMVQAFHANIIFPNKQEQEFNKLTDDGHVLDSETYVGGHVEALESGVFRSDIPCRFRMNPAAFDFLLQRVEKTLRHALEEEEKVPVEQVTNFEEVCDEIKSKLASLKDVPSRIECPLIYHLDVGAMYPNIILTNRLQPSAMVDEATCAACDFNKPGANCQRKMAWQWRGEFMPASRSEYHRIQHQLESEKFPPLFPEGPARAFHELSREEQAKYEKRRLADYCRKAYKKIHITKVEERLTTICQRENSFYVDTVRAFRDRRYEFKGLHKVWKKKLSAAVEVGDAAEVKRCKNMEVLYDSLQLAHKCILNSFYGYVMRKGARWYSMEMAGIVCFTGANIITQARELIEQIGRPLELDTDGIWCVLPNSFPENFVFKTTNVKKPKVTISYPGAMLNIMVKEGFTNDQYQELAEPSSLTYVTRSENSIFFEVDGPYLAMILPASKEEGKKLKKRYAVFNEDGSLAELKGFEVKRRGELQLIKIFQSSVFEAFLKGSTLEEVYGSVAKVADYWLDVLYSKAANMPDSELFELISENRSMSRKLEDYGEQKSTSISTAKRLAEFLGDQMVKDAGLSCRYIISRKPEGSPVTERAIPLAIFQAEPTVRKHFLRKWLKSSSLQDFDIRAILDWDYYIERLGSAIQKIITIPAALQQVKNPVPRVKHPDWLHKKLLEKNDVYKQKKISELFTLEGRRQVTMAEASEDSPRPSAPDMEDFGLVKLPHPAAPVTVKRKRVLWESQEESQDLTPTVPWQEILGQPPALGTSQEEWLVWLRFHKKKWQLQARQRLARRKRQRLESAEGVLRPGAIRDGPATGLGSFLRRTARSILDLPWQIVQISETSQAGLFRLWALVGSDLHCIRLSIPRVFYVNQRVAKAEEGASYRKVNRVLPRSNMVYNLYEYSVPEDMYQEHINEINAELSAPDIEGVYETQVPLLFRALVHLGCVCVVNKQLVRHLSGWEAETFALEHLEMRSLAQFSYLEPGSIRHIYLYHHAQAHKALFGIFIPSQRRASVFVLDTVRSNQMPSLGALYSAEHGLLLEKVGPELLPPPKHTFEVRAETDLKTICRAIQRFLLAYKEERRGPTLIAVQSSWELKRLASEIPVLEEFPLVPICVADKINYGVLDWQRHGARRMIRHYLNLDTCLSQAFEMSRYFHIPIGNLPEDISTFGSDLFFARHLQRHNHLLWLSPTARPDLGGKEADDNCLVMEFDDQATVEINSSGCYSTVCVELDLQNLAVNTILQSHHVNDMEGADSMGISFDVIQQASLEDMITGGQAASAPASYDETALCSNTFRILKSMVVGWVKEITQYHNIYADNQVMHFYRWLRSPSSLLHDPALHRTLHNMMKKLFLQLIAEFKRLGSSVIYANFNRIILCTKKRRVEDAIAYVEYITSSIHSKETFHSLTISFSRCWEFLLWMDPSNYGGIKGKVSSRIHCGLQDSQKAGGAEDEQENEDDEEERDGEEEEEAEESNVEDLLENNWNILQFLPQAASCQNYFLMIVSAYIVAVYHCMKDGLRRSAPGSTPVRRRGASQLSQEAEGAVGALPGMITFSQDYVANELTQSFFTITQKIQKKVTGSRNSTELSEMFPVLPGSHLLLNNPALEFIKYVCKVLSLDTNITNQVNKLNRDLLRLVDVGEFSEEAQFRDPCRSYVLPEVICRSCNFCRDLDLCKDSSFSEDGAVLPQWLCSNCQAPYDSSAIEMTLVEVLQKKLMAFTLQDLVCLKCRGVKETSMPVYCSCAGDFALTIHTQVFMEQIGIFRNIAQHYGMSYLLETLEWLLQKNPQLGH

SEQ ID NO: 163058 - DNA, 771 bp, Artificial Sequence
  derived and/or modified sequence
atgttccccgtgctgcctgggagtcatttgttgttgaataatcctgccctggaattcattaaatatgtctgtaaggtcctctccctcgacacaaatatcaccaaccaggtgaacaaactcaacagagatctgctgcgcctggtcgacgttggcgagtttagcgaagaggcccagtttcgcgacccctgcagaagttacgtcttgcctgaagtcatttgcaggtcatgcaacttttgtcgtgatctcgatctgtgcaaggactcatccttctcagaagatggtgcagttctaccacaatggctatgctctaattgtcaggcaccctatgattcctcggccatagaaatgacgctggtcgaggttctgcaaaaaaaactgatggcgtttaccctgcaggatctgaaagaggccgataccccgaaatgtgaagaaaaagagcgtcgcaaacgcgagctgcatagctccgccaccggcagaagctgtaggggggcctctgaacagagactgggggacgcaccctcctgccgagtggttgtgcacggggtgcaagcctgtaggatggaaggagtgtgcttgaagtgccgcggcgttaaggagacctctatgcccgtatattgcagttgcgctggagactttgccttgactatccacacacaggtttttatggagcagatagggatcttccgtaacattgcgcagcattacggaatgtcatacctcctggagacccttgagtggttactgcagaaaaatccccagctgggccactag

SEQ ID NO: 163059 - DNA, 6861 bp, Artificial Sequence
  derived and/or modified sequence
atgtcgttgaggtctggcggccggagacgggccgaccctggcgctgacggagaagcatctagggacgatggtgctaccagttcggtgagcgccttgaagcgcttggaacgatcccagtggaccgacaaaatggatcttaggttcggctttgaacgtcttaaggagcccggggagaagacaggatggttaatcaacatgcacccgaccgagatactggatgaagacaaacgactgggctccgccgtagactactactttatccaggatgatggcagcaggtttaaggtggcactcccttataagccctatttttatatagctaccaggaagggatgtgaacgggaggtctcgagtttcctgagcaagaaattccagggaaagatagcgaaagtggagacagtgccaaaagaggacctcgatttgccgaaccaccttgtcgggcttaagcggaattacattcgactgtctttccacactgtggaagacctcgtcaaagtccggaaggagatttcaccagccgtcaagaagaaccgcgagcaagaccacgcgtcagatgcgtatactgcactgctttcatccgtgctgcagaggggtggagtgattaccgacgaggaggagacttccaaaaaaatcgccgatcagctggataacatcgtggacatgcgggagtacgacgtgccttatcacattagactcagcatcgacctcaaaatacacgttgcacactggtataatgtcagatataggggaaatgcctttcctgtggaaattacccgccgtgacgatcttgtggagagacccgaccctgtggtcctcgcatttgatattgagaccaccaagctgcccctcaagttcccggatgcggagacggatcagattatgatgatcagttatatgatcgacgggcagggttatctgatcacaaatcgcgaaatcgtttccgaggacatcgaggacttcgaattcacccccaaacctgaatatgaagggccattctgcgtgtttaatgagcctgatgaggcacacctcattcagcggtggttcgagcacgttcaggagactaagcctacgattatggtgacgtacaacggtgactttttcgactggccatttgtggaggcccgggctgccgttcacgggctgtccatgcaacaagagatcggtttccaaaaggacagtcagggcgagtacaaggcgccacaatgtatacacatggactgcctgcgctgggtgaaaagggattcgtatctgccggttggctcccataacctgaaggcagccgctaaggcaaagctggggtacgatccggttgagctggatccagaggacatgtgtaggatggctacggagcaaccacagacacttgccacttacagcgtcagcgacgctgtcgcaacgtactacttatacatgaagtatgtgcatccatttatctttgcattatgtacaatcatacccatggaaccagacgaagtcctgcgaaagggcagtgggacactctgtgaggccctcctgatggtgcaggcatttcacgcaaacatcatcttcccaaacaaacaagaacaggaatttaacaagcttaccgatgatggccacgttctggactcagagacgtatgtcgggggccacgtcgaagcacttgagagtggagtgttccggtcagatatcccatgcaggttcaggatgaaccctgcggcgttcgactttctgcttcagagggtcgaaaagaccctgagacatgcactggaggaggaagagaaagtcccagtcgagcaggtaactaattttgaagaagtgtgcgacgaaatcaaatctaagctggcctcattaaaagatgttccttccagaatcgagtgccccctgatctatcacctagatgtcggcgccatgtacccgaatatcattcttacaaatagactacagccgtcagctatggttgacgaagccacttgtgctgcctgtgactttaacaagcccggagcaaattgccagagaaagatggcttggcagtggcgcggagagtttatgccagcatctagatctgaataccatcggattcaacaccagctggagtctgagaagtttcctccactcttcccagaagggccagctagggccttccacgagctgtcacgtgaagagcaggccaagtatgagaaacggagacttgcagattactgcagaaaagcctataagaagatccatatcaccaaagttgaggaaagactgacaactatctgtcagcgggagaactcgttctacgtcgataccgttcgtgcattccgggatcggagatatgagtttaaaggcctgcataaggtctggaaaaagaagctttcggctgccgttgaggtgggcgacgcggccgaggttaaaaggtgcaaaaatatggaagtcctgtacgactccctgcaattggcccataagtgtattttgaatagtttttatggttacgttatgcgtaagggcgcaaggtggtacagcatggaaatggctgggatcgtttgctttacaggagctaatattattacacaggcaagggagctcattgagcaaatcggccggccgctggagctcgacactgacggaatttggtgtgtcctccctaattccttcccagagaatttcgtgtttaaaacaaccaatgtcaaaaaaccaaaggtgactattagttaccccggggccatgcttaatattatggtcaaggagggctttaccaacgatcaataccaggaattagcagaaccatcatccctcacatacgtcactagaagcgagaactcaattttcttcgaggtggatggcccttatctcgccatgatcctccccgcatccaaagaagaaggaaagaagcttaagaagagatatgccgtgtttaatgaagacggttctctggcagagttaaaaggtttcgaggtgaagcgaaggggtgagctccagctgataaaaatctttcagagttccgtcttcgaggcatttctgaaagggagcacactcgaagaggtttatggtagtgtggctaaggtagcggactactggctggacgtgctgtacagcaaagccgctaacatgcctgatagcgagctttttgagctcataagcgagaaccgctccatgagccgcaagcttgaagattacggcgaacaaaaatcaacctccatttctactgctaaacgactcgccgagttcctgggcgaccagatggtgaaagatgctggcctgagctgtaggtacataattagccggaaacccgaaggaagcccagtgacagagagagctatcccacttgccatctttcaggccgaaccgacagtcagaaaacatttcttgcgaaagtggttgaagtcctcatccttgcaggactttgatataagggcaattctggactgggactactacatcgagcgcctaggttctgccatccagaagataattactatcccggccgcattacagcaggtgaagaaccctgtgccacgagttaagcatccagattggcttcacaaaaaattgttagaaaaaaatgacgtctacaaacaaaagaagatatcggagctcttcaccctggagggtcggcggcaagtgactatggccgaggcgtcagaggacagccccaggcccagcgcgcccgacatggaggactttggactcgtgaagcttccacatccagctgccccagtgactgtcaagaggaagcgtgtgctgtgggaaagtcaagaagaatcccaggacctcacgcctacggtgccttggcaggagatcctcgggcaaccaccagcactcggcacctcacaggaagaatggttagtctggctgagattccacaaaaagaagtggcagttacaggcccgtcagagattagctcgacgaaagcgccagagactagagtctgcagaaggggtattaagaccaggtgcgatccgggacggacctgccacgggcttgggttcttttctgcggcgcacagcaagatccatcttggatctaccatggcagatcgttcagatatccgaaactagccaggctggccttttcagactgtgggctctggtcggcagcgatcttcattgtatccgcctgtctatccctagagtgttttatgtgaatcagcgggtggccaaggccgaggagggtgcatcttatcgaaaagtgaaccgcgtgctcccacggtccaacatggtctacaacctgtacgaatacagtgtgccagaggacatgtatcaggagcatatcaatgaaatcaacgctgagctgagcgcccctgacatcgaaggagtgtacgagacccaagtgcccctattgttcagagctttggtacatctgggctgtgtctgcgtggtaaataagcaactggtgcgacacctttccggctgggaagccgaaacatttgcccttgaacatcttgaaatgaggagcctcgctcagttctcttatttggaacctggctcaattcgccacatatatctttaccaccacgctcaagcccacaaggcccttttcggtatcttcataccaagccagcggcgtgcttcagtgtttgtgctcgacaccgttagatccaatcagatgccatctttaggcgcactgtactccgcagagcatgggttgctgcttgagaaggtagggccggagctattgcccccacccaaacatacgttcgaggtccgtgccgagacagacctcaaaaccatttgcagagcaattcaaagattccttttggcctataaggaggaacgcaggggccccactttgattgcagtgcagtctagctgggaactcaagcggctggcctccgagatccctgtattggaagagttccccttagtacccatttgtgtggccgacaagatcaattatggggtactggactggcagcggcacggtgctcggagaatgattcgacattatctgaacttagatacgtgcttgtctcaggcatttgagatgtcccggtattttcacatacctatcggaaacctcccagaggacataagcactttcggaagcgatctctttttcgcccgccacttacaacgccacaatcacctcctttggctttcaccaaccgcacgaccagacttagggggtaaagaggccgacgacaactgcctcgtaatggagttcgacgaccaggccacagtcgaaattaatagttctggttgctactccacagtatgtgtggagctcgatctgcagaatctggctgtcaacactatccttcagtcccaccatgtgaatgacatggaaggcgcagattccatgggcattagtttcgatgtcatccagcaggctagtctcgaagacatgattactgggggccaggcagcttcagccccagcgtcatatgatgaaaccgctctgtgcagtaataccttcagaatcctgaagtcaatggttgtaggctgggtgaaggaaatcacccaatatcataacatctacgccgacaatcaggttatgcatttctacagatggctcaggagccccagcagcttacttcacgacccggccctgcacagaacccttcacaatatgatgaaaaagctgtttctccagttgatagctgagtttaagcgcctcggctcaagcgtgatttacgcaaatttcaatcgtatcatcctctgcacaaagaagagacgtgtcgaagacgctattgcctatgtggagtacatcaccagctctattcactcaaaagaaaccttccattctctgacgatttcctttagccggtgttgggagtttctgctgtggatggacccttcgaattatgggggaattaaggggaaggttagtagccggatccattgtggtcttcaggattctcagaaagcagggggagccgaggatgaacaggaaaacgaagatgacgaggaggagcgcgacggagaggaggaggaagaggccgaggagtctaacgtggaggacctcctcgaaaataactggaatattttacagttcctgccacaggccgcttcttgtcagaactatttcctcatgatcgtgtcagcctacatcgtagccgtataccactgcatgaaagacggactgaggcggtccgcccctggctccactccggtgagacgtcggggcgcatctcagctgtctcaagaggccgagggggcggtcggggccctgcctggaatgatcaccttctcccaggactacgttgccaacgaactgacccaatccttctttacaatcacgcagaagattcaaaagaaggttacaggatcaagaaactccaccgaactaagcgaaatgtttccagtgctccccggatctcatctgctactcaacaatcccgcactggaatttatcaagtacgtgtgcaaagtcctctctttggacaccaatatcaccaaccaggtaaacaagttgaacagggatctgctgaggctagtcgatgtgggcgagttttctgaggaggcgcaattccgcgacccatgccgctcgtacgttttgcccgaggtcatatgcagatcctgtaacttctgcagagatcttgatctctgtaaggactcttcctttagcgaggacggagcggtcctcccccagtggctgtgttccaactgccaggcgccatatgactctagtgctatcgagatgaccctggtggaagtactgcagaagaagttaatggcgttcacactccaggacctggtgtgcctgaagtgccggggcgtgaaggaaacatctatgccagtctattgttcatgcgctggagattttgctctgactatccatacacaagtgtttatggagcagattggcatcttccgcaatattgcccagcactacggaatgtcttatctgcttgaaaccttggaatggctgttacagaagaatccccagctcggccattag

SEQ ID NO: 163060 - DNA, 1491 bp, Artificial Sequence
  derived and/or modified sequence
atggagggcattctcaagagcatggtggtcggctgggtcaaagaaattacacaatatcataacatttacgccgacaatcaggtgatgcacttttacagatggctccgttcaccaagctctctgcttcacgatccagctctgcaccgaactttacacaatatgatgaagaaactgtttctgcagctgatcgccgagtttaagcggcttgggagctcagtaatctatgccaactttaatcggattatcctctgcaccaagaaacgaagagttgaagacgctatcgcttatgtggagtacattacttcaagtattcattccaaggagacattccacagcctcacaatttcttttagccgctgctgggaattcctgctttggatggaccccagcaattacggtggtattaagggtaaggtgtcgtcgcggatacactgtggacttcaggattctcaaaaagccggaggcgccgaagatgagcaggaaaatgaggatgacgaggaagagcgagacggggaggaagaggaggaagcagaagaatccaacgtagaggatctcctggaaaacaattggaacatcctgcagtttctgccccaggccgcctcctgtcagaattattttctgatgatcgtatctgcatacattgtggctgtctaccactgcatgaaggacggtctgaggcgaagcgctcccgggagcacgccagtgcgccgaaggggcgccagccaattgagtcaggaggcagagggggcagttggcgcactcccaggcatgatcactttttctcaggattacgtggccaatgagttgacacaaagttttttcactatcactcaaaagatccagaagaaggtgactggatctcggaactcaactgagctgagtgagatgttccctgtgctgcccggttctcatctgctgctaaacaatccagccttggaattcattaagtacgtgtgcaaagtgctttcactcgacaccaacatcactaatcaggtaaacaaactgaatcgtgacctgctccgtctggtcgacgttggtgagttctccgaagaggcccagttccgcgacccctgcaggtcgtatgttctgccagaggtgatatgcagatcttgtaatttctgcagggacttagacctctgcaaagatagctccttctctgaagatggcgcggtgctaccccagtggttatgttctaactgccaggctccctatgatagtagcgcaattgaaatgaccctggttgaagtcttacagaagaaactaatggccttcactctccaagacctggtgtgcctgaaatgccggggcgtgaaggagacctctatgcccgtgtactgctcgtgcgctggggacttcgcgttaactattcatacccaggtgtttatggagcagatcggaatctttaggaacatcgcccagcattacggtatgagttacttgttggagaccctggaatggctactccagaaaaatccacagttggggcactag

SEQ ID NO: 163061 - DNA, 6894 bp, Artificial Sequence
  derived and/or modified sequence
atgtcgagacctttggggttgaagtcctttccacgacacaagcaggccccgctgccgctgtctctgacattccacggctgcctcttactaaggagagatgatggtgccactagttcggtgagtgcactgaagagactggagaggagccagtggacagataagatggacttgcggttcggtttcgagagactgaaagagccaggagagaaaacaggctggctcatcaatatgcacccaacggagattctggatgaagataagcgtctcggtagtgcagtagattattactttatacaggatgatgggagcagatttaaagtggcattgccgtacaagccctatttttacatcgcgacccgcaaaggctgtgaacgagaggtgagctcgttcttgagcaagaagttccaagggaaaatcgcaaaagttgagactgtaccaaaggaggatctggatctgcctaatcatctggtcggtttgaaacgcaattatattagactgagcttccacacggtggaggacttggtcaaggtacgtaaggagataagccctgcagtgaagaagaatagagagcaggatcacgcttccgatgcttacactgccctgctttcatctgtgctacagagaggtggcgtcatcaccgacgaagaagaaacgagtaagaagatcgcggatcagctggacaatatcgttgacatgcgggagtatgatgtgccttaccacatcagattgtctattgatctcaaaattcatgtggctcattggtacaatgtgagatatcgggggaacgcctttccagtggagatcacgaggagagacgacctcgtggagaggccagatcctgtggtgctcgcgttcgacattgaaaccacgaaactgcctcttaagttccctgacgccgaaacagatcagatcatgatgatcagctatatgatcgatggccagggatatcttattactaacagagaaatcgtgtcagaggatatcgaagactttgagttcaccccaaaaccggaatacgagggacctttctgcgtgttcaacgagcccgacgaggctcatttaattcaacggtggttcgaacacgtccaagaaactaaaccaactattatggtgacttacaatggggattttttcgactggccattcgttgaagctagagcagctgtacacggtctctctatgcaacaggagatagggtttcaaaaggattcccagggcgagtacaaggcaccgcagtgcatccatatggactgcttacgctgggtcaaacgcgactcttacctgccagtcgggtctcacaacttgaaggctgccgctaaagccaagcttggctacgatcctgtggaattggacccagaagatatgtgtagaatggcaactgagcagccccagacattggcaacctacagtgtatctgatgctgtggcaacctactacctgtatatgaagtatgtgcatcccttcatcttcgcactgtgcacgattattcccatggaacccgacgaagtcctccggaaggggagcggtactctgtgcgaggcccttctgatggtccaagcgtttcacgctaacatcattttcccaaacaagcaggagcaggagttcaataaactgaccgatgatggccatgtgctggatagcgaaacctatgtgggtggtcatgtggaggcattggaatctggcgtgtttcggtccgacataccttgccgatttaggatgaatcctgccgctttcgacttcttgctgcagagggtggagaagacactgaggcatgccttggaggaggaagaaaaagtgcccgttgagcaggtgacaaattttgaggaggtgtgcgacgaaataaaaagtaagctcgccagtcttaaggacgtaccttcccgtatcgaatgtccattgatttatcacctagatgtgggcgcgatgtatccaaatatcatcctgacaaacagactgcagccatcagctatggttgacgaggcgacttgtgcggcttgcgattttaataagccaggcgctaactgccaaaggaagatggcctggcaatggcgaggggagtttatgcctgcctccaggtccgagtaccataggatccaacatcagcttgagagcgagaaattccccccactgttccctgaagggccagcaagggcctttcacgaactctcccgagaagagcaggccaagtatgaaaaacggaggcttgccgattactgccgaaaagcatacaagaagattcacatcaccaaagtggaggaaaggcttactactatatgtcagagagagaactccttttacgtggatacggtgcgagcatttcgtgataggcgctacgagttcaagggtttgcataaggtttggaaaaaaaaacttagcgcagccgtggaggtcggagatgcagcagaagtgaaaagatgtaaaaacatggaggtcctatacgacagtctgcagctggcccacaaatgtatactgaatagcttctacggctacgtcatgagaaaaggggcgcgctggtatagcatggaaatggccggcattgtgtgctttacaggggccaacattatcacccaggcccgggagctcatcgagcagatcggtagaccccttgagctggatacagacgggatctggtgtgttttgcctaattccttcccagaaaatttcgtatttaaaaccacaaatgtaaaaaaacccaaggtcaccatcagctatcctggggccatgctgaacatcatggtcaaggaaggattcaccaacgaccagtatcaggaactggcggagccttcaagtctgacctacgtcacacgctccgagaactctatcttcttcgaggtcgacgggccttacctcgctatgattctgcctgcaagcaaggaagaagggaagaagctcaagaaacgttacgcggtgttcaatgaggacggatccctcgcagaattgaagggctttgaggtgaagaggcgcggagaattacagctgatcaagatttttcagtccagtgtgttcgaagcgtttctcaaagggagtacgctggaagaggtctatggaagtgtggcaaaggtggctgactactggttggatgttctatactctaaggctgccaatatgcctgattcagagttgttcgaactgatttctgagaatcggtcaatgtcccgcaaacttgaggattacggcgagcagaaatctacatcgatctcaactgctaagcgcttagctgagtttctaggagaccagatggtgaaagacgctggactttcctgtaggtatattatcagtagaaaacctgaggggagcccagtgaccgagagagctatcccgctcgctatcttccaggctgaacctactgtgcggaagcacttcctccggaagtggctgaagtccagctcgttgcaggattttgacattagagctattctggactgggattattacattgaacgattaggatcggccattcaaaagattatcacgatcccagcggccctgcagcaggtgaagaatccagtcccccgggtaaagcatccggactggctccataaaaaactgctggagaaaaatgacgtttataagcaaaaaaaaatctccgaactgttcacccttgaggggcgcaggcaagtgaccatggctgaggcctcagaagacagtcctaggcccagcgcgccggacatggaagatttcggtctggtcaagctgccgcacccagcagcacctgtcacggtcaaacgcaagcgggttttgtgggaatcccaggaggaaagtcaggatctgactcctaccgtcccctggcaggagatccttgggcagcctcctgcattgggtacatctcaggaggagtggcttgtgtggctccgcttccacaagaagaaatggcagctgcaggccagacagcgcttagcgcgccgaaagagacagcgactcgaaagtgctgagggtgtacttcgccctggtgccatccgcgatggcccggcaaccggactcggatcctttctccgccgaaccgcccggtcaattctcgatttgccctggcagatagtgcagatctcagaaacgagtcaagctggtctgttccgcctctgggcactcgtggggtctgatttacattgcattagactatcgattccacgggtcttttacgtcaaccagcgggtggccaaggctgaggagggagcttcatatcgtaaagtgaaccgtgtattgcccaggagcaacatggtttacaatttgtatgaatacagcgtgcccgaggatatgtaccaggagcatatcaatgagatcaacgctgagctgtccgcacccgatatagagggagtatatgagacccaggtccccctgctgttcagggcactggtccacctgggctgcgtgtgcgtggtgaacaaacagcttgtcagacacctttctgggtgggaggccgagaccttcgccctggagcacctggagatgaggtccctcgcgcaattctcttatttagagccgggctctatcagacacatctacctgtaccaccacgcacaggcccacaaggctctattcggcattttcattccaagccaaagacgcgcctcagtcttcgtgttggatactgtccggagtaatcagatgccctcactcggagctctgtactccgctgaacacgggctgctcctggaaaaggtcggaccagaactactgccaccaccaaaacataccttcgaagttagggcagagaccgacttgaagaccatctgccgggctatacagaggtttttattagcttacaaggaagagaggcgcggccccaccttgatagccgtccagtcctcctgggaactgaagagactggcctcagagatccccgtcttagaggagttccccttggtgccgatctgcgtcgcggataagatcaattacggtgttctggactggcagagacatggtgccaggcgaatgattagacattatctcaacctggacacatgtttaagtcaggcattcgagatgtctcgctattttcacatccctatcggaaacctgccagaagacatctccacatttgggagcgacctcttttttgctagacatctgcagcggcataatcacctgttatggctctcaccaactgcccgcccggatctgggcgggaaggaagccgacgataactgcctggtcatggagtttgacgaccaggctacagttgaaattaattctagcggctgttacagtaccgtgtgcgtggagctggatctccagaatctagcggtgaacaccattctgcaatcccaccacgtcaacgacatggaaggcgccgactccatgggcatctctttcgacgtgatccagcaggcaagcttagaagacatgattaccggcggtcaggccgcatctgctcccgcttcatatgatgagactgccctctgctccaacactttccgcattctgaaaagcatggtcgtcggttgggtcaaagaaattacccagtatcacaacatttacgccgacaatcaggtgatgcatttctaccgctggcttcgcagccccagttcactgcttcacgatccggcactgcacaggaccctacataacatgatgaaaaaactgttcctccagctcatcgccgagtttaagcgcctgggatcgagtgtcatatacgccaattttaatcggatcatcctttgcacaaaaaaaagaagggtcgaggacgctatcgcttacgtagagtatatcacatccagtatacattccaaagagactttccactcacttacaatttctttcagtagatgttgggagttcctactgtggatggatccttccaactatggtgggatcaaggggaaggtatcatcacgcatccattgtggattgcaagattctcagaaagctggcggcgccgaggacgagcaggagaatgaggacgacgaggaggagcgtgatggggaggaagaagaggaagctgaagagtcaaatgtagaggatctactcgagaacaattggaacatactccagtttctcccccaagcagcaagctgccagaattacttcctcatgatcgtttccgcatacatcgtggctgtgtaccactgcatgaaggacggcctccgaaggtctgcccctgggtcaacccccgtgcgccgtcgcggcgccagccagctaagccaagaggccgagggtgccgtgggggccctccccgggatgatcacgttttctcaggactatgtcgccaatgagctgacccagagtttctttacaattactcagaaaatccagaagaaagttaccggttccagaaacagcactgagttgtctgagatgttcccagtcctcccggggagtcatctcctactgaacaatcctgctcttgagttcattaagtatgtctgtaaggtcttatccttggatactaacataactaatcaggtcaataaactgaatagagatttgctgagattggtcgatgtaggagaattcagtgaagaagcacagttcagggacccttgccggagctacgtccttccggaggtgatatgcaggtcttgtaatttctgcagggatctggatttatgcaaggactcaagcttctcagaggacggcgctgtactgccacaatggctctgctctaactgccaggctccatacgactccagcgcaatagaaatgaccctggtcgaggtgctccaaaagaagctgatggcattcactctgcaagatttggtctgcctcaagtgccgtggcgttaaggagacaagcatgcccgtctattgctcgtgtgcaggagactttgctctcacgatccatactcaggttttcatggaacaaatcggtattttcaggaacatagcgcagcattatggcatgtcctacttgcttgagactctggaatggctcctgcaaaagaatccccagctaggtcattag

SEQ ID NO: 163062 - DNA, 6780 bp, Artificial Sequence
  derived and/or modified sequence
atgagtctccgttcaggtggccggagacgggccgatccaggggccgacggcgaagcctccagggacgacggcgccacatcctccgtgtctgcactgaagcggcttgaacgttcccagtggaccgataaaatggatttgcgtttcggattcgaaagactgaaggagcccggcgaaaagactggatggttaataaacatgcaccctgtggccctcccatataagccctatttctacatcgcaacacgcaaaggctgtgaacgcgaagtatcatcatttcttagcaagaagtttcaaggtaaaatcgccaaagtcgagaccgtcccaaaagaagatttggacctgccgaaccacttggttggactcaagcgtaactacatcagattaagctttcacactgtggaagatttagtgaaagtgagaaaagaaatttctcctgccgtgaagaagaatcgggagcaagaccatgcctccgatgcttacaccgccttgctttccagcgtgcttcaacgcggcggagtgattacggacgaagaggaaactagcaagaaaattgcagatcagctggacaacatagtggatatgcgcgaatacgacgtgccttaccatattaggttatccatcgatctgaagattcatgtagcccattggtataacgtgaggtaccgcgggaacgccttccccgtggaaatcacacggcgcgatgatttggttgaacgcccagatccagtcgtactcgccttcgacatcgagaccacaaagctcccactgaaattccccgatgcagaaaccgaccagatcatgatgatttcctacatgatcgacggccaaggttatctgattactaatcgggaaattgtctctgaggatatcgaagacttcgaatttacacccaaacctgaatatgaaggtcccttttgcgttttcaatgaaccagacgaggcacacttaatccagagatggttcgaacacgtgcaagaaacaaagcccactattatggtcacttacaacggcgatttttttgattggccgtttgtcgaagcccgtgccgctgtgcacgggctgagtatgcagcaggagattgggtttcagaaggacagtcaaggtgagtacaaggctccacagtgtattcatatggactgtctccgctgggtcaagagggacagctacctgcccgtaggctctcataacttgaaggccgctgcaaaagccaaactgggatatgaccccgtcgagctggaccccgaggatatgtgcaggatggctaccgagcagcctcagaccctggcaacttatagcgtaagtgatgctgtggctacgtattatctgtatatgaagtacgtgcatccctttatatttgctctgtgcaccataattcctatggagccggatgaagtcttacgcaaaggatccgggacactttgtgaggccctgctgatggtgcaggcttttcacgctaatatcatcttcccaaacaagcaagaacaagaattcaacaaactgacagatgatggccacgtcctggacagtgaaacctatgtgggtggccatgttgaggccttggagagtggggtgtttcggtccgacattccatgccggttcaggatgaacccagctgcttttgacttcctgctacagagagtggagaagactcttaggcatgctcttgaggaagaggagaaggtacccgtagaacaagtgactaatttcgaggaagtgtgcgacgaaataaagtccaagcttgcatcgttaaaagatgtaccctcacgcatcgagtgccccctcatctaccatctcgatgtaggggctatgtatccaaacattatcttgacaaaccggctgcagccgtctgccatggtggacgaagccacctgcgctgcttgtgacttcaacaaaccgggggccaactgtcagaggaagatggcatggcagtggaggggtgagttcatgcctgctagcagatcggagtatcaccgcattcagcatcagcttgagtccgagaagttcccacccttattccccgaggggcccgcccgggcctttcatgagctatcccgagaggagcaggcgaagtacgagaagaggaggctggcggactactgccgcaaggcctacaagaagatccatatcaccaaggtcgaagagcggcttacaactatctgtcaaagggaaaactcattctatgttgacaccgtgagagcatttcgggaccggaggtacgaattcaagggactgcacaaggtttggaaaaaaaaactcagcgctgcggtagaagtgggcgatgcagctgaagtaaagcgctgtaaaaatatggaggttctgtatgactctctccagctggcacataagtgcatcctgaacagcttctacgggtatgtcatgcgtaagggagcccggtggtacagcatggaaatggccggaattgtctgttttaccggagctaatattataactcaggcccgcgaactcattgaacagatcggaagacccctcgagttagataccgatggtatctggtgtgttttgcctaactcattccccgagaacttcgtattcaagaccacaaacgtgaaaaagcccaaagttaccatatcctatcccggcgccatgctgaatattatggtcaaggagggattcaccaacgatcagtaccaggagctggcggagccatcctcactgacctacgtgacacgatccgaaaactccatcttttttgaggtggatggaccgtacctggcaatgattctaccggcctccaaagaggaagggaagaagctgaaaaagcgctatgccgtcttcaatgaagatggctctctggctgagctgaagggattcgaggtgaagcgccggggtgaacttcagctgatcaagatcttccagagttctgtcttcgaggctttcctgaaaggatctacactcgaagaggtgtatgggtctgtcgcgaaagtggccgattattggttagacgtgttgtattccaaggcagccaatatgcccgacagcgagctttttgaactgatcagcgaaaaccgctcaatgagtaggaagctggaggattacggcgagcagaagagtacttctatctccaccgccaaacgcctggccgagtttttgggcgaccagatggtgaaagacgccgggttaagttgcaggtacattatttctcgcaaacccgaaggatcgcctgtgactgagcgggcaatacccttagccatctttcaggcagagccgaccgtcagaaagcacttcctgcgcaagtggcttaagtcttcatctctccaagatttcgacattagggctatactcgactgggattattacattgagcgcctgggttccgcgattcagaagatcattacaatccctgcagcactgcagcaagttaagaatccagtccccagggtgaaacatcctgattggctccacaagaaactgctagaaaagaatgacgtgtataagcagaaaaaaatcagtgagctgtttacgttggaaggaaggagacaggtgaccatggccgaggcaagcgaggacagccctcgtccctcagccccagatatggaagactttggccttgtcaagcttccgcaccctgcggcacccgttaccgtcaaacggaagagagtgctttgggagtcgcaggaagagagtcaggatctgactccgactgttccgtggcaggaaatattgggtcagcctcctgctctaggcacctcccaggaggagtggctcgtctggcttaggtttcataagaaaaagtggcagttacaggccagacaaagacttgctaggaggaaaaggcaacgtttggagtcagcagagggagtgctcaggcctggcgccatcagggatggtccggccacaggtttagggtccttcctgcgaaggaccgctcgttcgattctggatctcccctggcagattgtgcagattagcgagacctctcaggcggggctgtttaggctctgggccctggtcggttcagacttacactgtataagactgagtattcctagggtattttacgtgaaccaacgcgtcgctaaagcggaagagggtgcatcctatagaaaggtgaatagggtgctgcccaggagtaatatggtctataacctgtacgaatacagtgtacctgaagacatgtaccaggaacacatcaatgagatcaatgcagagcttagtgctcctgacattgagggggtgtatgagacccaggttcccctgctgtttcgggccttagtccacttaggatgcgtgtgcgtggtaaacaagcagctggtcaggcatttgagtggctgggaggcagaaaccttcgctcttgagcatttagagatgcggtctcttgcccaattttcctatcttgagcccggtagtatccgacacatctatctttaccaccatgcccaggcacacaaggcgcttttcggtatcttcattccgagccaacgcagagcatctgtattcgtgcttgatacagtgcggtctaaccaaatgccgtctctcggagcactgtacagcgctgagcatggactgctgttagagaaagtaggacctgaattgctgccgccacccaagcataccttcgaagtccgggcggagactgacctgaaaacaatttgtcgtgccatccaacgatttctcttggcctataaggaggagcgaagggggcccactctgattgctgtgcagtctagttgggagttaaagaggctggcaagcgagatcccagtgctggaggagtttcccctggtaccgatttgtgttgctgacaaaatcaattatggcgtcctggattggcaacgccacggtgcgcgtcggatgatacggcattatctgaatctagacacatgcctgtcccaggcattcgagatgtccagatacttccacatacccatcggcaaccttcccgaggatatctctacgttcggctcggatctgttctttgccaggcatctgcaaagacataaccaccttttgtggctgagcccgacggcacggcctgacttgggaggaaaggaggcagacgacaattgtctcgtgatggaatttgacgatcaggctacagttgagattaatagcagcggctgctacagcacagtgtgcgttgagctagatcttcagaacctggccgtgaacaccatccttcagtctcaccacgtcaatgacatggagggagccgactctatgggtatcagctttgatgtcatccaacaggcctctctggaggacatgatcactggaggacaagccgcttccgcccctgcctcgtatgatgaaactgctttgtgcagcaacacctttagaatactgaaatctatggttgtgggatgggtgaaagagatcactcagtaccacaatatttacgccgacaaccaagtgatgcatttctatcggtggcttcgcagtccaagctccctgctgcatgatcccgccctgcatcgaactctacacaatatgatgaaaaagctgttcctgcagcttatcgctgagtttaagcgtttagggtccagtgtgatttacgctaattttaatcgaattatcttgtgtacgaagaagaggagagtggaagatgctattgcctatgtggagtatattacatcctcaattcattctaaggagacctttcacagcctgactatctcattcagccggtgttgggagttcttgctgtggatggatccgagtaactatgggggaatcaaaggaaaagttagctctcggatccactgcgggctacaagacagccaaaaggcagggggcgccgaagacgaacaagaaaatgaggacgacgaggaagaacgcgatggagaagaagaagaggaggctgaagagagcaatgtcgaagatcttttggaaaacaactggaacatcctgcagtttcttccccaggccgcttcctgtcaaaactacttcctgatgatagtatccgcttacattgtggccgtctaccattgtatgaaagacggattgagaagaagcgcgccagggagtactccagtgcgcaggcgcggagcatctcagctatcccaggaagctgagggcgccgtgggcgctctgccgggaatgattacattctcccaagactatgtggctaacgagcttacgcaatcattttttaccatcacacagaaaattcaaaaaaaggttaccggatcgcgtaattcgacagagctgtcagagatgtttcctgtcttgccaggcagccacctgctacttaacaaccctgcgctagagttcatcaagtacgtctgcaaagtgttgtcactggatactaacatcacaaaccaggtaaacaagttgaaccgggatctgcttaggctggttgatgttggagaattcagtgaagaagcccaatttcgcgatccatgccggagctatgtgctgccagaggttatttgccgcagctgtaacttctgccgcgatctggatttgtgcaaagactcaagctttagtgaagacggggctgtgctgcctcaatggctgtgttcaaactgtcaggcgccatacgatagttcggcaattgagatgactctggtggaggtgctccagaaaaaactgatggcttttactctgcaggatctcgtgtgtctgaagtgcagaggtgttaaggaaactagcatgcctgtttactgctcctgtgccggagatttcgcactgaccatccatacacaggtctttatggagcagatcggcatctttagaaacattgcccagcactacggtatgtcctacctgcttgagaccctggagtggctgctgcagaaaaacccccagcttggacattag

SEQ ID NO: 163063 - DNA, 771 bp, Artificial Sequence
  derived and/or modified sequence
atgtttcctgtgctgcccggcagccacctgctgctgaacaacccagccctggagttcatcaagtatgtgtgcaaggtgctgagcctggacaccaacatcaccaaccaggtgaacaagctgaacagagacctgctgcggctggtggatgtgggggagttcagcgaggaggcccagttccgggacccctgccgctcctatgtgctgcctgaggtgatctgccgcagctgcaacttctgccgggacctggacctgtgcaaggacagcagcttctctgaagatggagctgtgctgccccagtggctgtgcagcaactgccaggccccctatgacagcagcgccatcgagatgaccctggtggaggtgctgcagaagaagctgatggccttcaccctgcaggacctgaaggaggccgacacccccaagtgtgaggagaaggagaggaggaagcgggagctgcacagcagcgccaccggccgcagctgccgcggggccagcgagcagaggctgggagatgcccccagctgccgggtggtggtgcacggcgtgcaggcctgcaggatggagggcgtgtgcctgaagtgccggggcgtgaaggagacctccatgcctgtgtactgcagctgtgccggggactttgccctgaccatccacacccaggtgttcatggagcagatcggcatcttcagaaatattgcccagcactacggcatgagctacctgctggagaccctggagtggctgctgcagaagaacccccagctgggccactag

SEQ ID NO: 163064 - DNA, 6861 bp, Artificial Sequence
  derived and/or modified sequence
atgagcctgcggagcggcggcagaagaagagctgaccctggagcagatggagaggccagcagagatgatggagccaccagctctgtgtctgccctgaagaggctggagaggagccagtggacagacaagatggacctgcgcttcggctttgagcggctgaaggagcccggggagaagacaggctggctgatcaacatgcaccccacagagatcctggatgaggacaagaggctgggcagcgctgtggactactacttcatccaggatgatggcagccgcttcaaggtggccctgccctacaagccctacttctacatcgccaccaggaagggctgtgagcgggaggtgagcagcttcctgagcaagaagttccagggcaagatcgccaaggtggagaccgtgcccaaggaggacctggacctgcccaaccacctggtgggcctgaagaggaactacatccggctgtccttccacacagtggaggacctggtgaaggtgaggaaggagatcagccctgctgtgaagaagaaccgggagcaggaccacgccagtgatgcctacacagccctgctgagctctgtgctgcagagaggaggagtcatcacagatgaggaggagaccagcaagaagattgctgaccagctggacaacatcgtggacatgagagaatatgatgtgccctaccacatccggctgagcattgacctgaagatccacgtggcccactggtacaacgtgcgctacagaggaaatgccttccctgtggagatcaccaggagagatgacctggtggagaggccagaccctgtggtgctggcctttgacatcgagaccaccaagctgcccctgaagttcccagatgctgagacagaccagatcatgatgatctcctacatgattgatggccagggctacctgatcaccaaccgggagatcgtgtctgaagatattgaggactttgagttcacccccaagccagaatatgagggccccttctgtgtgttcaatgaaccagatgaggcccacctgatccagcgctggtttgagcacgtgcaggagaccaagcccaccatcatggtgacctacaatggagacttctttgactggccctttgtggaggcccgggctgctgtgcacggcctgtccatgcagcaggagatcggcttccagaaggacagccagggcgagtacaaggccccccagtgcatccacatggactgcctgcgctgggtgaagagggacagctacctgcctgtgggcagccacaacctgaaggctgctgccaaggccaagctgggctatgaccctgtggagctggaccctgaggacatgtgcaggatggccacagagcagccccagaccctggccacctacagcgtgtctgatgctgtggccacctactacctgtacatgaagtatgtgcaccccttcatctttgccctgtgcaccatcatccccatggagccagatgaggtgctgaggaaaggaagtggcaccctgtgtgaggccctgctgatggtgcaggccttccacgccaacatcatcttccccaacaagcaggagcaggagttcaacaagctgacagatgatggccacgtgctggacagcgagacctacgtgggcggccacgtggaggccctggagagcggggtcttcagaagtgacatcccctgccgcttcaggatgaacccagctgcctttgacttcctgctgcagagggtggagaagaccctgcggcatgccctggaggaggaggagaaggtgcctgtggagcaggtgaccaactttgaggaggtgtgtgatgagatcaagagcaagctggccagcctgaaggatgtgcccagcagaattgagtgccccctcatctaccacctggatgtgggcgccatgtaccccaacatcatcctgaccaaccggctgcagcccagcgccatggtggatgaggccacctgtgccgcctgtgacttcaacaagccaggggccaactgccagaggaagatggcctggcagtggagaggagagttcatgcctgccagccgctctgagtaccaccgcatccagcaccagctggagagcgagaagttccccccactcttccctgagggccctgcccgggccttccacgagctgagccgggaggagcaggccaagtatgagaagaggcggctggccgactactgcaggaaggcctacaagaagatccacatcaccaaggtggaggagcggctgaccaccatctgccagcgggagaacagcttctacgtggacacagtgcgggccttccgggaccggcgctatgagttcaagggcctgcacaaggtgtggaagaagaagctgtctgctgctgtggaggtgggagatgctgctgaggtgaagcgctgcaagaacatggaggtgctgtatgacagcctgcagctggcccacaagtgcatcctgaacagcttctacggctacgtgatgaggaagggggcccgctggtacagcatggagatggccggcatcgtgtgcttcaccggggccaacatcatcacccaggcccgggagctgattgagcagatcggccggcccctggagctggacacagatggcatctggtgtgtgctgcccaacagcttccctgagaactttgtgttcaagaccaccaacgtgaagaagcccaaggtgaccatctcctacccaggggccatgctgaacatcatggtgaaggagggcttcaccaatgaccagtaccaggagctggccgagcccagcagcctgacctacgtgaccaggtctgagaacagcatcttctttgaggtggatggcccctacctggccatgatcctgcctgccagcaaggaggagggcaagaagctgaagaagagatatgctgtgttcaatgaagatggcagcctggccgagctgaagggctttgaggtgaagagaagaggagagctgcagctgatcaagatcttccagagctctgtgtttgaggccttcctgaagggcagcaccctggaggaggtgtatggctctgtggccaaggtggccgactactggctggatgtgctgtacagcaaggccgccaacatgccagattctgagctgtttgagctgatcagtgaaaatagatccatgagcaggaagctggaggactatggagagcagaagagcaccagcatcagcacagccaagaggctggccgagttcctgggggaccagatggtgaaggatgctggcctgagctgccgctacatcatcagcaggaagccagagggcagccctgtgacagagcgggccatccccctggccatcttccaggccgagcccaccgtgaggaagcacttcctgaggaagtggctgaagagcagcagcctgcaggactttgacatccgggccatcctggactgggactactacatcgagcggctgggcagcgccatccagaagatcatcaccatcccagctgccctgcagcaggtgaagaaccctgtgccccgggtgaagcacccagactggctgcacaagaagctgctggagaagaatgatgtgtacaagcagaagaagatcagcgagctgttcaccctggagggccggcggcaggtgaccatggccgaggccagcgaggacagcccccggcccagcgccccagacatggaggactttggcctggtgaagctgccccaccctgctgcccctgtgacagtgaagaggaagagggtgctgtgggagagccaggaggagagccaggacctgacccccaccgtgccctggcaggagatcctgggccagcccccagccctgggcaccagccaggaggagtggctggtgtggctgcgcttccacaagaagaagtggcagctgcaggcccggcagaggctggcccggaggaagaggcagaggctggagagcgctgagggcgtgctgcggcctggggccatcagagatggccctgccaccggcctgggcagcttcctgcggaggacagcccggagcatcctggacctgccctggcagatcgtgcagatcagcgagaccagccaggccggcctcttccggctgtgggccctggtgggcagtgacctgcactgcatccggctgagcatccccagggtcttctacgtgaaccagagggtggccaaggccgaggagggcgccagctacaggaaggtgaacagagtgctgcccaggagcaacatggtgtacaacctgtatgagtacagcgtgcctgaggacatgtaccaggagcacatcaatgagatcaatgctgagctgagcgccccagacattgaaggagtgtatgagacccaggtgcccctgctcttccgggccctggtgcacctgggctgtgtgtgtgtggtgaacaagcagctggtgcgccacctgagcggctgggaggccgagacctttgccctggagcacctggagatgaggagcctggcccagttctcctacctggagcccggcagcatccgccacatctacctgtaccaccacgcccaggcccacaaggccctgtttggcatcttcatccccagccagaggcgggcctctgtgtttgtgctggacacagtgcgcagcaaccagatgcccagcctgggcgccctgtacagcgctgagcacggcctgctgctggagaaggtgggccctgagctgctgcccccacccaagcacacctttgaggtgcgggcagagacagacctgaagaccatctgccgggccatccagcgcttcctgctggcctacaaggaggagcggcggggccccaccctgattgctgtgcagagctcctgggagctgaagaggctggccagcgagatccctgtgctggaggagttccccctggtgcccatctgtgtggccgacaagatcaactatggagtgctggactggcagagacatggagcccggaggatgatccgccactacctgaacctggacacctgcctgagccaggcctttgagatgagccgctacttccacatccccatcggcaacctgcctgaggacatcagcacctttggaagtgacctcttctttgcccggcacctgcagaggcacaaccacctgctgtggctgagccccacagcccggccagacctgggcggcaaggaggctgatgacaactgcctggtgatggagtttgatgaccaggccaccgtggagatcaacagcagcggctgctacagcacagtgtgtgtggagctggacctgcagaacctggccgtgaacaccatcctgcagagccaccacgtgaatgacatggagggcgctgacagcatgggcatcagctttgatgtgatccagcaggccagcctggaggacatgatcactggaggccaggccgccagcgccccagccagctatgatgaaacagccctgtgcagcaacaccttccgcatcctgaagtccatggtggtgggctgggtgaaggagatcacccagtaccacaacatctatgctgacaaccaggtgatgcacttctaccgctggctgcggagccccagcagcctgctgcatgaccctgccctgcacaggaccctgcacaacatgatgaagaagctgttcctgcagctgattgctgagttcaagaggctgggcagcagcgtcatctatgccaacttcaaccgcatcatcctgtgcaccaagaagagaagagtggaggatgccatcgcctacgtggagtacatcaccagcagcatccacagcaaggagaccttccacagcctgaccatctccttcagccgctgctgggagttcctgctgtggatggaccccagcaactacggcggcatcaagggcaaggtgagcagccgcatccactgcggcctgcaggacagccagaaggccggcggcgcagaagatgagcaggagaatgaagatgatgaggaggagagagatggagaggaggaggaggaggccgaggagagcaatgtggaggacctgctggagaacaactggaacatcctgcagttcctgccccaggccgccagctgccagaactacttcctgatgattgtgtctgcctacatcgtggccgtgtaccactgcatgaaggatggcctgcggcgcagcgcccctggcagcacccctgtgagaagaagaggagccagccagctgagccaggaggccgagggcgctgtgggcgccctgcccggcatgatcaccttcagccaggactatgtggccaatgagctgacccagagcttcttcaccatcacccagaagatccagaagaaggtgacaggcagcaggaacagcacagagctgtctgagatgtttcctgtgctgcccggcagccacctgctgctgaacaacccagccctggagttcatcaagtatgtgtgcaaggtgctgagcctggacaccaacatcaccaaccaggtgaacaagctgaacagagacctgctgcggctggtggatgtgggggagttcagcgaggaggcccagttccgggacccctgccgctcctatgtgctgcctgaggtgatctgccgcagctgcaacttctgccgggacctggacctgtgcaaggacagcagcttctctgaagatggagctgtgctgccccagtggctgtgcagcaactgccaggccccctatgacagcagcgccatcgagatgaccctggtggaggtgctgcagaagaagctgatggccttcaccctgcaggacctggtgtgcctgaagtgccggggcgtgaaggagacctccatgcctgtgtactgcagctgtgccggggactttgccctgaccatccacacccaggtgttcatggagcagatcggcatcttcagaaatattgcccagcactacggcatgagctacctgctggagaccctggagtggctgctgcagaagaacccccagctgggccactag

SEQ ID NO: 163065 - DNA, 1491 bp, Artificial Sequence
  derived and/or modified sequence
atggagggcatcctgaagtccatggtggtgggctgggtgaaggagatcacccagtaccacaacatctatgctgacaaccaggtgatgcacttctaccgctggctgcggagccccagcagcctgctgcatgaccctgccctgcacaggaccctgcacaacatgatgaagaagctgttcctgcagctgattgctgagttcaagaggctgggcagcagcgtcatctatgccaacttcaaccgcatcatcctgtgcaccaagaagagaagagtggaggatgccatcgcctacgtggagtacatcaccagcagcatccacagcaaggagaccttccacagcctgaccatctccttcagccgctgctgggagttcctgctgtggatggaccccagcaactacggcggcatcaagggcaaggtgagcagccgcatccactgcggcctgcaggacagccagaaggccggcggcgcagaagatgagcaggagaatgaagatgatgaggaggagagagatggagaggaggaggaggaggccgaggagagcaatgtggaggacctgctggagaacaactggaacatcctgcagttcctgccccaggccgccagctgccagaactacttcctgatgattgtgtctgcctacatcgtggccgtgtaccactgcatgaaggatggcctgcggcgcagcgcccctggcagcacccctgtgagaagaagaggagccagccagctgagccaggaggccgagggcgctgtgggcgccctgcccggcatgatcaccttcagccaggactatgtggccaatgagctgacccagagcttcttcaccatcacccagaagatccagaagaaggtgacaggcagcaggaacagcacagagctgtctgagatgtttcctgtgctgcccggcagccacctgctgctgaacaacccagccctggagttcatcaagtatgtgtgcaaggtgctgagcctggacaccaacatcaccaaccaggtgaacaagctgaacagagacctgctgcggctggtggatgtgggggagttcagcgaggaggcccagttccgggacccctgccgctcctatgtgctgcctgaggtgatctgccgcagctgcaacttctgccgggacctggacctgtgcaaggacagcagcttctctgaagatggagctgtgctgccccagtggctgtgcagcaactgccaggccccctatgacagcagcgccatcgagatgaccctggtggaggtgctgcagaagaagctgatggccttcaccctgcaggacctggtgtgcctgaagtgccggggcgtgaaggagacctccatgcctgtgtactgcagctgtgccggggactttgccctgaccatccacacccaggtgttcatggagcagatcggcatcttcagaaatattgcccagcactacggcatgagctacctgctggagaccctggagtggctgctgcagaagaacccccagctgggccactag

SEQ ID NO: 163066 - DNA, 6894 bp, Artificial Sequence
  derived and/or modified sequence
atgagccggcccctgggcctgaagagcttccccaggcacaagcaggcccccctgcccctgagcctgaccttccacggctgcctgctgctgcggagagatgatggagccaccagctctgtgtctgccctgaagaggctggagaggagccagtggacagacaagatggacctgcgctttggatttgagcggctgaaggagcctggagagaagacaggctggctgatcaacatgcaccccacagagatcctggatgaggacaagaggctgggcagcgctgtggactactacttcatccaggatgatggcagccgcttcaaggtggccctgccctacaagccctacttctacatcgccaccaggaagggctgtgagcgggaggtgtcctccttcctgagcaagaagttccagggcaagatcgccaaggtggagaccgtgcccaaggaggacctggacctgcccaaccacctggtgggcctgaagaggaactacatccggctgtccttccacacagtggaggacctggtgaaggtgaggaaggagatcagccctgctgtgaagaagaaccgggagcaggaccacgccagtgatgcctacacagccctgctgagctctgtgctgcagagaggaggagtcatcacagatgaggaggagaccagcaagaagattgctgaccagctggacaacatcgtggacatgagagaatatgatgtgccctaccacatccggctgagcattgacctgaagatccacgtggcccactggtacaacgtgcgctacagaggaaatgccttccctgtggagatcaccaggagagatgacctggtggagaggccagaccctgtggtgctggcctttgatattgagaccaccaagctgcccctgaagttcccagatgctgagacagaccagatcatgatgatctcctacatgattgatggccagggctacctgatcaccaaccgggagatcgtgtctgaggacattgaagattttgagttcacccccaagccagaatatgagggccccttctgtgtgttcaatgaaccagatgaggcccacctgatccagcgctggtttgaacatgtgcaggagaccaagcccaccatcatggtgacctacaacggggacttctttgactggccctttgtggaggcccgggctgctgtgcacggcctgtccatgcagcaggagatcggcttccagaaggacagccagggcgagtacaaggccccccagtgcatccacatggactgcctgcgctgggtgaagagggacagctacctgcctgtgggcagccacaacctgaaggccgccgccaaggccaagctgggctatgaccctgtggagctggaccctgaggacatgtgcaggatggccacagagcagccccagaccctggccacctacagcgtgtctgatgctgtggccacctactacctgtacatgaagtatgtgcaccccttcatctttgccctgtgcaccatcatccccatggagccagatgaggtgctgaggaagggcagcggcaccctgtgtgaggccctgctgatggtgcaggccttccacgccaacatcatcttccccaacaagcaggagcaggagttcaacaagctgacagatgatggccacgtgctggacagcgagacctacgtgggcggccacgtggaggccctggagagcggggtcttcagaagtgacatcccctgccgcttcaggatgaacccagctgcctttgacttcctgctgcagagggtggagaagaccctgcggcatgccctggaggaggaggagaaggtgcctgtggagcaggtgaccaactttgaggaggtgtgtgatgagatcaagagcaagctggccagcctgaaggatgtgcccagcagaattgaatgtcccctcatctaccacctggatgtgggcgccatgtaccccaacatcatcctgaccaaccggctgcagcccagcgccatggtggatgaggccacctgtgccgcctgtgacttcaacaagccaggggccaactgccagaggaagatggcctggcagtggagaggagagttcatgcctgccagccgctctgagtaccaccgcatccagcaccagctggagagcgagaagtttcctcctctcttccctgagggccctgcccgggccttccacgagctgagccgggaggagcaggccaagtatgagaagaggcggctggccgactactgcaggaaggcctacaagaagatccacatcaccaaggtggaggagcggctgaccaccatctgccagagagaaaattccttctacgtggacacagtgcgggccttccgggacagaagatatgagttcaagggcctgcacaaggtgtggaagaagaagctgtctgctgctgtggaggtgggagatgctgctgaggtgaagcgctgcaagaacatggaggtgctgtatgacagcctgcagctggcccacaagtgcatcctgaacagcttctacggctacgtgatgaggaaaggagcccgctggtacagcatggagatggccggcatcgtgtgcttcaccggggccaacatcatcacccaggcccgggagctgattgagcagatcggccggcccctggagctggacacagatggcatctggtgtgtgctgcccaacagcttcccagaaaattttgtgttcaagaccaccaacgtgaagaagcccaaggtgaccatctcctacccaggggccatgctgaacatcatggtgaaggagggcttcaccaatgaccagtaccaggagctggccgagcccagcagcctgacctacgtgaccaggagtgaaaattccatcttctttgaggtggatggcccctacctggccatgatcctgcctgccagcaaggaggagggcaagaagctgaagaagagatatgctgtgttcaatgaagatggcagcctggccgagctgaagggctttgaggtgaagagaagaggagagctgcagctgatcaagatcttccagagctctgtgtttgaggccttcctgaagggcagcaccctggaggaggtgtatggctctgtggccaaggtggccgactactggctggatgtgctgtacagcaaggccgccaacatgccagacagcgagctgtttgagctgatcagcgagaacagatccatgagcaggaagctggaggactatggagagcagaagagcaccagcatcagcacagccaagaggctggccgagttcctgggggaccagatggtgaaggatgctggcctgagctgccgctacatcatcagcaggaagccagagggcagccctgtgacagagcgggccatccccctggccatcttccaggccgagcccaccgtgaggaagcacttcctgaggaagtggctgaagagcagcagcctgcaggactttgacatccgggccatcctggactgggactactacatcgagcggctgggcagcgccatccagaagatcatcaccatcccagctgccctgcagcaggtgaagaaccctgtgccccgggtgaagcacccagactggctgcacaagaagctgctggagaagaatgatgtgtacaagcagaagaagatcagcgagctgttcaccctggagggccggcggcaggtgaccatggccgaggccagcgaggacagcccccggcccagcgccccagacatggaggactttggcctggtgaagctgccccaccctgctgcccctgtgacagtgaagaggaagagggtgctgtgggagagccaggaggagagccaggacctgacccccaccgtgccctggcaggagatcctgggccagcccccagccctgggcaccagccaggaggagtggctggtgtggctgcgcttccacaagaagaagtggcagctgcaggcccggcagaggctggcccggaggaagaggcagaggctggagagcgctgagggcgtgctgcggcctggggccatcagagatggccctgccaccggcctgggcagcttcctgcggaggacagcccggagcatcctggacctgccctggcagatcgtgcagatcagcgagaccagccaggccggcctcttccggctgtgggccctggtgggcagtgacctgcactgcatccggctgagcatccccagggtcttctacgtgaaccagagggtggccaaggccgaggagggcgccagctacaggaaggtgaacagagtgctgcccaggagcaacatggtgtacaacctgtatgagtacagcgtgcctgaggacatgtaccaggagcacatcaatgagatcaatgctgagctgagcgccccagacatcgagggcgtgtatgagacccaggtgcccctgctcttccgggccctggtgcacctgggctgtgtgtgtgtggtgaacaagcagctggtgcgccacctgagcggctgggaggccgagacctttgccctggagcacctggagatgaggagcctggcccagttctcctacctggagcccggcagcatccgccacatctacctgtaccaccacgcccaggcccacaaggccctgtttggcatcttcatccccagccagaggcgggcctctgtgtttgtgctggacacagtgcgcagcaaccagatgcccagcctgggcgccctgtacagcgctgagcacggcctgctgctggagaaggtgggccctgagctgctgcccccacccaagcacacctttgaggtgcgggcagagacagacctgaagaccatctgccgggccatccagcgcttcctgctggcctacaaggaggagcggcggggccccaccctgattgctgtgcagagctcctgggagctgaagaggctggccagcgagatccctgtgctggaggagttccccctggtgcccatctgtgtggccgacaagatcaactacggcgtgctggactggcagagacatggagcccggaggatgatccgccactacctgaacctggacacctgcctgagccaggcctttgagatgagccgctacttccacatccccatcggcaacctgcctgaggacatcagcaccttcggcagtgacctcttctttgcccggcacctgcagaggcacaaccacctgctgtggctgagccccacagcccggccagacctgggcggcaaggaggctgatgacaactgcctggtgatggagtttgatgaccaggccaccgtggagatcaacagcagcggctgctacagcacagtgtgtgtggagctggacctgcagaacctggccgtgaacaccatcctgcagagccaccacgtgaatgacatggagggcgctgacagcatgggcatcagctttgatgtgatccagcaggccagcctggaggacatgatcaccggcggccaggccgccagcgccccagccagctatgatgaaacagccctgtgcagcaacaccttccgcatcctgaagtccatggtggtgggctgggtgaaggagatcacccagtaccacaacatctatgctgacaaccaggtgatgcacttctaccgctggctgcggagccccagcagcctgctgcatgaccctgccctgcacaggaccctgcacaacatgatgaagaagctgttcctgcagctgattgctgagttcaagaggctgggcagcagcgtcatctatgccaacttcaaccgcatcatcctgtgcaccaagaagagaagagtggaggatgccatcgcctacgtggagtacatcaccagcagcatccacagcaaggagaccttccacagcctgaccatctccttcagccgctgctgggagttcctgctgtggatggaccccagcaactatggaggcatcaagggcaaggtgagcagccgcatccactgcggcctgcaggacagccagaaggccggcggcgcagaagatgagcaggagaatgaagatgatgaggaggagagagatggagaggaggaggaggaggccgaggagagcaatgtggaggacctgctggagaacaactggaacatcctgcagttcctgccccaggccgccagctgccagaactacttcctgatgattgtgtctgcctacatcgtggccgtgtaccactgcatgaaggatggcctgcggcgcagcgcccctggcagcacccctgtgagaagaagaggagccagccagctgagccaggaggccgagggcgctgtgggcgccctgcccggcatgatcaccttcagccaggactatgtggccaatgagctgacccagagcttcttcaccatcacccagaagatccagaagaaggtgacaggcagcaggaacagcacagagctgtctgagatgtttcctgtgctgcccggcagccacctgctgctgaacaacccagccctggagttcatcaagtatgtgtgcaaggtgctgagcctggacaccaacatcaccaaccaggtgaacaagctgaacagagacctgctgcggctggtggatgtgggggagttcagcgaggaggcccagttccgggacccctgccgctcctatgtgctgcctgaggtgatctgccgcagctgcaacttctgccgggacctggacctgtgcaaggacagcagcttctctgaagatggagctgtgctgccccagtggctgtgcagcaactgccaggccccctatgacagcagcgccatcgagatgaccctggtggaggtgctgcagaagaagctgatggccttcaccctgcaggacctggtgtgcctgaagtgccggggcgtgaaggagacctccatgcctgtgtactgcagctgtgccggggactttgccctgaccatccacacccaggtgttcatggagcagatcggcatcttcaggaacatcgcccagcactacggcatgagctacctgctggagaccctggagtggctgctgcagaagaacccccagctgggccactag

SEQ ID NO: 163067 - DNA, 6780 bp, Artificial Sequence
  derived and/or modified sequence
atgagcctgcggagcggcggcagaagaagagctgaccctggagcagatggagaggccagcagagatgatggagccaccagctctgtgtctgccctgaagaggctggagaggagccagtggacagacaagatggacctgcgcttcggctttgagcggctgaaggagcccggggagaagacaggctggctgatcaacatgcaccctgtggccctgccctacaagccctacttctacatcgccaccaggaagggctgtgagcgggaggtgtcctccttcctgagcaagaagttccagggcaagatcgccaaggtggagaccgtgcccaaggaggacctggacctgcccaaccacctggtgggcctgaagaggaactacatccggctgtccttccacacagtggaggacctggtgaaggtgaggaaggagatcagccctgctgtgaagaagaaccgggagcaggaccacgccagtgatgcctacacagccctgctgagctctgtgctgcagagaggaggagtcatcacagatgaggaggagaccagcaagaagattgctgaccagctggacaacatcgtggacatgagagaatatgatgtgccctaccacatccggctgagcattgacctgaagatccacgtggcccactggtacaacgtgcgctacagaggaaatgccttccctgtggagatcaccaggagagatgacctggtggagaggccagaccctgtggtgctggcctttgatattgagaccaccaagctgcccctgaagttcccagatgctgagacagaccagatcatgatgatctcctacatgattgatggccagggctacctgatcaccaaccgggagatcgtgtctgaggacattgaagattttgagttcacccccaagccagaatatgagggccccttctgtgtgttcaatgaaccagatgaggcccacctgatccagcgctggtttgaacatgtgcaggagaccaagcccaccatcatggtgacctacaacggggacttctttgactggccctttgtggaggcccgggctgctgtgcacggcctgtccatgcagcaggagatcggcttccagaaggacagccagggcgagtacaaggccccccagtgcatccacatggactgcctgcgctgggtgaagagggacagctacctgcctgtgggcagccacaacctgaaggccgccgccaaggccaagctgggctatgaccctgtggagctggaccctgaggacatgtgcaggatggccacagagcagccccagaccctggccacctacagcgtgtctgatgctgtggccacctactacctgtacatgaagtatgtgcaccccttcatctttgccctgtgcaccatcatccccatggagccagatgaggtgctgaggaagggcagcggcaccctgtgtgaggccctgctgatggtgcaggccttccacgccaacatcatcttccccaacaagcaggagcaggagttcaacaagctgacagatgatggccacgtgctggacagcgagacctacgtgggcggccacgtggaggccctggagagcggggtcttcagaagtgacatcccctgccgcttcaggatgaacccagctgcctttgacttcctgctgcagagggtggagaagaccctgcggcatgccctggaggaggaggagaaggtgcctgtggagcaggtgaccaactttgaggaggtgtgtgatgagatcaagagcaagctggccagcctgaaggatgtgcccagcagaattgaatgtcccctcatctaccacctggatgtgggcgccatgtaccccaacatcatcctgaccaaccggctgcagcccagcgccatggtggatgaggccacctgtgccgcctgtgacttcaacaagccaggggccaactgccagaggaagatggcctggcagtggagaggagagttcatgcctgccagccgctctgagtaccaccgcatccagcaccagctggagagcgagaagtttcctcctctcttccctgagggccctgcccgggccttccacgagctgagccgggaggagcaggccaagtatgagaagaggcggctggccgactactgcaggaaggcctacaagaagatccacatcaccaaggtggaggagcggctgaccaccatctgccagagagaaaattccttctacgtggacacagtgcgggccttccgggacagaagatatgagttcaagggcctgcacaaggtgtggaagaagaagctgtctgctgctgtggaggtgggagatgctgctgaggtgaagcgctgcaagaacatggaggtgctgtatgacagcctgcagctggcccacaagtgcatcctgaacagcttctacggctacgtgatgaggaaaggagcccgctggtacagcatggagatggccggcatcgtgtgcttcaccggggccaacatcatcacccaggcccgggagctgattgagcagatcggccggcccctggagctggacacagatggcatctggtgtgtgctgcccaacagcttcccagaaaattttgtgttcaagaccaccaacgtgaagaagcccaaggtgaccatctcctacccaggggccatgctgaacatcatggtgaaggagggcttcaccaatgaccagtaccaggagctggccgagcccagcagcctgacctacgtgaccaggagtgaaaattccatcttctttgaggtggatggcccctacctggccatgatcctgcctgccagcaaggaggagggcaagaagctgaagaagagatatgctgtgttcaatgaagatggcagcctggccgagctgaagggctttgaggtgaagagaagaggagagctgcagctgatcaagatcttccagagctctgtgtttgaggccttcctgaagggcagcaccctggaggaggtgtatggctctgtggccaaggtggccgactactggctggatgtgctgtacagcaaggccgccaacatgccagacagcgagctgtttgagctgatcagcgagaacagatccatgagcaggaagctggaggactatggagagcagaagagcaccagcatcagcacagccaagaggctggccgagttcctgggggaccagatggtgaaggatgctggcctgagctgccgctacatcatcagcaggaagccagagggcagccctgtgacagagcgggccatccccctggccatcttccaggccgagcccaccgtgaggaagcacttcctgaggaagtggctgaagagcagcagcctgcaggactttgacatccgggccatcctggactgggactactacatcgagcggctgggcagcgccatccagaagatcatcaccatcccagctgccctgcagcaggtgaagaaccctgtgccccgggtgaagcacccagactggctgcacaagaagctgctggagaagaatgatgtgtacaagcagaagaagatcagcgagctgttcaccctggagggccggcggcaggtgaccatggccgaggccagcgaggacagcccccggcccagcgccccagacatggaggactttggcctggtgaagctgccccaccctgctgcccctgtgacagtgaagaggaagagggtgctgtgggagagccaggaggagagccaggacctgacccccaccgtgccctggcaggagatcctgggccagcccccagccctgggcaccagccaggaggagtggctggtgtggctgcgcttccacaagaagaagtggcagctgcaggcccggcagaggctggcccggaggaagaggcagaggctggagagcgctgagggcgtgctgcggcctggggccatcagagatggccctgccaccggcctgggcagcttcctgcggaggacagcccggagcatcctggacctgccctggcagatcgtgcagatcagcgagaccagccaggccggcctcttccggctgtgggccctggtgggcagtgacctgcactgcatccggctgagcatccccagggtcttctacgtgaaccagagggtggccaaggccgaggagggcgccagctacaggaaggtgaacagagtgctgcccaggagcaacatggtgtacaacctgtatgagtacagcgtgcctgaggacatgtaccaggagcacatcaatgagatcaatgctgagctgagcgccccagacatcgagggcgtgtatgagacccaggtgcccctgctcttccgggccctggtgcacctgggctgtgtgtgtgtggtgaacaagcagctggtgcgccacctgagcggctgggaggccgagacctttgccctggagcacctggagatgaggagcctggcccagttctcctacctggagcccggcagcatccgccacatctacctgtaccaccacgcccaggcccacaaggccctgtttggcatcttcatccccagccagaggcgggcctctgtgtttgtgctggacacagtgcgcagcaaccagatgcccagcctgggcgccctgtacagcgctgagcacggcctgctgctggagaaggtgggccctgagctgctgcccccacccaagcacacctttgaggtgcgggcagagacagacctgaagaccatctgccgggccatccagcgcttcctgctggcctacaaggaggagcggcggggccccaccctgattgctgtgcagagctcctgggagctgaagaggctggccagcgagatccctgtgctggaggagttccccctggtgcccatctgtgtggccgacaagatcaactacggcgtgctggactggcagagacatggagcccggaggatgatccgccactacctgaacctggacacctgcctgagccaggcctttgagatgagccgctacttccacatccccatcggcaacctgcctgaggacatcagcaccttcggcagtgacctcttctttgcccggcacctgcagaggcacaaccacctgctgtggctgagccccacagcccggccagacctgggcggcaaggaggctgatgacaactgcctggtgatggagtttgatgaccaggccaccgtggagatcaacagcagcggctgctacagcacagtgtgtgtggagctggacctgcagaacctggccgtgaacaccatcctgcagagccaccacgtgaatgacatggagggcgctgacagcatgggcatcagctttgatgtgatccagcaggccagcctggaggacatgatcaccggcggccaggccgccagcgccccagccagctatgatgaaacagccctgtgcagcaacaccttccgcatcctgaagtccatggtggtgggctgggtgaaggagatcacccagtaccacaacatctatgctgacaaccaggtgatgcacttctaccgctggctgcggagccccagcagcctgctgcatgaccctgccctgcacaggaccctgcacaacatgatgaagaagctgttcctgcagctgattgctgagttcaagaggctgggcagcagcgtcatctatgccaacttcaaccgcatcatcctgtgcaccaagaagagaagagtggaggatgccatcgcctacgtggagtacatcaccagcagcatccacagcaaggagaccttccacagcctgaccatctccttcagccgctgctgggagttcctgctgtggatggaccccagcaactatggaggcatcaagggcaaggtgagcagccgcatccactgcggcctgcaggacagccagaaggccggcggcgcagaagatgagcaggagaatgaagatgatgaggaggagagagatggagaggaggaggaggaggccgaggagagcaatgtggaggacctgctggagaacaactggaacatcctgcagttcctgccccaggccgccagctgccagaactacttcctgatgattgtgtctgcctacatcgtggccgtgtaccactgcatgaaggatggcctgcggcgcagcgcccctggcagcacccctgtgagaagaagaggagccagccagctgagccaggaggccgagggcgctgtgggcgccctgcccggcatgatcaccttcagccaggactatgtggccaatgagctgacccagagcttcttcaccatcacccagaagatccagaagaaggtgacaggcagcaggaacagcacagagctgtctgagatgtttcctgtgctgcccggcagccacctgctgctgaacaacccagccctggagttcatcaagtatgtgtgcaaggtgctgagcctggacaccaacatcaccaaccaggtgaacaagctgaacagagacctgctgcggctggtggatgtgggggagttcagcgaggaggcccagttccgggacccctgccgctcctatgtgctgcctgaggtgatctgccgcagctgcaacttctgccgggacctggacctgtgcaaggacagcagcttctctgaagatggagctgtgctgccccagtggctgtgcagcaactgccaggccccctatgacagcagcgccatcgagatgaccctggtggaggtgctgcagaagaagctgatggccttcaccctgcaggacctggtgtgcctgaagtgccggggcgtgaaggagacctccatgcctgtgtactgcagctgtgccggggactttgccctgaccatccacacccaggtgttcatggagcagatcggcatcttcaggaacatcgcccagcactacggcatgagctacctgctggagaccctggagtggctgctgcagaagaacccccagctgggccactag

SEQ ID NO: 163068 - DNA, 771 bp, Artificial Sequence
  derived and/or modified sequence
atgttccccgtgctgcccggcagccacctgctgctgaacaaccccgctctcgagttcattaaatatgtgtgcaaagttttgagcctggacaccaacataaccaatcaagtaaataagctgaaccgcgacctgcttcgtctcgttgacgtaggcgaattcagtgaggaggcccagtttagagacccctgtcggagttacgtccttccagaggtgatctgcaggtcttgcaacttttgccgagacctggacttgtgtaaggatagctcattctccgaggacggggccgtgttgccccagtggctgtgttcaaactgtcaagcaccatatgatagtagtgctattgagatgaccctggtagaggtgctccagaagaaactgatggctttcaccctgcaggatctgaaggaggctgacacacctaaatgcgaagaaaaggaaagacggaagcgtgagcttcacagtagcgccactggcagatcgtgtcggggggcgtcagaacaacgcctaggagatgccccttcctgcagagtagttgtgcatggtgttcaggcctgcagaatggaaggcgtctgtctgaaatgtcgcggagtgaaagagactagcatgcctgtttattgcagttgtgccggagatttcgctctgactatacacactcaggtgtttatggaacagatcgggatctttcgtaatattgctcagcactatggaatgtcctatctgctggaaaccctcgagtggttactgcagaagaatcctcaactcggacactag

SEQ ID NO: 163069 - DNA, 6861 bp, Artificial Sequence
  derived and/or modified sequence
atgagcctgcggagcggcggccggcggcgggccgaccccggcgccgacggcgaggcctctagggacgacggagctaccagttctgtgtccgctttgaaacgcctggaaaggtcccaatggactgacaaaatggacctgagattcggcttcgaacgactcaaggagcctggtgagaaaacaggatggcttattaatatgcacccaaccgaaattctcgatgaggataagaggttagggagcgccgtggactactacttcatccaggatgacggctccagatttaaagtcgctctgccttacaagccttacttctatatcgccacccgaaagggttgtgaacgtgaagtatcttctttcctcagcaagaagttccaggggaagattgccaaagttgagactgtaccaaaggaggatctcgatctgccaaatcaccttgtcggcctgaagcgcaactacatcagactctcctttcatactgtagaagacttggtcaaagtgcgcaaagagatatcaccagcggtcaaaaagaatcgagagcaggaccatgcttccgacgcttacaccgccctcctctcctcagtgttgcagcgggggggtgtgattactgatgaagaagagactagcaaaaaaatcgcagatcaactggacaatatcgtagatatgcgcgagtacgatgtcccataccatattcgattgagcattgacttgaaaatccatgtggcccactggtacaatgtgcggtatcgggggaatgctttccctgtcgaaatcaccaggcgggatgacctcgtggaacgccccgatcctgtggtgctggctttcgatatcgagacaacgaaattgccactcaaattcccagatgcagaaactgaccaaatcatgatgataagctatatgatcgacgggcagggttacctcatcacaaatagggagatcgtgtccgaggatatcgaggacttcgagttcacccctaagccagaatatgaggggccattctgcgtgttcaacgagccggatgaagcccatcttatccagaggtggttcgagcacgtccaggagactaaacccactattatggtcacctacaacggtgatttctttgactggccctttgtggaagcccgggccgccgtgcatggattgtccatgcaacaggaaattggattccaaaaagactctcagggagaatataaggcgccacaatgcatacatatggattgcctcaggtgggtgaaacgcgatagctacctgcccgtgggctcccataatctcaaagcggctgcaaaggccaagctaggctacgatcctgtggagctggatccagaggatatgtgtaggatggctaccgaacagccacagaccctggctacatacagcgtttctgacgccgtcgccacctattatctatacatgaaatatgtccatcccttcatctttgccctgtgtactataattccaatggagccagacgaagttttgcggaagggctccggcactctgtgtgaggcgctgctcatggtgcaagctttccatgccaacattattttccctaataagcaagagcaggagttcaacaaactgaccgatgacggtcacgtgctggactctgaaacctatgtgggtggtcacgtagaggccttagagtcaggagttttcaggtctgacatcccatgccgcttccggatgaacccagctgcatttgattttctgctacagcgagtggagaagaccctccgtcacgcactggaggaggaggagaaggtgcctgtggaacaagtcacgaatttcgaggaggtttgcgatgagataaaatcaaagctggcaagcctgaaggatgtaccctctcggattgagtgtcccctaatctatcatctcgacgttggagccatgtaccccaacatcatcctgacaaaccgcctgcagccctcagcaatggtggatgaggccacgtgcgccgcatgtgacttcaacaagcccggagcaaattgccagcgcaagatggcctggcagtggcgtggagagtttatgcccgcatctaggagtgagtaccaccgaattcagcaccagttggagtccgagaagttcccccccctcttccccgaagggccagctagagcatttcatgagctgtccagggaggagcaggcaaaatacgaaaaaaggagactggcggactattgtaggaaggcttataagaagatacacattacgaaggtcgaggagagactcactaccatctgccaacgcgagaattctttctatgtggataccgtacgagcatttagagacagaagatatgagttcaagggcctacacaaggtctggaagaagaagctctccgctgccgtggaagttggcgatgcggctgaagtgaagcgctgtaagaacatggaagtgctctacgacagtctccagctagcacataagtgcatccttaactccttctatggctatgtaatgaggaaaggagcccggtggtactctatggagatggccggcatcgtgtgcttcaccggggcaaacattataacgcaggccagagagctcattgagcagattggtaggccattggagctagacactgatggcatctggtgtgtgctgccaaactccttccctgaaaattttgtgttcaagacgacaaacgtcaaaaaacccaaggttacgatatcgtaccccggggctatgcttaacatcatggtgaaggagggtttcaccaatgaccagtaccaggaattggcggaaccctcctcgctcacttacgtcactagaagcgagaattctatatttttcgaggtcgacggaccctacctagccatgatcctcccggcatcaaaggaggagggaaaaaagctcaagaagcggtatgccgttttcaacgaagatggttctctggctgagctgaaggggtttgaggtgaaaagacggggtgagcttcagttaatcaagatctttcagagcagtgtctttgaagccttcctgaagggaagtacactggaggaggtttacggcagcgtcgccaaggtagccgactactggctggacgtgctctactctaaagcggccaacatgccagactccgaactctttgagcttataagcgaaaacaggtccatgagccgaaagctggaggactatggagaacagaagtccactagcatcagcactgctaaacgcttggcagagttcctcggagatcaaatggtgaaggacgccgggctctcctgccggtacatcatctctaggaagcctgaaggcagtcctgtaacagagcgagctatcccactggcaattttccaggccgagcccacagtgcggaagcacttcttgcgtaaatggttgaaatcttcatcgcttcaggacttcgacatccgcgctatcctcgactgggattattatattgagagactgggcagcgccattcaaaagataatcacaatccccgcagctctccaacaggtgaagaatccggtgccccgtgttaaacaccctgactggcttcacaagaagctgttagagaagaatgacgtgtacaaacagaagaaaattagcgagttgttcaccctcgaaggtcgcaggcaagttaccatggccgaggcctcagaggattcccccaggccgtcagccccagacatggaagattttggcctggtgaagttgcctcaccccgccgccccagtgaccgtgaagcgaaagcgtgttttgtgggagagccaggaggaatcccaggaccttacacccaccgtaccctggcaggaaattctggggcaacccccagccttgggcacttcccaggaagaatggctggtttggctgaggttccacaaaaaaaagtggcagctacaggctcggcaacgactcgcacgacgcaagagacagagactggagtctgccgagggagtacttcgtccgggtgctattcgcgacggccccgcaacgggcttggggtcatttcttaggcgtaccgctcggtctatccttgaccttccttggcagattgtgcagatttcagagacctcccaagcgggactattccggctgtgggctctggtggggagtgatctacattgtataaggctttctattcctcgggtcttctacgttaaccagagagtggctaaggctgaggaaggggcttcgtatcgaaaggttaaccgcgtactgccgcgcagtaacatggtatataatctttatgaatatagcgttcctgaagacatgtaccaagaacatatcaatgagataaatgcggagctctctgcgcctgatatcgaaggtgtctatgaaacccaagtgccgctgctgtttcgggccctcgttcacctgggatgcgtgtgcgtcgtaaataagcagcttgttcgacacctctcagggtgggaggccgagactttcgccctggaacacttggagatgagaagcttggcccagttctcctacctagaacccggcagtatccgccatatttacttgtaccaccatgcacaggcccataaggctttgttcggcatttttatcccaagccagcgacgggccagcgtatttgtcctagatacggtccgaagtaatcagatgccatcgctgggcgccctttattccgctgagcacggtttgctgttggaaaaagttggaccagaactgctgccgcccccgaagcatacctttgaagtcagggccgagactgatctcaaaacgatctgtagggccatccagagattcttgctggcttataaggaggaacgaagaggcccaacactgattgccgtccaaagctcttgggagcttaagagactggcgtcagaaattccagtcttagaggagttccctcttgtgccaatatgtgttgcagacaagataaattacggggtactggactggcagcggcatggggcccgccgaatgatccggcattacttaaatctagacacatgtctgtcccaggcattcgagatgtcccgctattttcatattcctattggcaatctcccagaggacatcagtacattcggttccgatctttttttcgcgcgacatcttcagaggcataatcaccttctatggttgagtccaaccgctagacctgacttgggtggcaaagaagctgatgacaactgtctggtgatggagttcgatgaccaggctacagtcgagattaactcatcaggatgctatagcaccgtctgtgtggagctcgacctgcagaatctggccgtgaacactattctgcagagtcaccatgtgaatgacatggagggcgcagattctatgggtatttcttttgacgtgattcagcaagcatcgctcgaagacatgattaccggtggacaggcagcctctgctcccgcttcttacgacgagacagcactgtgcagtaatactttccggatcctgaaatcaatggtggttggctgggtaaaagagattacacagtaccacaacatttatgccgataaccaggtgatgcatttttacagatggctgaggtctcctagcagtttactgcatgaccccgcgcttcatcgaacactccacaacatgatgaagaaactgtttcttcagctaattgccgaattcaagaggctgggcagttctgtgatttatgccaattttaatcggattattctatgcaccaagaagagacgggtggaggatgccattgcatacgtggagtatatcacaagctcgattcactccaaagagactttccactctttgacgattagcttttctcgctgctgggaatttctgctgtggatggatccctcaaattacggcggaatcaaaggtaaggtgtcctcaaggatccactgtgggctccaagactcgcagaaagcaggaggagccgaagacgaacaagagaatgaggacgacgaggaagaacgagacggagaggaggaggaagaagctgaggagagcaacgtggaagatttactggaaaacaactggaatatcttgcagtttcttccacaggccgcctcctgccagaattatttcctgatgatcgtcagtgcctatatcgtggcagtttaccactgtatgaaagacggcctgcgcaggtcggccccaggctcgactcccgtaaggcgccgtggtgctagccagctgtctcaggaggcagaaggggcagttggagcactgccaggaatgataacctttagtcaggattacgtagcgaatgagctgacccaaagctttttcaccattactcagaagatacagaaaaaagtaacaggttccaggaatagcacagaactatccgaaatgtttccagtgcttcctgggagccacctgctcctcaacaacccggctctggagttcattaagtacgtctgcaaagtgctaagcttggataccaacattacgaaccaggttaacaaattaaatcgcgatctgttgcggttagtagatgtgggagagttctctgaggaggcacagtttcgagacccctgcagatcgtatgtcctgccagaagtcatctgccggtcgtgcaacttctgtagggaccttgacctgtgcaaagactccagttttagcgaggatggtgccgtgctgccccagtggctgtgtagtaattgccaggcaccgtacgacagtagcgccattgagatgacattagttgaggtgctgcagaagaaactcatggccttcacactccaggacttagtgtgtctgaaatgtagaggagtgaaagagaccagtatgccagtgtattgttcgtgtgcgggtgacttcgcactaaccatacatacccaggtgttcatggagcaaataggtatattccgtaatatcgctcagcattacggcatgagttatctcctggaaaccctggagtggctcttgcagaaaaatccacagttaggccattag

SEQ ID NO: 163070 - DNA, 1491 bp, Artificial Sequence
  derived and/or modified sequence
atggagggcatcctgaagagcatggtggtgggctgggtgaaggagattacccaatatcacaacatttacgccgacaatcaggtgatgcacttttaccgctggctcagatctccgtccagtctcctgcacgacccagccctccaccgcacactacacaacatgatgaagaagttgtttctgcagttgattgctgagttcaaaaggcttggatcatctgttatatatgcgaattttaaccggatcatcctctgtactaagaaacgaagggtggaagacgcgatcgcatacgtggaatacatcacaagttcaatacactcaaaagagacattccatagcctgacaattagcttcagccgctgctgggaatttcttttgtggatggacccttcaaactacggcggaatcaagggcaaagtctcctctaggatacactgcggcctccaggattctcagaaggctggaggtgccgaggacgagcaggaaaacgaagacgacgaggaggaaagggatggagaggaggaagaagaagcagaggaatccaacgttgaagatcttctggaaaataattggaacatcctgcaattcctaccacaagccgcctcctgccagaattattttctcatgattgtgagcgcatacattgtggccgtgtatcactgcatgaaggacggcttgagacgatctgcccctgggagtactccagttcgaaggaggggcgcttcccaactttctcaagaggcagagggggcggtcggtgcattacctgggatgattacatttagccaggactacgtcgctaatgaacttacacaatctttcttcacaatcactcaaaagatccagaaaaaagttaccggctcccggaacagcactgagctgtccgaaatgttccccgtgctgccaggctcccatctcctgctcaacaatcctgcattggagtttataaagtatgtgtgcaaggtactctccctcgatacaaatatcaccaatcaggtgaataaactcaaccgcgatctcctacgcctagttgatgtgggggagtttagcgaggaagcacagtttcgagacccgtgcagatcgtacgtactgcccgaggtgatctgccgtagctgtaatttctgtagagatctggatctgtgcaaggattcctccttcagcgaagacggcgcagtgctgccgcaatggctatgcagcaactgccaggcaccgtatgactcttctgccattgaaatgaccctggtcgaagtactgcaaaaaaagcttatggccttcactctacaggacctggtctgcttgaagtgccgaggcgtcaaagagacctccatgccagtatactgtagttgcgctggagattttgccctgaccatacatacacaggtgtttatggaacagatcggtatcttcaggaatattgcccaacattacggcatgagctacctgttggaaaccctggagtggctactgcagaagaacccacagctgggccattag

SEQ ID NO: 163071 - DNA, 6894 bp, Artificial Sequence
  derived and/or modified sequence
atgagccggcccctgggcctgaagagcttcccccggcacaagcaggccccattgccccttagcctaacattccacggctgcctgcttctccgaagagacgatggcgcaacaagcagcgtttcggccttaaagaggctggagcgctcgcaatggacagacaaaatggacctgcggttcggcttcgagaggctcaaggagccaggcgagaagaccgggtggctcattaacatgcatcccaccgaaattctggatgaggacaaacgcctaggttccgccgttgattactattttatccaggacgatggtagccgcttcaaagtcgctctgccatacaagccatatttctatattgcaacccgcaagggatgcgaaagagaagtgtctagttttttatcaaagaagtttcagggtaagatcgccaaggttgaaaccgtgcccaaggaagacctcgatctgcccaatcatcttgtaggcctgaaaaggaactacatccgcctctctttccacaccgttgaggatttggtgaaagtaagaaaggagatttccccagccgttaagaaaaatcgtgaacaagatcatgcctccgacgcctacactgctctgcttagctctgtgctccagcggggaggagtgatcactgatgaagaggagacatccaagaagattgcagatcagctggacaacattgtggatatgagagagtacgacgtgccatatcacatccgcctgtcaattgatctaaaaattcacgttgcccattggtacaatgttagataccgaggcaatgcgtttccagtagagattacccggagagatgatctagtggaacgacccgaccctgtggtgttggcattcgacatagaaaccacaaagctcccccttaagtttccggatgcagagaccgatcaaataatgatgatttcttacatgatagatggccaggggtacctcatcacgaacagggaaattgtatccgaggacatcgaagatttcgaatttacccctaaacctgaatacgaagggcctttttgtgtgttcaatgaacccgacgaagcacacttgattcagagatggttcgagcacgtgcaggaaacaaagcccaccatcatggtgacctacaatggtgatttcttcgattggccattcgtcgaagccagggctgccgtgcacggtttaagtatgcagcaagagatcgggttccaaaaagattctcagggcgagtataaggccccacagtgcattcacatggattgcctccgctgggtcaagagggactcttatttgccagtcggtagtcataatctgaaagccgctgccaaggctaaactggggtacgatccagtcgaacttgaccccgaggatatgtgtcggatggcaaccgagcagcctcagaccctggcaacctatagtgtgagtgatgcagttgcgacttactacctgtatatgaaatatgtgcacccttttatcttcgctttgtgtacaatcattcctatggagcccgatgaagtgctgaggaaaggtagtggcaccctctgcgaagcccttctgatggtgcaggccttccacgctaacatcatcttccccaacaaacaggaacaggagtttaataaactgacagatgatggccacgtgctagatagcgagacctatgtaggcggtcacgtcgaagccttggagtcaggcgtattccggtccgacatcccctgccggttccggatgaacccagccgccttcgactttcttctgcagagagtggaaaaaacactccggcatgctctggaagaagaggaaaaggtccctgtggagcaagtgaccaatttcgaagaggtgtgcgatgaaattaagtccaagcttgcgtccttaaaggacgtgccgtccaggatcgaatgccctctgatatatcacctggacgtgggagctatgtatccaaatattattttgactaacagacttcaaccgtcggctatggtcgacgaggcgacatgcgccgcgtgcgactttaacaagcccggggcgaactgccaaaggaagatggcctggcagtggcgaggagaatttatgccggcgagccgctccgagtatcacaggatacagcatcaactagagtccgagaaatttcctcccctatttcccgaaggccccgcacgagccttccacgaactgtccagagaagagcaagctaaatacgaaaagcgcagactggccgattactgcagaaaggcatataaaaaaattcacattacaaaagtggaagaacgcctgaccactatctgtcaacgagagaatagtttttacgtggacacagtgcgagcctttagagatcgtcggtacgagtttaagggcctccacaaggtatggaaaaaaaagctgagcgctgccgtggaggtaggcgacgcagctgaggtgaaacgctgcaaaaatatggaggtgctttatgatagtctgcagcttgcacacaaatgcatcttaaattctttttatggttacgtgatgagaaaaggagctcggtggtattccatggagatggcaggcattgtgtgctttaccggggctaacataattacacaagcccgtgagttgattgaacagattggaaggccactggagctggacaccgatggcatctggtgtgtactgcccaactctttcccagaaaattttgtttttaaaacaaccaacgtcaagaaacccaaggtgacaatctcctaccccggcgcaatgttaaacatcatggtgaaagaagggttcacaaatgaccaatatcaagagctggccgagccctcaagcctgacctacgtcaccaggtccgagaatagtatcttcttcgaagtggatggaccttatctggccatgatcctgccagcctctaaggaggagggcaagaaacttaaaaagagatatgctgtctttaatgaggatgggagcttggcagagctgaagggcttcgaggttaaacgtcgtggagaactgcagctgataaaaatctttcaatcctccgtcttcgaggcatttctcaaaggtagtacactggaggaggtctacggcagtgtggccaaggtggccgactactggctggacgtactttactcaaaagccgctaacatgcctgacagcgaactgtttgaactgatctctgaaaataggtccatgtcccggaaactggaggattacggcgaacagaaaagtacatccatcagcaccgcaaaaagactcgccgagttcttaggcgaccagatggtgaaagatgccggactgagctgtagatacatcatctcccgtaagcctgagggatcacccgttactgaaagagcaatacccttagccatcttccaagcagaacctacagtgaggaagcatttcctgaggaagtggctgaaatcatcttcccttcaggatttcgacattcgtgcaatccttgactgggattattatatcgagcgcctgggttcagccatacaaaagattataactatccctgctgctttacagcaggtcaaaaaccctgttcccagggtaaagcacccagactggctgcataagaagttgctggaaaagaacgatgtttataaacaaaagaaaatttctgagttgttcaccctggagggccgtcgccaggtaactatggccgaggcaagtgaggactcaccccgtccttctgcacccgatatggaggactttggtctggttaagctacctcatcccgctgcccctgtgacggtcaagagaaagcgggtactttgggagagccaggaagagagtcaggatttgaccccaaccgtgccatggcaagagatcctgggtcagcctccggctttaggcacctcacaggaagagtggttggtgtggcttcggttccataaaaagaagtggcagttgcaagcaaggcaacgattagcccggcgcaaacggcagcgattggagtctgctgagggggtgctacgcccgggcgcaattcgcgatgggcctgcaactggactgggcagctttctaaggcgtaccgcacgctctatcctggatctgccatggcagattgtacaaatctctgaaacttcccaggctgggctgttcagattgtgggccctagtgggaagtgacctgcattgcatcagactgtccataccaagagtcttttacgtaaaccagcgggttgccaaagcagaagagggcgcctcctaccggaaagttaacagagtccttccaagaagcaatatggtgtacaacctgtacgagtactccgtgccagaagatatgtaccaggagcacataaacgagatcaacgctgagctctccgcgcccgacattgaaggagtgtatgaaacccaggtgccactgctttttagggcactggtgcatctcggctgcgtttgtgtagttaacaaacagctggtgaggcatctgagtgggtgggaggccgaaacctttgctttggagcatttggagatgcgctcattggcccagttttcttatctggaacctggctccatacgccatatttatctctaccatcacgcgcaggcgcataaagcattattcggaatcttcattccgtcgcagcgaagagcttctgtgtttgtgctcgacacagtgcgctcaaaccagatgccgtcattaggcgcgctatatagcgcggaacacggccttctcctcgagaaagtgggccctgaactgctgcccccaccaaagcacaccttcgaagtacgcgcggagaccgacttgaagactatttgccgggcaatccagagattcttgctggcctataaagaagaacgccggggacctacactgatcgctgtgcagagttcctgggagcttaagcggctggcctctgaaattccagtgcttgaggaattccctctagttcctatttgtgtagctgataagattaactacggggtcctggattggcagaggcacggagctcgccgcatgatccgccactaccttaatctggacacctgcctctcccaagcattcgaaatgagcagatatttccacataccaataggaaatctgcccgaggatatttccacttttgggtccgacctcttttttgcaagacacctccagcggcataatcatctgctgtggctcagccctaccgccagacccgatctgggaggaaaggaagcagatgacaattgtctagttatggagtttgacgaccaggcgacagtggaaataaactcttccgggtgttacagcacagtttgtgtcgagctggatctgcagaatttggctgtcaacacaatattacagtcacaccacgtcaatgatatggaaggcgcagacagtatgggcatctcattcgacgtgatacagcaggccagcctagaggacatgatcactggagggcaggcagcatccgcccccgccagttatgacgagaccgccttgtgctcgaacacattcaggatactgaaatcaatggtagtgggttgggtcaaagaaattacacagtatcataacatttatgcagacaatcaggtgatgcatttttaccggtggctgagatcaccttccagtctgctgcacgatcctgcactacaccggaccctgcacaatatgatgaaaaagctattcttgcaactgattgccgagttcaagcggttggggtcttccgtgatctatgctaattttaacaggattattttgtgcactaagaaaagacgggtggaagacgcaattgcttacgtagaatatataacgtcttcgatacattcaaaggagacattccactctttaacaatcagcttttctcgatgttgggagttcctgctgtggatggatcccagcaactacggcggtattaagggtaaagtgtcatcccggattcactgtggactgcaggactctcaaaaagccggcggggcagaggatgagcaagaaaatgaggatgatgaagaggagcgggacggagaggaagaggaggaagccgaagaaagtaacgtggaagatctgctggagaacaactggaacattctgcagttcctccctcaggctgcctcatgtcagaactattttctaatgattgtgtctgcgtacatcgtggcagtgtaccattgtatgaaagacgggctgcggaggtctgcccccgggagtacccccgttagacggagaggcgcatcccaattgtcccaagaggccgagggtgcagtgggagcgctgcccgggatgatcactttcagccaggattatgtcgccaatgagctgacccagtcatttttcacaatcacacagaagatccaaaagaaggtcactggctcccggaactctactgaactgtctgaaatgttccctgtcctgcctgggagtcacctacttctaaacaacccagcactcgagtttatcaaatatgtgtgcaaagttttgtctctagacactaacattaccaaccaggtcaacaagttgaacagggatcttctgcgtttggttgatgtcggagagttctcggaggaagcccagttcagggatccatgccggagttacgttcttccagaggtgatatgccgctcttgcaacttctgtagagatctggatctctgtaaggattcctcttttagcgaggatggagcagtccttccccagtggctgtgctcaaactgtcaggctccgtatgactctagtgccatagagatgacgttagtggaagtgttacagaagaagctcatggcttttaccctccaagacttagtctgtcttaaatgtagaggggttaaggagacctcgatgcctgtctactgctcttgtgctggcgatttcgctctaaccattcacacgcaggtgtttatggaacagattggcatatttagaaacattgctcagcactacggcatgtcttacctgctggaaacgttagaatggttactccagaaaaaccctcaactaggccactag

SEQ ID NO: 163072 - DNA, 6780 bp, Artificial Sequence
  derived and/or modified sequence
atgagcctgcggagcggcggccggcggcgggccgaccccggcgccgatggcgaggcttccagggacgacggcgcaactagcagtgtctcagctttgaagcggctggagcgtagtcagtggactgataaaatggacctccggtttggcttcgagaggctcaaggagccaggcgagaaaacaggctggttgatcaacatgcacccagtggcgctcccttacaagccgtacttctatatcgcaacccgcaagggctgcgagcgggaggtgtccagttttctgtccaagaagttccaaggcaaaattgcgaaggtggagaccgtgcccaaggaggacttggatctgcccaaccacttggttggactgaaacgcaactatattcgattgagttttcatacagtagaggatctcgtgaaagtaagaaaagaaatatccccagctgtaaaaaaaaaccgcgagcaagaccacgcctccgacgcatacacagctctgcttagcagcgtccttcaacgcggcggcgtcatcactgatgaggaagaaactagcaagaaaattgctgaccagctggataacattgtggatatgcgggaatatgatgtaccataccatattagactcagcatcgatcttaagatccacgtggcccactggtacaacgttcggtacagaggaaacgccttccctgttgaaatcacccggcgtgacgacttggtagagagacctgatcccgttgtgctcgccttcgacattgaaacaaccaagctgcctctgaaattcccagatgcggaaaccgatcagataatgatgatcagctatatgatcgatggccagggttacttgatcactaacagagagatagttagtgaggacatcgaagacttcgagtttaccccaaagcctgaatatgagggtcccttttgcgtattcaacgaacctgacgaagctcatctaattcagagatggtttgaacacgtgcaggagaccaaacccactataatggtgacatacaacggcgacttttttgattggccttttgtagaggctcgtgccgctgtgcacggcttatccatgcagcaggagattggcttccagaaagactctcagggcgaatacaaagcgccgcagtgtattcatatggattgtttaaggtgggtgaagcgggatagctaccttccagtaggttcccataacttgaaagcagccgcgaaggccaagttggggtacgatcctgtggagctggaccccgaagatatgtgccgaatggcaactgaacaaccccaaaccctcgccacgtacagcgtctccgacgccgtagcgacgtactacttgtatatgaagtatgtacaccctttcatttttgcgctttgtaccatcattcctatggagccagatgaagtccttcgcaagggttctgggacactgtgtgaagccttgttgatggttcaggcattccacgcgaacattatctttccgaataagcaggaacaggagtttaacaagctcactgacgatggccatgtgctggattcagagacctacgtgggcggccatgtagaggctcttgaatctggcgtctttaggtccgacattccctgtagattcaggatgaaccccgccgcttttgacttcctcctgcagcgcgtggaaaaaacgctgaggcatgcccttgaggaggaggagaaggtgcccgtagaacaagtgactaattttgaagaagtgtgcgacgaaatcaaatcgaaactggcatctctgaaggatgtcccatcgcgaatcgagtgccctctgatatatcacctcgatgtaggtgccatgtacccaaacataatcctgactaacagacttcaacccagcgcaatggtcgacgaggcgacctgcgcggcttgcgattttaacaagccaggagccaattgccaaaggaagatggcctggcaatggcgcggagagttcatgccagcatctcgctccgagtaccacaggattcagcatcagttggaatcggaaaagtttcccccactgttccctgagggccccgcccgtgccttccatgaactgagtagggaggagcaggctaaatatgagaagcgtcgtctggccgactattgccgcaaggcgtacaaaaagatacacataacaaaggtggaagagcgcctgacaacaatctgccagcgggagaatagtttttatgtggacaccgtgagagccttccgcgaccgccgctatgaatttaaaggcctccacaaagtctggaaaaaaaaactgtccgccgctgtggaagtgggcgatgcagcagaggtgaaacggtgtaagaacatggaggtgctgtacgatagcctccagctcgcccataaatgcattttgaattctttttatggctatgtaatgcggaaaggcgctcggtggtacagcatggagatggccggtatcgtgtgcttcaccggggccaacataatcacccaggcacgtgagctgatcgaacaaattggaagaccactggagttggacactgacgggatttggtgtgtgcttcccaattcatttcccgaaaactttgtctttaaaacaacaaatgtaaaaaagcccaaagttacaatttcatacccgggcgccatgctgaatattatggttaaggagggtttcaccaacgaccaatatcaggagctagccgaaccctcgtccttgacttatgttactagatctgagaattctatcttcttcgaggtagacgggccatacttggctatgatcctgccagcatccaaggaggagggtaagaaactaaagaagcggtacgccgtgttcaacgaggatgggagcctcgcggagttgaagggcttcgaggttaagcgaaggggcgaactgcagctgattaagatcttccagtcctctgtcttcgaggcgtttctgaaggggtctacactagaggaggtctatggctccgtcgccaaggtggcagactactggctagacgtcctatatagtaaggcagcaaacatgccggactctgagctattcgaactcattagcgagaatcgatcaatgagcagaaaactcgaagattacggggagcaaaagagtactagcatttcaactgcgaaaagactggccgagttcttgggggaccaaatggtgaaagacgccggtctatcctgccgctacatcatttcccgcaagccagaaggcagccctgttaccgaacgggccatcccactggcaatctttcaggccgagcctaccgtgcgaaagcatttcctcaggaaatggctgaagtctagctccctgcaggatttcgatatccgcgctatcctggactgggattactacatcgagcgcttggggagcgctattcagaagatcataactattcccgctgccctccagcaggtgaaaaaccccgtccccagagtgaaacacccggactggctccacaaaaaactcctggaaaagaatgacgtgtacaaacagaagaagatcagtgaactttttaccttggagggacgccggcaggtcaccatggccgaggcaagcgaagactctccccgcccatccgcaccagacatggaggactttggtctagtgaagttgccgcatcccgccgcacctgttacagtgaagagaaagagagttctgtgggaatctcaagaggaaagccaagacttgacaccaaccgtgccctggcaagagattctcggccagccacctgccctaggaacttcccaggaggagtggcttgtctggctccggttccataagaagaagtggcagttgcaggcacggcagagattagcgagacgcaagaggcagcggcttgagagcgccgaaggagttctccgccccggcgcaattagggatggccccgccaccggcttggggagttttcttcggcgcaccgctaggtctattctcgatctgccgtggcagatagtgcagatctctgagacgagccaagctggcctctttcgcctgtgggcactggtaggtagtgacttgcactgcatcaggctgtcaatcccgagagtgttctatgtgaaccagagagtggctaaggctgaggagggagcctcgtatcgcaaagttaatcgggtgttaccaagaagcaatatggtctacaatctgtatgagtactctgttccagaagacatgtatcaggaacatattaatgaaatcaatgccgagctgagtgcgcctgatatagagggagtttatgaaacccaggtaccattattattccgggcattggttcacttaggctgtgtgtgtgtggttaacaaacagctcgtgcgccacttgagcgggtgggaagcggagacattcgcactggaacacttagagatgcgtagcctagctcagttctcatatcttgagcctggcagcatacggcatatctatctgtatcatcatgcccaggctcacaaggcacttttcggcatcttcattcccagccaacgtagagcctccgtgttcgtcttagataccgtgcggagtaaccagatgccctctcttggcgccctgtacagtgctgagcatggacttctgctggaaaaggttggaccagaactgcttcctcccccaaagcatacattcgaggtgcgggcagagactgatctcaaaaccatctgccgtgccattcagagatttttgcttgcttacaaggaggagcgccgaggccccaccttgattgctgtacagagttcatgggagttgaagcgcctggccagtgagatcccggtgctggaggagtttccactggtgcctatctgcgtggccgacaagatcaattacggcgtactcgattggcagcgtcacggcgcccgaagaatgattaggcattacctaaatctcgatacttgcttaagccaggccttcgagatgtcccgctacttccatattcctatcgggaaccttcccgaagacatctcaactttcggaagcgacctgttcttcgcccgacatttacagagacacaatcacttactttggttgagcccgacagcccgacccgatcttggtgggaaagaggctgatgacaattgtttagtcatggaatttgacgaccaggcgactgtagagataaattccagcgggtgttattcaaccgtgtgcgttgagcttgacctccaaaacctggccgtgaacactatccttcagagtcaccatgtgaacgacatggaaggcgctgattcaatgggaatcagtttcgatgtgatccaacaggctagcttggaagacatgatcaccggaggccaggcagcctcagcgcccgcatcgtatgatgagaccgcattgtgttcaaatacatttagaatactcaagtctatggttgtgggatgggtcaaggagattacccagtaccataatatctatgccgacaatcaggtgatgcacttttaccgctggctcagaagtcccagctccctgcttcatgatcccgcattgcatagaacactccacaatatgatgaagaagttgtttctccaactaatcgctgagttcaaaaggttgggatcaagcgtgatatacgctaactttaaccgcatcatcctttgcaccaaaaagcggcgtgtggaagatgccatagcctatgtggagtatattacttcttccattcattcaaaagagacttttcattcattgacaatcagctttagtaggtgctgggaatttctgctgtggatggacccatcaaattatggcgggatcaaaggcaaagtctcgtcacggattcattgtggactgcaggattcccagaaggcgggtggcgccgaagatgagcaagagaatgaagacgacgaagaggagagggacggcgaagaagaagaagaggctgaggagagcaatgtggaggacctccttgaaaacaactggaacatcctgcagtttttgccccaggctgcttcttgtcagaactactttcttatgatcgttagcgcctacatagttgctgtgtaccattgcatgaaagacgggctcaggaggtcggcacctggatcaaccccagtcaggaggcgcggggccagtcagttgtcccaggaagctgaaggtgccgttggcgctcttcctggtatgatcacattcagccaggactacgttgcgaatgaactcacacagagcttctttaccataacccaaaaaatccagaagaaggtgaccggaagccgtaactcaacagaactttcagaaatgtttcccgtacttcccggaagtcatcttttgctgaacaatcccgccttggaatttatcaagtatgtgtgcaaggtgctgagtctggatacaaacattaccaatcaggtcaataaactcaacagggaccttttaagactggtggatgtgggggagttctccgaagaagcccagttcagggatccttgcaggtcctacgtgctgcccgaggttatttgtaggtcctgcaatttctgtagagaccttgatctgtgcaaggatagtagctttagtgaagatggtgccgtcttgccccagtggctctgttcaaattgccaggccccctacgattcatccgcgatcgagatgacccttgtggaggtcctacagaagaaactgatggcatttacgctgcaggatcttgtctgtctgaagtgtcgcggagttaaggaaacctccatgcccgtttattgcagctgcgccggggattttgccttgactattcacactcaggtgtttatggagcagattggcatattccgcaacatcgctcagcactacggaatgtcgtatctccttgaaacattggagtggctcctgcagaaaaatccacagctggggcattag

SEQ ID NO: 163073 - DNA, 5615 bp, Artificial Sequence
  derived and/or modified sequence
ttttttttttttttttttggtggttatatacaaataggaccagtacaaatgcctgcatggggttgatgaacaccagaataagggttgtctttacttctgtgtgaggagggaataggttggggtcacacagggcttcactctaatcgtctcacaaaggaagtcagagtggccaagtgttgaagcttgatggagccgagtggatcatagtgtgcgtgtcttctttaggtctccttatgtttgcagtattcaccacagatgtttcctccagtgaaagggaagcactgacggttgccagttgctttgctagtgacatgaaaacaggctcgttttttctagaaagcagcctgagtcttctgtgtgttactcagcaaggaacatgtagacatggttatgaacgtgcacgtttgcctgtatgcatgcacgtggttactcagaaacgcagacatgtttacgcacacacgcatgtctttgcctatacgcatgcgcgtggttactcagaaacgtagacatgtttacgcacgcatgcgtttatgtatgtgcatgcacatggttatgccgtgagaaacatgtagacatagttacgaacatgcacgtgtttgcctgtacgcatgcacgtggttactcaatgagaaacgcagacatgtctacgcacacgcatgtgtttatgtatatgcatgcccatggttacgctgtgaggaacatgtagacatgtttacgtgcacacacgcacgtgtttacacatacgcacgtgttactccccgaggaacctgtaggcatgtttgtgcatacatatgcacgcagatgtatacattgatgtttgtgaacagctgttacacgtccttatttccatgttcatttgataagagttaggatcagattttgggtgattttcactgttactgagctgtgtgcctgtcttccttacccagggccatcccacttgccattttccaagcagagcccacggtgaggaagcactttctccggaaatggctcaagagctcttcccttcaagactttgatattcgagcaattctggattgggactactacattgagcggctgggaagcgccatccagaagatcatcaccatccctgcggccctgcagcaggtaaagaacccagtgccacgtgtcaaacaccccgactggctgcacaaaaaactgctggagaagaatgatgtctacaagcagaagaagatcagtgagctcttcaccctggagggcaggagacaggtcacgatggccgaggcctcagaagacagtccgaggccaagtgctcctgacatggaggacttcggcctcgtaaagctgcctcacccagcagcccctgtcactgtgaagaggaagcgagttctttgggagagccaggaggagtcccaggacctcacgccgactgtgccctggcaggaaatcttggggcagcctcccgccctgggaaccagccaggaggaatggcttgtctggctccggttccacaagaagaagtggcagctgcaggcccggcagcgcctcgcccgcaggaagaggcagcgtctggagtcggcagagggtgtgctcaggcccggggccatccgggatggtcctgccacggggctggggagcttcttgcgaagaactgcccgcagcatcctggaccttccgtggcagattgtgcagatcagcgagaccagccaggccggcctgttcaggctgtgggcgctcgttggcagtgacttgcactgcatcaggctgagcatcccccgtgtgttctacgtgaaccagcgagtcgctaaagcggaggagggtgcttcgtatcgcaaggtaaatcgggtccttcctcgctccaacatggtctacaatctctatgagtattcagtgccagaggacatgtaccaggaacacatcaacgagatcaacgctgagctgtcagcgccagacatcgagggcgtatatgagactcaggttccgttactgttccgggccctggtgcacctgggctgtgtgtgtgtggtcaataaacagctggtgaggcacctttcaggctgggaagcagagacctttgctcttgagcacctggagatgcgctctctggcccagttcagctacctggaaccagggagtatccgccatatctacctgtaccaccacgcacaggcccacaaagcgctcttcgggatcttcatcccctcacagcgcagggcatccgtctttgtgctggacactgtgcgcagcaaccagatgcccagccttggcgccctgtactcagcagagcacggcctcctcctggagaaggtgggccctgagctcctgccaccccccaaacacaccttcgaagttcgggcagaaactgacctgaagaccatctgcagagccatccagcgattcctgctcgcctacaaggaggagcgccgggggcccacactcatcgctgttcagtccagctgggagctgaagaggctggccagtgaaattcctgtcttggaggaattcccactggtgcctatctgtgtggctgacaagatcaactatggggtcctggactggcagcgccatggagcccggcgcatgatccgtcactacctcaacctggacacctgcctgtcgcaggccttcgagatgagcaggtactttcacattcccattgggaacctaccagaggacatctccacattcggctccgacctcttctttgcccgccacctccagcgccacaaccacctgctctggctgtcccctacagcccgccctgacctgggtggaaaggaggctgatgacaactgtcttgtcatggagttcgatgaccaagccactgttgagatcaacagttcaggctgttactccacagtgtgtgtggagctggaccttcagaacctggccgtcaacaccattctccagtctcaccatgtcaacgacatggagggggccgacagcatggggatcagcttcgacgtgatccagcaggcctccctggaggacatgatcacgggtggtcaggctgccagtgccccggccagctacgatgagacagccctgtgctctaacaccttcaggatcctgaagagcatggtcgtgggctgggtgaaggagatcacccagtaccacaacatctatgcagacaaccaggtgatgcacttctaccgctggcttcggtcgccatcctctctgcttcatgaccctgccctgcaccgcacactccacaacatgatgaagaagctcttcctgcagctcatcgctgagttcaagcgcctggggtcatcagtcatctacgccaacttcaaccgcatcatcctctgtacaaagaagcgccgtgtggaagatgccatcgcttacgtggagtacatcaccagcagcatccattcaaaggagaccttccattctctgacaatttctttctctcgatgctgggaatttcttctctggatggatccatctaactatggcggaatcaaaggaaaagtttcatctcgtattcactgtggactgcaagactcccagaaagcagggggagcagaggatgagcaggaaaatgaggacgatgaggaggaaagagatggggaggaggaggaagaggcggaggaatccaacgtggaggatttactggaaaacaactggaacattttgcagtttttgccacaggcagcctcctgccagaactacttcctcatgattgtttcagcgtacatcgtggccgtgtaccactgcatgaaggacgggctgaggcgcagtgctccagggagcacccccgtgaggaggaggggggccagccagctctcccaggaggccgagggggcggtcggagcccttcccggaatgatcaccttctctcaggattatgtcgcaaatgagctcactcagagcttcttcaccatcactcagaagattcagaagaaagtcacaggctctcggaactccactgagctctcagagatgtttcctgtcctccccggttcccacttgctgctcaataaccctgccctggagttcatcaaatacgtgtgcaaggtgctgtccctggacaccaacatcacaaaccaggtgaataagctgaaccgagacctgcttcgcctggtggatgtcggcgagttctccgaggaggcccagttccgagacccctgccgctcctacgtgcttcctgaggtcatctgccgcagctgtaacttctgccgcgacctggacctgtgtaaagactcttccttctcagaggatggggcggtcctgcctcagtggctctgctccaactgtcaggcgccctacgactcctctgccatcgagatgacgctggtggaagttctacagaagaagctgatggccttcaccctgcaggacctgaaggaggcagacactcccaagtgtgaagagaaggaaaggaggaagagggagttgcacagctcggccacaggaaggtcttgccgaggggcatctgagcagaggctgggggacgcgccaagctgccgtgtggtggtgcacggcgttcaggcctgcaggatggagggagtctgcctgaagtgccgcggggtgaaggagaccagcatgcctgtgtactgcagctgcgcgggagacttcgccctcaccatccacacccaggtcttcatggaacagatcggaatattccggaacattgcccagcactacggcatgtcgtacctcctggagaccctggagtggctgctgcagaagaacccacagctgggccattagccagccccgggccccgggtgcctctgcgtccgtgccaggcctcctgatgccaaggccacatccccgtgcttccagtgaccagaccactgaccaccctgactgtccaaacctgtgaccccaggccagggaacggggaggaaaccaaagaaaaccattttcagggagctcagacgtcacaggagggagcgggagcaggatgtggccctggcctcgccagagcacctgaagaagcaggccgtgagcgaggctgcgagtgccctgggcgccgtttctcacgcagtgaatgcttttccaggcctctgttgcttcctgcaccacacctggtggggtgggagcgtcctctaggtgcccctagttctttgtcctgcctcccagagggaggaaaagcccctgggggcttctggctccctgagattgggctctgagacgagacgggttcccaaggccctggtggggctggagtctcacctgtttgcatggagaaatgggctggccccacagcctcacaggagcagtttgtgggctggtttccccaggaatccagaccctaacccgtgagaatctggattttggcttgtgagccctgcttatttggagccgggtctagagggaaccctctatcagcctcaggaaaacaagacctctgtgcacctcacttttggctcactgcagcccttgtccttcacctccacacaggaccagctggaagcagaaagaagaaaggccaatttcacagggcaccaaacaagtatgaaatgtaaatcagaaatgcagacaccccagacgagagcctcacaggagggagggggccccacaggctccccaggaggctcgtgtctttggcccagagccagccttagtttgtccctgccatctactgtctgaggccatcgctgctacactttgtttttatttgtatttcatactgaagtttc

SEQ ID NO: 163074 - DNA, 7840 bp, Artificial Sequence
  derived and/or modified sequence
cgccaaatttctcccctgaagcagaggtggtagccaacggctccatgtctctgaggagcggcgggcggcggcgcgcggacccaggcgcggatggcgaggccagcagggatgatggcgccacttcctcagtttcggcactcaagcgcctggaacggagtcagtggacggataagatggatttgcggtttggttttgagcggctgaaggagcctggtgagaagacaggctggctcattaacatgcatcctaccgagattttagatgaagataagcgcttaggcagtgcagtggattactactttattcaagatgacggaagcagatttaaggtggctttgccctataaaccgtatttctacattgcgaccagaaagggttgtgagcgagaagtttcatcttttctctccaagaagtttcagggcaaaattgcaaaagtggagactgtccccaaagaggatctggacttgccaaatcacttggtgggtttgaagcgaaattacatcaggctgtccttccacactgtggaggatcttgtcaaagtgaggaaggagatctcccctgccgtgaagaagaacagggagcaggatcacgccagcgacgcgtacacagctctgctttccagtgttctgcagaggggcggtgtcattactgatgaagaggaaacctctaagaagatagctgaccagttggacaacattgtggacatgcgcgagtacgatgttccctaccacatccgcctctccattgacctgaagatccacgtggctcattggtacaatgtcagataccgaggaaatgcttttccggtagaaatcacccgccgagatgaccttgttgaacgacctgaccctgtggttttggcatttgacattgagacgaccaaactgcccctcaagtttcctgatgctgagacagaccagattatgatgatttcctacatgatcgatggccagggctacctcatcaccaacagggagattgtttcagaagatattgaagattttgagttcacccccaagccagaatatgaaggccccttttgtgtcttcaatgaacccgatgaggctcatctgatccaaaggtggtttgaacacgtccaggagaccaaacccaccatcatggtcacctacaacggggacttttttgactggccatttgtggaggcccgggcagcagtccacggtctgagcatgcagcaggagataggcttccagaaggacagccagggggagtacaaggcgccccagtgcatccacatggactgcctcaggtgggtgaagagggacagttaccttcctgtgggcagtcataatctcaaggcggccgccaaggccaagctaggctatgatcccgtggagctagacccggaggacatgtgccggatggccacggagcagccccagactctggccacgtattctgtgtcagatgctgtcgccacttactacctgtacatgaagtacgtccacccattcatctttgctctgtgcaccattattcccatggagcccgacgaggtgctgcggaagggctctggcactctgtgtgaggccttgctgatggtgcaggccttccacgccaacatcatcttccccaacaagcaagagcaggagttcaataagctgacggacgacggacacgtgctggactctgagacctacgtcgggggccacgtggaggccctcgagtctggggttttccgcagcgatatcccttgccggtttaggatgaatcctgccgcctttgacttcctgctgcagcgggttgagaagaccttgcgccacgcccttgaggaagaggagaaagtgcctgtggagcaagtcaccaactttgaagaggtgtgtgatgagattaagagcaagcttgcctccctgaaggacgttcccagccgcatcgagtgtccactcatctaccacctggacgtgggggccatgtaccccaacatcatcctgaccaaccgcctgcagccctctgccatggtggacgaagccacctgtgctgcctgtgacttcaataagcctggagcaaactgccagcggaagatggcctggcagtggaggggcgagttcatgccagccagtcgcagcgaataccatcggatccagcaccagctggagtcagagaagttcccccccttgttcccagaggggccagctcgggcctttcatgaactgtcccgcgaggaacaggcgaaatacgagaagagaaggctggcggattactgccggaaagcctacaagaagatccacatcaccaaggtggaagagcgtctcaccaccatctgccagcgggaaaactccttctacgtggacaccgtgcgtgccttccgggacaggcgttacgagttcaaagggctccacaaggtgtggaaaaagaagctctcggcggccgtggaggtgggcgacgcggctgaggtgaagcgctgcaagaacatggaggtgctgtatgactcgctgcagctggcccacaagtgcatcctgaactccttctatggctatgtcatgcgcaagggggctcgctggtactccatggagatggctggcatcgtctgcttcacaggggccaacatcatcacccaggcacgggagctgatcgagcagattgggaggcccttagagctggacacagatggtatatggtgcgtcctgcccaacagcttcccagaaaattttgtcttcaagacgaccaatgtgaagaagcccaaagtgaccatctcctacccaggcgccatgttgaacatcatggtcaaggaaggcttcaccaatgaccagtaccaggagctggctgagccgtcctcactcacctacgtcacccgctcagagaacagcatcttttttgaggttgatgggccctaccttgccatgattcttccagcctccaaggaagaaggcaagaaattgaagaagaggtatgctgtgttcaatgaagacggttctctggctgagctcaagggctttgaggtcaaacgccgcggggaactgcagctgattaagatcttccaatcctcggtgtttgaggccttcctcaagggcagcacgctggaagaggtgtatggctctgtagccaaggtggctgactactggctggacgtgctgtacagcaaggcagccaacatgcctgactctgagctattcgagctcatctctgagaaccgttccatgtctcggaagctggaagattacggggagcagaagtctacgtccatcagcacagcaaagcgcctggccgagttcctgggagaccagatggtcaaggatgcagggctgagttgccgctacatcatctcccgcaagcccgagggctcccctgtcacggagagggccatcccacttgccattttccaagcagagcccacggtgaggaagcactttctccggaaatggctcaagagctcttcccttcaagactttgatattcgagcaattctggattgggactactacattgagcggctgggaagcgccatccagaagatcatcaccatccctgcggccctgcagcaggtaaagaacccagtgccacgtgtcaaacaccccgactggctgcacaaaaaactgctggagaagaatgatgtctacaagcagaagaagatcagtgagctcttcaccctggagggcaggagacaggtcacgatggccgaggcctcagaagacagtccgaggccaagtgctcctgacatggaggacttcggcctcgtaaagctgcctcacccagcagcccctgtcactgtgaagaggaagcgagttctttgggagagccaggaggagtcccaggacctcacgccgactgtgccctggcaggaaatcttggggcagcctcccgccctgggaaccagccaggaggaatggcttgtctggctccggttccacaagaagaagtggcagctgcaggcccggcagcgcctcgcccgcaggaagaggcagcgtctggagtcggcagagggtgtgctcaggcccggggccatccgggatggtcctgccacggggctggggagcttcttgcgaagaactgcccgcagcatcctggaccttccgtggcagattgtgcagatcagcgagaccagccaggccggcctgttcaggctgtgggcgctcgttggcagtgacttgcactgcatcaggctgagcatcccccgtgtgttctacgtgaaccagcgagtcgctaaagcggaggagggtgcttcgtatcgcaaggtaaatcgggtccttcctcgctccaacatggtctacaatctctatgagtattcagtgccagaggacatgtaccaggaacacatcaacgagatcaacgctgagctgtcagcgccagacatcgagggcgtatatgagactcaggttccgttactgttccgggccctggtgcacctgggctgtgtgtgtgtggtcaataaacagctggtgaggcacctttcaggctgggaagcagagacctttgctcttgagcacctggagatgcgctctctggcccagttcagctacctggaaccagggagtatccgccatatctacctgtaccaccacgcacaggcccacaaagcgctcttcgggatcttcatcccctcacagcgcagggcatccgtctttgtgctggacactgtgcgcagcaaccagatgcccagccttggcgccctgtactcagcagagcacggcctcctcctggagaaggtgggccctgagctcctgccaccccccaaacacaccttcgaagttcgggcagaaactgacctgaagaccatctgcagagccatccagcgattcctgctcgcctacaaggaggagcgccgggggcccacactcatcgctgttcagtccagctgggagctgaagaggctggccagtgaaattcctgtcttggaggaattcccactggtgcctatctgtgtggctgacaagatcaactatggggtcctggactggcagcgccatggagcccggcgcatgatccgtcactacctcaacctggacacctgcctgtcgcaggccttcgagatgagcaggtactttcacattcccattgggaacctaccagaggacatctccacattcggctccgacctcttctttgcccgccacctccagcgccacaaccacctgctctggctgtcccctacagcccgccctgacctgggtggaaaggaggctgatgacaactgtcttgtcatggagttcgatgaccaagccactgttgagatcaacagttcaggctgttactccacagtgtgtgtggagctggaccttcagaacctggccgtcaacaccattctccagtctcaccatgtcaacgacatggagggggccgacagcatggggatcagcttcgacgtgatccagcaggcctccctggaggacatgatcacgggtggtcaggctgccagtgccccggccagctacgatgagacagccctgtgctctaacaccttcaggatcctgaagagcatggtcgtgggctgggtgaaggagatcacccagtaccacaacatctatgcagacaaccaggtgatgcacttctaccgctggcttcggtcgccatcctctctgcttcatgaccctgccctgcaccgcacactccacaacatgatgaagaagctcttcctgcagctcatcgctgagttcaagcgcctggggtcatcagtcatctacgccaacttcaaccgcatcatcctctgtacaaagaagcgccgtgtggaagatgccatcgcttacgtggagtacatcaccagcagcatccattcaaaggagaccttccattctctgacaatttctttctctcgatgctgggaatttcttctctggatggatccatctaactatggcggaatcaaaggaaaagtttcatctcgtattcactgtggactgcaagactcccagaaagcagggggagcagaggatgagcaggaaaatgaggacgatgaggaggaaagagatggggaggaggaggaagaggcggaggaatccaacgtggaggatttactggaaaacaactggaacattttgcagtttttgccacaggcagcctcctgccagaactacttcctcatgattgtttcagcgtacatcgtggccgtgtaccactgcatgaaggacgggctgaggcgcagtgctccagggagcacccccgtgaggaggaggggggccagccagctctcccaggaggccgagggggcggtcggagcccttcccggaatgatcaccttctctcaggattatgtcgcaaatgagctcactcagagcttcttcaccatcactcagaagattcagaagaaagtcacaggctctcggaactccactgagctctcagagatgtttcctgtcctccccggttcccacttgctgctcaataaccctgccctggagttcatcaaatacgtgtgcaaggtgctgtccctggacaccaacatcacaaaccaggtgaataagctgaaccgagacctgcttcgcctggtggatgtcggcgagttctccgaggaggcccagttccgagacccctgccgctcctacgtgcttcctgaggtcatctgccgcagctgtaacttctgccgcgacctggacctgtgtaaagactcttccttctcagaggatggggcggtcctgcctcagtggctctgctccaactgtcaggcgccctacgactcctctgccatcgagatgacgctggtggaagttctacagaagaagctgatggccttcaccctgcaggacctggtctgcctgaagtgccgcggggtgaaggagaccagcatgcctgtgtactgcagctgcgcgggagacttcgccctcaccatccacacccaggtcttcatggaacagatcggaatattccggaacattgcccagcactacggcatgtcgtacctcctggagaccctggagtggctgctgcagaagaacccacagctgggccattagccagccccgggccccgggtgcctctgcgtccgtgccaggcctcctgatgccaaggccacatccccgtgcttccagtgaccagaccactgaccaccctgactgtccaaacctgtgaccccaggccagggaacggggaggaaaccaaagaaaaccattttcagggagctcagacgtcacaggagggagcgggagcaggatgtggccctggcctcgccagagcacctgaagaagcaggccgtgagcgaggctgcgagtgccctgggcgccgtttctcacgcagtgaatgcttttccaggcctctgttgcttcctgcaccacacctggtggggtgggagcgtcctctaggtgcccctagttctttgtcctgcctcccagagggaggaaaagcccctgggggcttctggctccctgagattgggctctgagacgagacgggttcccaaggccctggtggggctggagtctcacctgtttgcatggagaaatgggctggccccacagcctcacaggagcagtttgtgggctggtttccccaggaatccagaccctaacccgtgagaatctggattttggcttgtgagccctgcttatttggagccgggtctagagggaaccctctatcagcctcaggaaaacaagacctctgtgcacctcacttttggctcactgcagcccttgtccttcacctccacacaggaccagctggaagcagaaagaagaaaggccaatttcacagggcaccaaacaagtatgaaatgtaaatcagaaatgcagacaccccagacgagagcctcacaggagggagggggccccacaggctccccaggaggctcgtgtctttggcccagagccagccttagtttgtccctgccatctactgtctgaggccatcgctgctacactttgtttttatttgtatttcatactgaagtttc

SEQ ID NO: 163075 - DNA, 3001 bp, Artificial Sequence
  derived and/or modified sequence
agtgttactaatagaagggtcttatcctttgcccttaatttggaaagctaaggtctaagacagggtccattgggcttcccttagtcttaatggcagagccagagaccactgtgtggcgagttttccatagtctattgtctttaccactgtgggggtccggcctggtccctggcgactgttcagtgtgctgcctctgacctccctgtggccagaggtacttcacacagagtctttctaaccagggccacttttcgatgtgaccaaaggtacatcacagggatctccagccagctctactgagtatgatgtgtgaggcatcagcacttaggtgtcaggagccgtcggtctgctgcagagggcgtggttgagggtcaggagccatcagtctgcggagagcatggttgagggcagctactcgcattacccaccagcggtggttcatgctgggcaatgcttgctgtgtaccaggaggtgggccgagcacttcgcattctgcctctgtccccacatcagcccagggacggggagcggttattgtctgtttttcagataaggaaactgaggtcagaggggctgcctttgtggtcataccacaaatgaatggaagggatcctgaagagcatggtcgtgggctgggtgaaggagatcacccagtaccacaacatctatgcagacaaccaggtgatgcacttctaccgctggcttcggtcgccatcctctctgcttcatgaccctgccctgcaccgcacactccacaacatgatgaagaagctcttcctgcagctcatcgctgagttcaagcgcctggggtcatcagtcatctacgccaacttcaaccgcatcatcctctgtacaaagaagcgccgtgtggaagatgccatcgcttacgtggagtacatcaccagcagcatccattcaaaggagaccttccattctctgacaatttctttctctcgatgctgggaatttcttctctggatggatccatctaactatggcggaatcaaaggaaaagtttcatctcgtattcactgtggactgcaagactcccagaaagcagggggagcagaggatgagcaggaaaatgaggacgatgaggaggaaagagatggggaggaggaggaagaggcggaggaatccaacgtggaggatttactggaaaacaactggaacattttgcagtttttgccacaggcagcctcctgccagaactacttcctcatgattgtttcagcgtacatcgtggccgtgtaccactgcatgaaggacgggctgaggcgcagtgctccagggagcacccccgtgaggaggaggggggccagccagctctcccaggaggccgagggggcggtcggagcccttcccggaatgatcaccttctctcaggattatgtcgcaaatgagctcactcagagcttcttcaccatcactcagaagattcagaagaaagtcacaggctctcggaactccactgagctctcagagatgtttcctgtcctccccggttcccacttgctgctcaataaccctgccctggagttcatcaaatacgtgtgcaaggtgctgtccctggacaccaacatcacaaaccaggtgaataagctgaaccgagacctgcttcgcctggtggatgtcggcgagttctccgaggaggcccagttccgagacccctgccgctcctacgtgcttcctgaggtcatctgccgcagctgtaacttctgccgcgacctggacctgtgtaaagactcttccttctcagaggatggggcggtcctgcctcagtggctctgctccaactgtcaggcgccctacgactcctctgccatcgagatgacgctggtggaagttctacagaagaagctgatggccttcaccctgcaggacctggtctgcctgaagtgccgcggggtgaaggagaccagcatgcctgtgtactgcagctgcgcgggagacttcgccctcaccatccacacccaggtcttcatggaacagatcggaatattccggaacattgcccagcactacggcatgtcgtacctcctggagaccctggagtggctgctgcagaagaacccacagctgggccattagccagccccgggcctcctgatgccaaggccacatccccgtgcttccagtgaccagaccactgaccaccctgactgtccaaacctgtgaccccaggccagggaacggggaggaaaccaaagaaaaccattttcagggagctcagacgtcacaggagggagcgggagcaggatgtggccctggcctcgccagagcacctgaagaagcaggccgtgagcgaggctgcgagtgccctgggcgccgtttctcacgcagtgaatgcttttccaggcctctgttgcttcctgcaccacacctggtggggtgggagcgtcctctaggtgcccctagttctttgtcctgcctcccagagggaggaaaagcccctgggggcttctggctccctgagattgggctctgagacgagacgggttcccaaggccctggtggggctggagtctcacctgtttgcatggagaaatgggctggccccacagcctcacaggagcagtttgtgggctggtttccccaggaatccagaccctaacccgtgagaatctggattttggcttgtgagccctgcttatttggagccgggtctagagggaaccctctatcagcctcaggaaaacaagacctctgtgcacctcacttttggctcactgcagcccttgtccttcacctccacacaggaccagctggaagcagaaagaagaaaggccaatttcacagggcaccaaacaagtatgaaatgtaaatcagaaatgcagacaccccagacgagagcctcacaggagggagggggccccacaggctccccaggaggctcgtgtctttggcccagagccagccttagtttgtccctgccatctactgtctgaggccatcgctgctacactttgtttttatttgtatttcatactgaagtttctct

SEQ ID NO: 163076 - DNA, 7829 bp, Artificial Sequence
  derived and/or modified sequence
atgagccgtcccctgggcttgaaatctttcccgcggcacaaacaggcgccccttcctctgtcgctcacttttcacggttgtctccttctgaggcgggatgatggcgccacttcctcagtttcggcactcaagcgcctggaacggagtcagtggacggataagatggatttgcggtttggttttgagcggctgaaggagcctggtgagaagacaggctggctcattaacatgcatcctaccgagattttagatgaagataagcgcttaggcagtgcagtggattactactttattcaagatgacggaagcagatttaaggtggctttgccctataaaccgtatttctacattgcgaccagaaagggttgtgagcgagaagtttcatcttttctctccaagaagtttcagggcaaaattgcaaaagtggagactgtccccaaagaggatctggacttgccaaatcacttggtgggtttgaagcgaaattacatcaggctgtccttccacactgtggaggatcttgtcaaagtgaggaaggagatctcccctgccgtgaagaagaacagggagcaggatcacgccagcgacgcgtacacagctctgctttccagtgttctgcagaggggcggtgtcattactgatgaagaggaaacctctaagaagatagctgaccagttggacaacattgtggacatgcgcgagtacgatgttccctaccacatccgcctctccattgacctgaagatccacgtggctcattggtacaatgtcagataccgaggaaatgcttttccggtagaaatcacccgccgagatgaccttgttgaacgacctgaccctgtggttttggcatttgacattgagacgaccaaactgcccctcaagtttcctgatgctgagacagaccagattatgatgatttcctacatgatcgatggccagggctacctcatcaccaacagggagattgtttcagaagatattgaagattttgagttcacccccaagccagaatatgaaggccccttttgtgtcttcaatgaacccgatgaggctcatctgatccaaaggtggtttgaacacgtccaggagaccaaacccaccatcatggtcacctacaacggggacttttttgactggccatttgtggaggcccgggcagcagtccacggtctgagcatgcagcaggagataggcttccagaaggacagccagggggagtacaaggcgccccagtgcatccacatggactgcctcaggtgggtgaagagggacagttaccttcctgtgggcagtcataatctcaaggcggccgccaaggccaagctaggctatgatcccgtggagctagacccggaggacatgtgccggatggccacggagcagccccagactctggccacgtattctgtgtcagatgctgtcgccacttactacctgtacatgaagtacgtccacccattcatctttgctctgtgcaccattattcccatggagcccgacgaggtgctgcggaagggctctggcactctgtgtgaggccttgctgatggtgcaggccttccacgccaacatcatcttccccaacaagcaagagcaggagttcaataagctgacggacgacggacacgtgctggactctgagacctacgtcgggggccacgtggaggccctcgagtctggggttttccgcagcgatatcccttgccggtttaggatgaatcctgccgcctttgacttcctgctgcagcgggttgagaagaccttgcgccacgcccttgaggaagaggagaaagtgcctgtggagcaagtcaccaactttgaagaggtgtgtgatgagattaagagcaagcttgcctccctgaaggacgttcccagccgcatcgagtgtccactcatctaccacctggacgtgggggccatgtaccccaacatcatcctgaccaaccgcctgcagccctctgccatggtggacgaagccacctgtgctgcctgtgacttcaataagcctggagcaaactgccagcggaagatggcctggcagtggaggggcgagttcatgccagccagtcgcagcgaataccatcggatccagcaccagctggagtcagagaagttcccccccttgttcccagaggggccagctcgggcctttcatgaactgtcccgcgaggaacaggcgaaatacgagaagagaaggctggcggattactgccggaaagcctacaagaagatccacatcaccaaggtggaagagcgtctcaccaccatctgccagcgggaaaactccttctacgtggacaccgtgcgtgccttccgggacaggcgttacgagttcaaagggctccacaaggtgtggaaaaagaagctctcggcggccgtggaggtgggcgacgcggctgaggtgaagcgctgcaagaacatggaggtgctgtatgactcgctgcagctggcccacaagtgcatcctgaactccttctatggctatgtcatgcgcaagggggctcgctggtactccatggagatggctggcatcgtctgcttcacaggggccaacatcatcacccaggcacgggagctgatcgagcagattgggaggcccttagagctggacacagatggtatatggtgcgtcctgcccaacagcttcccagaaaattttgtcttcaagacgaccaatgtgaagaagcccaaagtgaccatctcctacccaggcgccatgttgaacatcatggtcaaggaaggcttcaccaatgaccagtaccaggagctggctgagccgtcctcactcacctacgtcacccgctcagagaacagcatcttttttgaggttgatgggccctaccttgccatgattcttccagcctccaaggaagaaggcaagaaattgaagaagaggtatgctgtgttcaatgaagacggttctctggctgagctcaagggctttgaggtcaaacgccgcggggaactgcagctgattaagatcttccaatcctcggtgtttgaggccttcctcaagggcagcacgctggaagaggtgtatggctctgtagccaaggtggctgactactggctggacgtgctgtacagcaaggcagccaacatgcctgactctgagctattcgagctcatctctgagaaccgttccatgtctcggaagctggaagattacggggagcagaagtctacgtccatcagcacagcaaagcgcctggccgagttcctgggagaccagatggtcaaggatgcagggctgagttgccgctacatcatctcccgcaagcccgagggctcccctgtcacggagagggccatcccacttgccattttccaagcagagcccacggtgaggaagcactttctccggaaatggctcaagagctcttcccttcaagactttgatattcgagcaattctggattgggactactacattgagcggctgggaagcgccatccagaagatcatcaccatccctgcggccctgcagcaggtaaagaacccagtgccacgtgtcaaacaccccgactggctgcacaaaaaactgctggagaagaatgatgtctacaagcagaagaagatcagtgagctcttcaccctggagggcaggagacaggtcacgatggccgaggcctcagaagacagtccgaggccaagtgctcctgacatggaggacttcggcctcgtaaagctgcctcacccagcagcccctgtcactgtgaagaggaagcgagttctttgggagagccaggaggagtcccaggacctcacgccgactgtgccctggcaggaaatcttggggcagcctcccgccctgggaaccagccaggaggaatggcttgtctggctccggttccacaagaagaagtggcagctgcaggcccggcagcgcctcgcccgcaggaagaggcagcgtctggagtcggcagagggtgtgctcaggcccggggccatccgggatggtcctgccacggggctggggagcttcttgcgaagaactgcccgcagcatcctggaccttccgtggcagattgtgcagatcagcgagaccagccaggccggcctgttcaggctgtgggcgctcgttggcagtgacttgcactgcatcaggctgagcatcccccgtgtgttctacgtgaaccagcgagtcgctaaagcggaggagggtgcttcgtatcgcaaggtaaatcgggtccttcctcgctccaacatggtctacaatctctatgagtattcagtgccagaggacatgtaccaggaacacatcaacgagatcaacgctgagctgtcagcgccagacatcgagggcgtatatgagactcaggttccgttactgttccgggccctggtgcacctgggctgtgtgtgtgtggtcaataaacagctggtgaggcacctttcaggctgggaagcagagacctttgctcttgagcacctggagatgcgctctctggcccagttcagctacctggaaccagggagtatccgccatatctacctgtaccaccacgcacaggcccacaaagcgctcttcgggatcttcatcccctcacagcgcagggcatccgtctttgtgctggacactgtgcgcagcaaccagatgcccagccttggcgccctgtactcagcagagcacggcctcctcctggagaaggtgggccctgagctcctgccaccccccaaacacaccttcgaagttcgggcagaaactgacctgaagaccatctgcagagccatccagcgattcctgctcgcctacaaggaggagcgccgggggcccacactcatcgctgttcagtccagctgggagctgaagaggctggccagtgaaattcctgtcttggaggaattcccactggtgcctatctgtgtggctgacaagatcaactatggggtcctggactggcagcgccatggagcccggcgcatgatccgtcactacctcaacctggacacctgcctgtcgcaggccttcgagatgagcaggtactttcacattcccattgggaacctaccagaggacatctccacattcggctccgacctcttctttgcccgccacctccagcgccacaaccacctgctctggctgtcccctacagcccgccctgacctgggtggaaaggaggctgatgacaactgtcttgtcatggagttcgatgaccaagccactgttgagatcaacagttcaggctgttactccacagtgtgtgtggagctggaccttcagaacctggccgtcaacaccattctccagtctcaccatgtcaacgacatggagggggccgacagcatggggatcagcttcgacgtgatccagcaggcctccctggaggacatgatcacgggtggtcaggctgccagtgccccggccagctacgatgagacagccctgtgctctaacaccttcaggatcctgaagagcatggtcgtgggctgggtgaaggagatcacccagtaccacaacatctatgcagacaaccaggtgatgcacttctaccgctggcttcggtcgccatcctctctgcttcatgaccctgccctgcaccgcacactccacaacatgatgaagaagctcttcctgcagctcatcgctgagttcaagcgcctggggtcatcagtcatctacgccaacttcaaccgcatcatcctctgtacaaagaagcgccgtgtggaagatgccatcgcttacgtggagtacatcaccagcagcatccattcaaaggagaccttccattctctgacaatttctttctctcgatgctgggaatttcttctctggatggatccatctaactatggcggaatcaaaggaaaagtttcatctcgtattcactgtggactgcaagactcccagaaagcagggggagcagaggatgagcaggaaaatgaggacgatgaggaggaaagagatggggaggaggaggaagaggcggaggaatccaacgtggaggatttactggaaaacaactggaacattttgcagtttttgccacaggcagcctcctgccagaactacttcctcatgattgtttcagcgtacatcgtggccgtgtaccactgcatgaaggacgggctgaggcgcagtgctccagggagcacccccgtgaggaggaggggggccagccagctctcccaggaggccgagggggcggtcggagcccttcccggaatgatcaccttctctcaggattatgtcgcaaatgagctcactcagagcttcttcaccatcactcagaagattcagaagaaagtcacaggctctcggaactccactgagctctcagagatgtttcctgtcctccccggttcccacttgctgctcaataaccctgccctggagttcatcaaatacgtgtgcaaggtgctgtccctggacaccaacatcacaaaccaggtgaataagctgaaccgagacctgcttcgcctggtggatgtcggcgagttctccgaggaggcccagttccgagacccctgccgctcctacgtgcttcctgaggtcatctgccgcagctgtaacttctgccgcgacctggacctgtgtaaagactcttccttctcagaggatggggcggtcctgcctcagtggctctgctccaactgtcaggcgccctacgactcctctgccatcgagatgacgctggtggaagttctacagaagaagctgatggccttcaccctgcaggacctggtctgcctgaagtgccgcggggtgaaggagaccagcatgcctgtgtactgcagctgcgcgggagacttcgccctcaccatccacacccaggtcttcatggaacagatcggaatattccggaacattgcccagcactacggcatgtcgtacctcctggagaccctggagtggctgctgcagaagaacccacagctgggccattagccagccccgggccccgggtgcctctgcgtccgtgccaggcctcctgatgccaaggccacatccccgtgcttccagtgaccagaccactgaccaccctgactgtccaaacctgtgaccccaggccagggaacggggaggaaaccaaagaaaaccattttcagggagctcagacgtcacaggagggagcgggagcaggatgtggccctggcctcgccagagcacctgaagaagcaggccgtgagcgaggctgcgagtgccctgggcgccgtttctcacgcagtgaatgcttttccaggcctctgttgcttcctgcaccacacctggtggggtgggagcgtcctctaggtgcccctagttctttgtcctgcctcccagagggaggaaaagcccctgggggcttctggctccctgagattgggctctgagacgagacgggttcccaaggccctggtggggctggagtctcacctgtttgcatggagaaatgggctggccccacagcctcacaggagcagtttgtgggctggtttccccaggaatccagaccctaacccgtgagaatctggattttggcttgtgagccctgcttatttggagccgggtctagagggaaccctctatcagcctcaggaaaacaagacctctgtgcacctcacttttggctcactgcagcccttgtccttcacctccacacaggaccagctggaagcagaaagaagaaaggccaatttcacagggcaccaaacaagtatgaaatgtaaatcagaaatgcagacaccccagacgagagcctcacaggagggagggggccccacaggctccccaggaggctcgtgtctttggcccagagccagccttagtttgtccctgccatctactgtctgaggccatcgctgctacactttgtttttatttgtatttcatactgaagtttc

SEQ ID NO: 163077 - DNA, 6800 bp, Artificial Sequence
  derived and/or modified sequence
agccaacggctccatgtctctgaggagcggcgggcggcggcgcgcggacccaggcgcggatggcgaggccagcagggatgatggcgccacttcctcagtttcggcactcaagcgcctggaacggagtcagtggacggataagatggatttgcggtttggttttgagcggctgaaggagcctggtgagaagacaggctggctcattaacatgcatcctgtggctttgccctataaaccgtatttctacattgcgaccagaaagggttgtgagcgagaagtttcatcttttctctccaagaagtttcagggcaaaattgcaaaagtggagactgtccccaaagaggatctggacttgccaaatcacttggtgggtttgaagcgaaattacatcaggctgtccttccacactgtggaggatcttgtcaaagtgaggaaggagatctcccctgccgtgaagaagaacagggagcaggatcacgccagcgacgcgtacacagctctgctttccagtgttctgcagaggggcggtgtcattactgatgaagaggaaacctctaagaagatagctgaccagttggacaacattgtggacatgcgcgagtacgatgttccctaccacatccgcctctccattgacctgaagatccacgtggctcattggtacaatgtcagataccgaggaaatgcttttccggtagaaatcacccgccgagatgaccttgttgaacgacctgaccctgtggttttggcatttgacattgagacgaccaaactgcccctcaagtttcctgatgctgagacagaccagattatgatgatttcctacatgatcgatggccagggctacctcatcaccaacagggagattgtttcagaagatattgaagattttgagttcacccccaagccagaatatgaaggccccttttgtgtcttcaatgaacccgatgaggctcatctgatccaaaggtggtttgaacacgtccaggagaccaaacccaccatcatggtcacctacaacggggacttttttgactggccatttgtggaggcccgggcagcagtccacggtctgagcatgcagcaggagataggcttccagaaggacagccagggggagtacaaggcgccccagtgcatccacatggactgcctcaggtgggtgaagagggacagttaccttcctgtgggcagtcataatctcaaggcggccgccaaggccaagctaggctatgatcccgtggagctagacccggaggacatgtgccggatggccacggagcagccccagactctggccacgtattctgtgtcagatgctgtcgccacttactacctgtacatgaagtacgtccacccattcatctttgctctgtgcaccattattcccatggagcccgacgaggtgctgcggaagggctctggcactctgtgtgaggccttgctgatggtgcaggccttccacgccaacatcatcttccccaacaagcaagagcaggagttcaataagctgacggacgacggacacgtgctggactctgagacctacgtcgggggccacgtggaggccctcgagtctggggttttccgcagcgatatcccttgccggtttaggatgaatcctgccgcctttgacttcctgctgcagcgggttgagaagaccttgcgccacgcccttgaggaagaggagaaagtgcctgtggagcaagtcaccaactttgaagaggtgtgtgatgagattaagagcaagcttgcctccctgaaggacgttcccagccgcatcgagtgtccactcatctaccacctggacgtgggggccatgtaccccaacatcatcctgaccaaccgcctgcagccctctgccatggtggacgaagccacctgtgctgcctgtgacttcaataagcctggagcaaactgccagcggaagatggcctggcagtggaggggcgagttcatgccagccagtcgcagcgaataccatcggatccagcaccagctggagtcagagaagttcccccccttgttcccagaggggccagctcgggcctttcatgaactgtcccgcgaggaacaggcgaaatacgagaagagaaggctggcggattactgccggaaagcctacaagaagatccacatcaccaaggtggaagagcgtctcaccaccatctgccagcgggaaaactccttctacgtggacaccgtgcgtgccttccgggacaggcgttacgagttcaaagggctccacaaggtgtggaaaaagaagctctcggcggccgtggaggtgggcgacgcggctgaggtgaagcgctgcaagaacatggaggtgctgtatgactcgctgcagctggcccacaagtgcatcctgaactccttctatggctatgtcatgcgcaagggggctcgctggtactccatggagatggctggcatcgtctgcttcacaggggccaacatcatcacccaggcacgggagctgatcgagcagattgggaggcccttagagctggacacagatggtatatggtgcgtcctgcccaacagcttcccagaaaattttgtcttcaagacgaccaatgtgaagaagcccaaagtgaccatctcctacccaggcgccatgttgaacatcatggtcaaggaaggcttcaccaatgaccagtaccaggagctggctgagccgtcctcactcacctacgtcacccgctcagagaacagcatcttttttgaggttgatgggccctaccttgccatgattcttccagcctccaaggaagaaggcaagaaattgaagaagaggtatgctgtgttcaatgaagacggttctctggctgagctcaagggctttgaggtcaaacgccgcggggaactgcagctgattaagatcttccaatcctcggtgtttgaggccttcctcaagggcagcacgctggaagaggtgtatggctctgtagccaaggtggctgactactggctggacgtgctgtacagcaaggcagccaacatgcctgactctgagctattcgagctcatctctgagaaccgttccatgtctcggaagctggaagattacggggagcagaagtctacgtccatcagcacagcaaagcgcctggccgagttcctgggagaccagatggtcaaggatgcagggctgagttgccgctacatcatctcccgcaagcccgagggctcccctgtcacggagagggccatcccacttgccattttccaagcagagcccacggtgaggaagcactttctccggaaatggctcaagagctcttcccttcaagactttgatattcgagcaattctggattgggactactacattgagcggctgggaagcgccatccagaagatcatcaccatccctgcggccctgcagcaggtaaagaacccagtgccacgtgtcaaacaccccgactggctgcacaaaaaactgctggagaagaatgatgtctacaagcagaagaagatcagtgagctcttcaccctggagggcaggagacaggtcacgatggccgaggcctcagaagacagtccgaggccaagtgctcctgacatggaggacttcggcctcgtaaagctgcctcacccagcagcccctgtcactgtgaagaggaagcgagttctttgggagagccaggaggagtcccaggacctcacgccgactgtgccctggcaggaaatcttggggcagcctcccgccctgggaaccagccaggaggaatggcttgtctggctccggttccacaagaagaagtggcagctgcaggcccggcagcgcctcgcccgcaggaagaggcagcgtctggagtcggcagagggtgtgctcaggcccggggccatccgggatggtcctgccacggggctggggagcttcttgcgaagaactgcccgcagcatcctggaccttccgtggcagattgtgcagatcagcgagaccagccaggccggcctgttcaggctgtgggcgctcgttggcagtgacttgcactgcatcaggctgagcatcccccgtgtgttctacgtgaaccagcgagtcgctaaagcggaggagggtgcttcgtatcgcaaggtaaatcgggtccttcctcgctccaacatggtctacaatctctatgagtattcagtgccagaggacatgtaccaggaacacatcaacgagatcaacgctgagctgtcagcgccagacatcgagggcgtatatgagactcaggttccgttactgttccgggccctggtgcacctgggctgtgtgtgtgtggtcaataaacagctggtgaggcacctttcaggctgggaagcagagacctttgctcttgagcacctggagatgcgctctctggcccagttcagctacctggaaccagggagtatccgccatatctacctgtaccaccacgcacaggcccacaaagcgctcttcgggatcttcatcccctcacagcgcagggcatccgtctttgtgctggacactgtgcgcagcaaccagatgcccagccttggcgccctgtactcagcagagcacggcctcctcctggagaaggtgggccctgagctcctgccaccccccaaacacaccttcgaagttcgggcagaaactgacctgaagaccatctgcagagccatccagcgattcctgctcgcctacaaggaggagcgccgggggcccacactcatcgctgttcagtccagctgggagctgaagaggctggccagtgaaattcctgtcttggaggaattcccactggtgcctatctgtgtggctgacaagatcaactatggggtcctggactggcagcgccatggagcccggcgcatgatccgtcactacctcaacctggacacctgcctgtcgcaggccttcgagatgagcaggtactttcacattcccattgggaacctaccagaggacatctccacattcggctccgacctcttctttgcccgccacctccagcgccacaaccacctgctctggctgtcccctacagcccgccctgacctgggtggaaaggaggctgatgacaactgtcttgtcatggagttcgatgaccaagccactgttgagatcaacagttcaggctgttactccacagtgtgtgtggagctggaccttcagaacctggccgtcaacaccattctccagtctcaccatgtcaacgacatggagggggccgacagcatggggatcagcttcgacgtgatccagcaggcctccctggaggacatgatcacgggtggtcaggctgccagtgccccggccagctacgatgagacagccctgtgctctaacaccttcaggatcctgaagagcatggtcgtgggctgggtgaaggagatcacccagtaccacaacatctatgcagacaaccaggtgatgcacttctaccgctggcttcggtcgccatcctctctgcttcatgaccctgccctgcaccgcacactccacaacatgatgaagaagctcttcctgcagctcatcgctgagttcaagcgcctggggtcatcagtcatctacgccaacttcaaccgcatcatcctctgtacaaagaagcgccgtgtggaagatgccatcgcttacgtggagtacatcaccagcagcatccattcaaaggagaccttccattctctgacaatttctttctctcgatgctgggaatttcttctctggatggatccatctaactatggcggaatcaaaggaaaagtttcatctcgtattcactgtggactgcaagactcccagaaagcagggggagcagaggatgagcaggaaaatgaggacgatgaggaggaaagagatggggaggaggaggaagaggcggaggaatccaacgtggaggatttactggaaaacaactggaacattttgcagtttttgccacaggcagcctcctgccagaactacttcctcatgattgtttcagcgtacatcgtggccgtgtaccactgcatgaaggacgggctgaggcgcagtgctccagggagcacccccgtgaggaggaggggggccagccagctctcccaggaggccgagggggcggtcggagcccttcccggaatgatcaccttctctcaggattatgtcgcaaatgagctcactcagagcttcttcaccatcactcagaagattcagaagaaagtcacaggctctcggaactccactgagctctcagagatgtttcctgtcctccccggttcccacttgctgctcaataaccctgccctggagttcatcaaatacgtgtgcaaggtgctgtccctggacaccaacatcacaaaccaggtgaataagctgaaccgagacctgcttcgcctggtggatgtcggcgagttctccgaggaggcccagttccgagacccctgccgctcctacgtgcttcctgaggtcatctgccgcagctgtaacttctgccgcgacctggacctgtgtaaagactcttccttctcagaggatggggcggtcctgcctcagtggctctgctccaactgtcaggcgccctacgactcctctgccatcgagatgacgctggtggaagttctacagaagaagctgatggccttcaccctgcaggacctggtctgcctgaagtgccgcggggtgaaggagaccagcatgcctgtgtactgcagctgcgcgggagacttcgccctcaccatccacacccaggtcttcatggaacagatcggaatattccggaacattgcccagcactacggcatgtcgtacctcctggagaccctggagtggctgctgcagaagaacccacagctgggccattagccagccc

SEQ ID NO: 163078 - DNA, 771 bp, Artificial Sequence
  derived and/or modified sequence
atgtttccagtgctgccaggctctcatttgctgctgaataaccctgcacttgaatttattaaatacgtgtgcaaagttttaagcttggatacaaatatcaccaaccaggtgaataagttgaatcgggatctgctgaggcttgtggacgtgggagagttttctgaggaggcacaattccgcgacccctgtaggagctacgtgcttcccgaggtgatctgtaggtcttgcaacttctgtcgggatctggatctttgtaaagattcttcattctcagaagacggggctgttttaccccagtggctctgttctaattgccaggctccttacgatagcagtgcgatcgaaatgaccttggtcgaggtactgcagaagaaactaatggcttttacccttcaggacttgaaagaggcagatacccccaaatgcgaggagaaggagagacgaaagagagagctgcattcttccgctacaggaagatcctgtcgcggtgccagtgaacagcgcttgggcgatgcaccctcttgcagagtcgtggtacacggggtgcaagcttgtaggatggaaggtgtctgtctcaagtgccgtggcgtgaaagagaccagcatgccagtttattgcagttgcgcgggagacttcgccctgaccattcacactcaggtttttatggaacagatcggcatcttcaggaacatcgctcaacactatggaatgtcctatctactcgaaacactagagtggctgttgcagaaaaatccccagttgggccactag

SEQ ID NO: 163079 - DNA, 6860 bp, Artificial Sequence
  derived and/or modified sequence
atgagcctgcgctcaggtggacgacgcagggccgatccaggtgcagacggggaggcctcccgcgatgacggcgctaccagttccgtgagcgctctgaagcgactagagcgttcccagtggaccgacaagatggatctgaggtttggctttgagcggttgaaagagcccggtgagaaaaccgggtggttgattaacatgcatccgaccgagattctagatgaggataagagactcggtagcgctgttgattactacttcattcaagatgacggtagtcggtttaaagtggccctcccatacaagccgtatttttacatagctactagaaaaggctgtgagagagaggtgtcgtcattcctttctaagaaatttcaaggcaaaattgccaaggttgagacagtacctaaggaggacctagatcttcccaaccacctcgtcggcttgaagcggaactatatccgcttaagtttccataccgtggaggacctggttaaggtgagaaaagagataagtccggctgtaaaaaagaaccgagagcaggatcacgcatcggacgcttataccgccctgctgtcttctgtcctgcagcggggaggggtgatcaccgacgaggaggaaaccagcaaaaagattgccgaccagcttgacaacatcgtggatatgcgggaatacgacgtaccgtatcacattcgcttgagtatcgatctgaagatccatgtcgcacattggtacaatgttagataccgaggaaatgcttttcccgttgagattactcgcagagacgatctcgtggaacgcccagaccccgttgtgctggcgttcgatatcgagaccacgaagctgccccttaagtttccagatgcagagactgatcagatcatgatgatatcttacatgattgatggccagggctacctcatcactaaccgcgagattgtatccgaagatatcgaggacttcgaattcaccccgaaacctgaatatgagggaccattctgtgtgttcaatgaacctgacgaagcacatctcatccagaggtggttcgaacatgtacaggagaccaaacccactattatggtgacctacaatggagatttcttcgattggccgttcgtggaggcgcgtgccgcagtacatggattatctatgcagcaggaaataggcttccagaaggattctcagggtgagtataaagcaccccagtgcattcatatggattgcttgcgctgggtgaagcgggatagttaccttccagtgggctcccacaacctcaaagctgctgctaaagcgaaactgggatatgatcctgtagaattagatcctgaggacatgtgcagaatggccacagagcaacctcagactctggcaacctactccgtttccgatgccgtcgctacgtactatctgtacatgaagtacgtgcacccttttatcttcgcattatgtacaatcatcccgatggagccggacgaagtcctgagaaaagggagcggcacattgtgtgaggccctcttaatggtgcaagctttccatgcaaatatcatcttccctaacaaacaagagcaagagttcaacaagttaaccgatgatggtcatgtgcttgattccgaaacctatgtcgggggacatgtggaagcactcgagagtggggtttttcgcagcgacattccgtgtcgttttcgcatgaatccagctgcctttgactttctccttcagcgggttgagaagacattgcgtcatgctctggaggaggaggaaaaggtgcctgttgaacaggtgacgaatttcgaagaagtctgtgatgagattaagtctaaacttgcctcccttaaggacgtgccttctcgaattgaatgcccactgatctatcatctggacgtcggggcaatgtaccccaatataatcctcactaacaggctgcagccatcagccatggttgacgaagctacttgcgctgcctgcgatttcaataagcccggtgccaattgccagcgaaaaatggcgtggcaatggagaggcgaatttatgccggcttctcggagcgagtaccatcgtattcaacaccaactcgaaagcgagaagttcccgccactgttccccgaaggcccagctcgggcattccacgaactgagcagggaggagcaagcgaagtacgagaagcggagactggccgattactgccgaaaagcatataagaagatccacattaccaaggtcgaagagcgccttactaccatctgccagagggagaactctttttacgtcgataccgttcgggctttccgcgaccgtcggtacgaattcaagggattgcacaaagtctggaaaaaaaaactcagtgctgccgttgaagtcggagatgcagccgaggtgaaaagatgcaaaaatatggaagtgctgtacgactccctgcagcttgcacacaaatgtattctgaattcattctatgggtacgtgatgaggaagggagctagatggtatagcatggaaatggctgggatcgtttgtttcaccggggctaacatcattacgcaggctagagagcttattgaacaaatagggcgacccctggagctcgataccgatggcatctggtgcgtgctccctaattcgtttcctgagaattttgtgttcaagaccacaaatgttaagaaaccaaaagtcaccatttcttaccctggcgcaatgcttaatattatggtcaaggaagggttcacaaacgaccagtaccaggagctcgccgaaccctccagcttgacttacgtgacaagatctgagaacagcatcttttttgaggttgatggaccttaccttgctatgattctcccagccagcaaggaagaagggaagaagctcaagaaacgttacgcagtttttaatgaggatggatcactggcagaactgaaaggattcgaggtgaagcgtcgcggtgaattgcaactgatcaagatcttccagtcctctgtgtttgaagcctttcttaagggaagcacgctggaagaggtttatgggtctgtggctaaagtcgccgattattggttggatgttctgtattcaaaagcggctaacatgccggatagcgagctctttgaactaatctccgaaaacaggtccatgtcacgtaagttagaagattacggggaacagaaatcaacatccatcagcactgcgaaaagactcgctgagtttctgggtgaccagatggtgaaggatgccggactgtcgtgcaggtacattatctccagaaagcctgagggctctcccgtgactgagcgggctatacctctggcgattttccaagcagagcctactgtgagaaagcactttctgcggaaatggctgaagtcttcctctcttcaagatttcgacatcagagcaatcttagattgggactattacatcgagaggctgggctccgccatccagaagattatcaccatcccggctgcactacagcaggtcaaaaatcctgtgcctcgggtaaaacacccggattggctgcacaagaagctgttggaaaaaaatgatgtgtataagcaaaagaagatttcagagctgttcacgctcgaagggaggcgccaggtgactatggctgaggccagcgaggattccccacggccttcagccccagacatggaggacttcggtctggtgaagttaccccatcctgcggctccagtgaccgtgaaacgcaaaagagtgctgtgggagagccaagaagaatcccaggatcttacgccaactgtcccttggcaggaaatattaggccaaccacctgcattaggcacatcacaggaggaatggctggtctggctcaggtttcacaaaaagaaatggcagcttcaagcccgacagaggctggctcggagaaaaagacagcgactggaatccgccgaaggagttctgcgacccggagcaatacgcgacggccctgctacaggactggggagcttcctgcgccgtacagcccgatcaattctggaccttccatggcagatcgttcagatctctgagacctcccaggccggactgtttcgactttgggccctggtcgggagcgatttgcattgtataaggctctctatcccacgggtgttctacgtcaaccaacgcgtggccaaggccgaggaaggagcttcttaccgaaaagtgaatcgagtgttacctaggtccaacatggtttataatctgtatgaatattctgtacctgaggacatgtatcaggaacatattaacgaaatcaatgccgagctctccgcccctgatatagaaggcgtgtacgaaacccaggtgcccctgttatttcgggcactggttcacttagggtgcgtctgcgtggtgaacaaacagctagtaagacacctctctggatgggaagcggaaacatttgcactggaacacctcgagatgcgcagcctggctcagttttcatacctggaacctggatctatccgccacatttacctatatcaccacgcccaggcccataaggctctattcggaatattcatcccaagtcaacgaagggcctctgtctttgtgctcgatacggtgaggtctaatcagatgcctagcctgggtgcactgtactcagccgagcacgggctgttgttggaaaaagtcgggcctgagctgctcccgccacccaaacacacgttcgaggtccgggctgagacagacctcaagaccatctgccgggctattcaaagatttctgctagcgtataaggaggagcggagaggtcctactctcatcgcagtgcagtcctcctgggagctcaaacgtcttgctagcgagatccctgtactggaagagtttcctctcgtcccgatatgcgttgccgataagatcaattatggcgtcctagattggcaacgccatggcgctcggcgaatgatccgccactacctcaatcttgacacctgccttagccaggcctttgaaatgtccagatatttccacatacctatcggaaatcttcccgaggatatctctacctttggttctgatctcttcttcgccagacatctgcagaggcacaatcatctcttatggctgagcccgactgcaagaccagacctagggggaaaagaagccgacgacaactgtctcgtgatggagtttgatgaccaggcaacggttgaaataaacagctcaggctgctactctaccgtatgcgttgaacttgatctgcagaacctggccgttaatactatactgcagtctcaccatgtgaatgatatggagggggcagactctatgggaatcagcttcgatgtgatccagcaggcctctttggaggatatgattactggcggacaggctgctagcgcccctgccagctatgacgagactgctctctgctctaacacgtttcgaatcctcaagagtatggtcgtcggatgggtgaaggaaatcacacagtatcacaatatttatgccgacaatcaagtcatgcacttttaccggtggctccggtcgccatccagtctgcttcacgaccctgcactccaccgtacgctgcataacatgatgaagaaactgttcttgcagctcattgccgagttcaagaggctcggctctagcgtcatctacgcaaatttcaacagaatcattctctgtaccaagaaacggagagtggaggatgctattgcctacgtggaatacattacaagctccatccattctaaagagacattccattcacttaccatttctttcagcaggtgttgggagttcttgttatggatggaccctagcaactacggtggcatcaaaggaaaggtgtcaagccggatccactgtggcctgcaggactcccagaaggctggcggagccgaggacgagcaagaaaatgaggacgacgaggaggagagagacggggaagaggaggaggaggccgaagagagcaatgtggaggacctcctcgagaataattggaacatacttcaattcctgccccaggcggcatcctgtcagaattattttcttatgatcgtctcagcctacattgtggccgtgtaccattgcatgaaagatgggctgcggcgaagtgctcctgggagtaccccagtgagacggcgaggcgcttctcagctctctcaggaggcagagggagccgtgggagcgcttccgggaatgatcaccttttctcaggattatgtcgccaatgagctgactcagagctttttcaccattactcagaagatacagaagaaagttactggcagcaggaatagtacggagctgagcgaaatgttccctgtcttgcctggaagtcatttgctgttaaataacccagctctcgagtttattaagtatgtgtgtaaggtgctgagcctggatacaaacattactaatcaggttaataaattaaaccgggacctgctgaggctggtggatgtgggcgagttttctgaggaagcccagtttcgcgatccatgccgctcttatgtgttgcccgaggtgatctgcaggagttgcaacttctgtcgggatctcgacctgtgcaaagattcttcttttagcgaggatggcgcagtactcccccagtggctatgtagcaattgtcaggcaccctatgactcatcagcgattgaaatgactctggtcgaggtccttcaaaaaaaactcatggcctttaccctgcaagacttggtgtgcctgaaatgtcggggtgtaaaggagacttctatgccagtgtattgttcttgcgccggtgacttcgcactgaccatccatacgcaggtattcatggagcagattgggatctttaggaacatagcacaacactatgggatgtcctacctcttggagactctcgagtggctgctgcagaaaaaccctcagctgggacacta

SEQ ID NO: 163080 - DNA, 1491 bp, Artificial Sequence
  derived and/or modified sequence
atggagggcatccttaaaagcatggtcgtgggatgggtgaaagagatcacccagtatcataatatttatgctgataaccaggtgatgcatttttaccgttggctgcgctcccccagcagtttgctgcatgaccccgctctacaccgtactctgcacaacatgatgaaaaagttattcctgcaactcatcgcagagttcaaacgacttggatcctctgtgatttacgctaacttcaatcggattatcttatgcactaaaaagaggcgtgtagaagacgcaatcgcgtacgtggagtacatcacctcaagtattcacagcaaagaaacatttcattctctgacaatttctttttccagatgctgggagtttttgctctggatggatccttcaaactacgggggtattaagggaaaggtgtctagtcgaatccactgtggcctccaggattcccagaaggcgggtggagcagaagatgaacaggagaatgaggacgacgaagaagagagagatggagaagaagaggaggaggcggaagaatccaacgtggaggatcttttagaaaacaattggaatattctgcagtttctgcctcaggccgcatcttgtcaaaattactttttgatgatagtctctgcctatatcgttgcagtgtatcactgtatgaaggacggcctgcgtagaagtgctccaggctcgaccccggtccgaagacgtggagcaagccagttgtcgcaggaggctgaaggcgctgtgggggctctccccggtatgatcactttttctcaggattatgttgccaacgagctgactcaatcatttttcactatcacccagaagatccagaaaaaagttacaggctctcgcaactcaacggaactcagtgagatgttccctgtcctccctggcagtcacctcctgttaaacaatcccgcactggagtttatcaagtatgtgtgtaaagtgctatcactagataccaatattacaaatcaggtgaacaagctgaatagggatctcctacgcttagttgatgttggagagttcagtgaagaagcccagttccgtgatccctgccggtcatacgtgctgccagaggtcatttgccgcagttgtaacttctgtagggatctggacctttgcaaggattccagcttttcagaggacggcgctgtgctgccacagtggctctgtagcaattgccaagccccttatgactcatcagccatcgagatgacactggtggaggtcctgcagaaaaaactgatggcgttcaccctacaagacttagtctgcctcaagtgcaggggcgtgaaggaaacgtcaatgccggtatactgctcttgtgcaggtgactttgccctgaccattcatacgcaggtgtttatggaacaaattggtatttttcgaaatatcgctcagcattatggcatgagctacctattagaaaccttggaatggcttttgcaaaagaatcctcaactgggacattag

SEQ ID NO: 163081 - DNA, 6893 bp, Artificial Sequence
  derived and/or modified sequence
atgtccagacctctgggccttaaaagctttccccgacacaagcaggcccctctgcctttatctctcacctttcacggctgccttctattaagacgtgatgacggtgcaactagctcagtgtctgccctgaaaagactggagcgtagccagtggaccgataaaatggacttaagatttggcttcgaacgcctgaaagaacccggtgaaaaaactggttggcttataaacatgcatccgaccgagatcttggatgaggataagcggctcggaagcgcagttgattattattttatccaagacgatggttcacggttcaaggtggcactgccatacaaaccttatttctatatcgcaacaaggaagggttgtgagcgagaggtctcaagctttctttcgaagaaattccagggaaagatcgcaaaggtcgaaactgtgccaaaggaagatcttgacctccctaaccatctagtggggctcaagaggaattacattcgcctgagcttccataccgttgaggaccttgtgaaggtacgtaaggaaatttctcccgcagtgaagaagaatagagagcaagatcatgcttctgatgcgtatacagctttgctgtccagcgtgttgcaacgaggtggagtgatcaccgatgaggaggagacaagtaaaaagattgcagatcagctggacaatatcgtggatatgagagagtacgatgtaccctaccacatacgcctgagcatcgacctgaaaattcacgtcgcccactggtacaatgtgcgatatagggggaacgccttccctgtggaaattacccgccgtgatgatctagtggagcgtcccgatcccgtggtacttgcttttgatatcgaaaccacaaagctacctctgaaattcccagacgccgagaccgatcagattatgatgatttcttatatgatagacggccaggggtatctgatcacgaatagggaaattgtatcagaggacatcgaagacttcgaatttaccccgaaacccgagtacgaagggccattctgtgtcttcaatgaaccagatgaagcgcatctgattcaacgctggttcgagcatgtgcaagaaacaaaaccaaccattatggtgacttacaatggggacttttttgactggccatttgttgaggcgagagcagctgtgcatggcctgtccatgcaacaagagattggctttcagaaggatagtcaaggtgaatataaggcccctcagtgcatccacatggactgcctgagatgggtgaagcgggattcctatttgcctgtcgggtcacacaacctgaaggccgctgctaaggccaagctcgggtatgatcccgtggaactggaccctgaggatatgtgtcgtatggccacagaacagcctcaaacactggctacctactcagttagcgacgcagtagcgacatactatttgtacatgaagtacgttcacccgttcatctttgccctctgcactatcattcctatggagcccgacgaggtattgcgcaaaggtagcggcaccctgtgtgaggccctgcttatggtgcaggcctttcatgccaatatcattttcccaaacaagcaggaacaagagtttaacaagctgacagatgatgggcacgtgctggatagcgaaacatatgtcggcggacacgttgaagctttggagtccggtgtgtttagatcggatataccttgcagattccgaatgaacccagccgcattcgatttcctcctccagagggttgagaagacactgaggcatgctctagaggaagaagagaaggtccctgttgagcaggtgacaaatttcgaagaggtttgcgatgaaattaagtccaagctggccagcctgaaagacgtgccctctcgtatcgaatgccccttgatctatcatctcgacgtgggtgccatgtaccccaacattatcctgaccaaccgactgcagcccagtgcaatggtggacgaggctacatgtgccgcttgtgatttcaacaagcccggagccaattgccagaggaaaatggcttggcagtggagaggtgagttcatgccggcatcccggtccgagtatcataggatccagcaccagttagaaagcgagaaattcccccctttgtttccggagggacccgctcgcgctttccacgagctgtctagggaggagcaggctaaatacgagaaacgacgcctggcggactattgtcgcaaggcttataaaaagatccatatcaccaaggtagaggagaggcttacaactatatgtcagcgggaaaattctttctacgtggataccgtgcgggcatttcgagatcgaaggtacgaattcaagggtctgcacaaagtgtggaaaaagaagcttagtgccgcagtcgaggtcggtgacgccgctgaagtgaagagatgtaaaaatatggaagtgctgtatgactcactgcagttggcacacaagtgcattctgaattctttttacggttatgtaatgcgtaagggagctcgttggtatagcatggagatggccggtattgtgtgtttcacgggcgcaaacattatcacccaggccagagagctaatagaacagatcgggagaccgctggagctggacacggacggcatttggtgcgtgcttcccaactcattccctgaaaattttgtgtttaagaccactaacgtgaaaaagccgaaggttaccatatcctaccctggggctatgctgaacatcatggtcaaagagggtttcacaaacgatcagtatcaggagctggccgaacccagctccctgacctacgtgacgaggtccgagaactctatcttcttcgaggtcgatggaccgtatttggccatgattttgcctgctagtaaagaagaaggaaagaaactgaaaaagaggtacgcggtctttaatgaggacggcagcctcgctgaactgaagggctttgaggtgaagcgacgaggcgaattgcagctgatcaaaatttttcagtccagcgtgttcgaagcctttctcaaaggcagcactttggaggaagtttatggtagtgtggccaaggtggctgactattggcttgatgtgttgtattctaaggcagcaaatatgcctgacagcgaactgttcgagcttatctcagaaaatcgcagcatgtcccgaaaactggaagactatggtgaacagaaatccaccagcatatcgactgcaaagagacttgcggagttcctcggggatcagatggtcaaagacgctggattaagttgccgatacattatctcccgaaagcccgagggatcccctgtcacagaaagggccatccccctggctatcttccaagccgaaccgacggtgagaaaacatttcctgcgcaaatggctcaagtcaagctccttgcaagactttgacatccgggctatactagactgggattattacatcgagcggcttggttctgcaatacagaagattattactattcctgccgcactgcagcaggtgaagaacccagtgcccagggtgaaacaccccgactggttacacaagaaactcctggaaaaaaacgacgtttataagcagaagaaaatcagtgaactgtttaccttagaaggcagaagacaggttactatggcagaggccagcgaggattccccgaggccatcagcccctgacatggaggactttgggctcgttaaattgccacacccagccgctcctgtcactgtgaaacggaaacgtgttctgtgggaaagccaggaggagtctcaggatcttacaccgactgtaccctggcaagaaatcttagggcaaccaccggctctcggcacctcccaagaagagtggctggtttggctgaggttccataagaaaaagtggcaactgcaggcccgtcagcggctggccagacggaaaagacagcgccttgagtcggcagaaggggtattgcgccctggggctatacgcgacggccctgctactggcctgggttccttcctccgcagaacagcaaggtcgatactcgacctaccgtggcagatcgtgcagatatcagaaaccagccaagcagggctgtttaggttgtgggctctcgtgggatctgatttgcactgtattcgcctgagcattcctcgcgttttctacgtgaatcagcgggttgccaaggccgaagaaggagcttcctacagaaaagtaaatagggttctccccagaagcaacatggtgtacaacctctacgaatactctgtgccagaagacatgtaccaggagcacatcaacgagataaatgccgagctgtcagctcccgacatcgaaggagtgtatgagacacaggtgcccctgttgttccgggcattggtgcatctcggatgcgtgtgtgtcgtaaacaaacagctcgttagacatcttagtggctgggaagcggagacatttgctttagagcatctggagatgcgctcgttagcccagttctcctatctagaacccggatccatcagacacatttacctgtatcaccacgcccaggcccataaagcgctgttcggcatttttatccccagtcagaggcgcgcatctgttttcgtcttggatactgtgcggtcaaatcagatgccaagcctaggcgcactttactcagccgaacacggactcctgctggaaaaggttggcccagagctgctgcctcctcccaagcacacatttgaagtgagagctgagacagatcttaagaccatctgtcgggctattcagcggtttttacttgcttacaaagaggaacggagggggccaacattgatcgccgttcagagttcatgggaattaaagaggctcgcttcggagattcccgtgttggaggagttcccactggtgcctatctgtgtggcagacaagattaattacggagtcttggactggcagcgacatggagcccgtcgtatgatccggcactacctcaatttagatacctgtctaagccaggccttcgagatgtccagatatttccatatccccatcggcaacctgcccgaagatatctcaacatttggcagcgatctctttttcgcgcgtcatctgcagagacacaatcacctcctgtggttatcaccaactgctcgtccggatttgggcggaaaagaagccgatgataactgtcttgttatggaattcgatgaccaagccactgtcgagataaattcaagtggctgttactcaactgtgtgcgtggagctcgacctccagaacctagctgtgaacaccatcttgcagtcgcaccatgtcaacgacatggaaggcgctgactctatggggatctcttttgacgtgatccagcaggctagcctcgaggatatgatcaccgggggacaggctgcctccgccccagcttcttacgacgaaactgcactttgtagtaatacatttaggatactgaaatccatggtggtgggctgggttaaggaaatcacacagtatcacaacatctacgccgataaccaggtgatgcacttttacagatggctgagatccccaagctccttgctgcacgatccagccttgcataggaccttgcacaatatgatgaaaaagcttttcttgcagctgattgcagaatttaaacggcttggatcttccgtcatctatgccaacttcaaccgtattattctgtgtactaagaagcgaagggttgaggatgccatcgcttacgtggaatatatcactagttcaatccacagtaaagagactttccacagcctgaccatcagcttctctagatgctgggagttcctgctgtggatggacccctctaattacggcggaataaagggcaaggtttccagcaggattcattgcggcctccaggacagccagaaagctggtggcgcagaggatgagcaggaaaatgaggacgacgaagaggagcgagacggcgaagaagaagaagaggcagaagagtctaatgtggaggatctgctggaaaacaattggaatattctacagttccttccccaagcagcatcttgccaaaactacttcctgatgatagtttctgcttacattgtggccgtgtaccactgtatgaaggatggtctgcgacgcagcgccccagggtcgactcccgtgagacggagaggcgcttcgcagctgtcccaggaggccgagggagccgttggggcacttccgggtatgatcacttttagccaggattacgtggctaatgagcttacccagagcttcttcacaatcacgcagaaaattcaaaagaaggtgacaggctccagaaattccactgagctgtccgaaatgttcccagtgctgccgggaagccacctgctcttgaacaatccagctctggaattcatcaagtacgtgtgtaaagtgctcagcctggatacgaatattacaaatcaggtgaataaactgaaccgcgacctgctgcgccttgtcgatgtaggagagttcagtgaagaagcccagttcagggacccctgcagatcttacgtcctgccagaagtaatttgcagatcttgtaacttttgtagagatctcgatttatgtaaggacagctcattcagtgaggatggtgccgtgctccctcagtggctgtgctccaactgccaggcaccctatgacagcagcgccatcgaaatgactctggtcgaggtgttgcagaagaagctgatggcgttcacgttgcaagacctggtgtgcttgaagtgtagaggcgtcaaagagaccagtatgcctgtgtactgtagctgtgccggagactttgcgttgactatccacacacaagtcttcatggagcagatcggaatcttccgtaatatagcccagcactacggtatgtcctatctgctcgaaaccttggagtggctgcttcagaaaaatcctcaactcggccacta

SEQ ID NO: 163082 - DNA, 6779 bp, Artificial Sequence
  derived and/or modified sequence
atgagcctgcggtcagggggacgtcgaagggccgatcctggcgctgatggcgaggcaagtcgggacgacggagctaccagcagtgtgtctgccctaaagaggctcgagcgcagccagtggaccgataaaatggacctgcggttcggttttgagaggttgaaggagcccggagaaaaaaccggatggctaatcaatatgcatcctgtcgctctaccatacaagccatacttctacatcgccacgcggaaaggttgcgaacgggaagtgtctagttttctctcaaagaaatttcagggcaagatagctaaagtcgaaacagtaccgaaggaggatcttgacctcccgaatcacctggtaggcctcaagagaaactacatacgccttagcttccatactgtggaggacctcgtcaaggttaggaaagagatctcacctgcagttaagaaaaatcgggagcaggatcacgcttcagatgcctacactgccctcctcagcagtgtgctgcagaggggaggggtaatcacggacgaagaagagacctccaagaagatcgctgaccaactggacaacatcgttgacatgcgggagtatgacgtgccttaccatatccgactatcaattgaccttaagatccatgtagcccactggtacaacgtgaggtacagagggaatgccttcccagttgagattacacggcgagatgatttggtagagcgtcccgacccagtggttttagcatttgatattgaaaccacgaagttgccactgaagttcccagatgcggaaacagatcagattatgatgatcagctatatgattgacggtcagggatacttaataaccaatcgcgagatcgtaagcgaggacatagaggacttcgagttcacccccaagcctgaatatgagggtccattctgcgtttttaatgagcccgatgaagcccacctgatccagaggtggtttgaacacgtgcaggaaaccaaacctaccatcatggtcacctataatggtgattttttcgattggccctttgtcgaagccagggctgccgtgcacggtctcagtatgcagcaggaaataggttttcaaaaagactctcagggagagtacaaagcacctcaatgtatacacatggattgtcttcgatgggttaaacgcgactcatacctccccgtggggagccataatcttaaagctgccgctaaggccaagctgggctatgatcccgtggagctggacccagaggacatgtgtaggatggctacggaacagcctcagacactcgccacctattcagtgtccgacgcggtcgcaacttattatctgtatatgaagtatgtccatccgtttatcttcgccctctgtacaataatccctatggagccggatgaggttctgagaaagggaagtggaacgctgtgcgaggccctcctcatggtccaggcattccacgcaaatatcattttccccaacaagcaagaacaggagttcaataagctcacagatgatggacacgtgttggactcagaaacttacgtcgggggacacgtggaggctctggagtctggcgtgtttagatcagatatcccctgccggttcagaatgaacccagcagcgttcgatttccttctgcagcgagtagagaaaaccttaaggcatgccctggaggaggaggagaaggtgccagtggagcaggttaccaattttgaggaggtctgcgatgaaattaagtcgaaactggcctcccttaaggacgttccatctcgaatcgagtgtccactcatctaccaccttgacgttggcgcaatgtaccccaacattatattaaccaaccgattgcagccgtcggctatggtagacgaggcaacatgtgccgcttgcgatttcaataaaccaggggctaattgtcaaaggaagatggcttggcagtggcggggagagttcatgccagcatcgcggagtgaataccaccgtattcagcatcagttggaatctgaaaagtttccacccctgtttcctgaaggacccgcacgggcttttcacgagctgagtcgcgaagagcaggcgaaatatgagaaacgcagactcgccgattactgcagaaaggcttacaagaaaatacatatcaccaaggtggaagagcgcttgacaaccatatgtcagcgcgaaaactccttctacgtggacacggtacgcgcttttcgcgaccggagatatgaatttaagggactgcacaaggtctggaagaagaagctctccgccgcagtggaagtcggggacgctgccgaggtcaagaggtgtaagaatatggaagttctctacgactcactccagctcgcgcacaagtgcatcctgaacagcttttacggctatgtcatgcgcaagggcgcacgctggtatagtatggagatggctggcatagtgtgctttacaggagcaaacatcattacccaggcccgtgagttgattgagcaaatcggccgtccactggagctggataccgacggaatctggtgtgtactacctaattcattccctgaaaatttcgtttttaagactaccaacgttaagaagcctaaggtgaccattagctaccctggggctatgctgaatattatggtcaaagaggggtttaccaacgatcagtatcaagaacttgccgaaccaagtagccttacctatgtcacacgttccgaaaattcgatctttttcgaggttgatgggccatacttggccatgattctgccggctagcaaagaagaagggaaaaaattaaagaagcgctacgccgtgttcaatgaggacggttctttggcagaactcaagggcttcgaagtgaagcgtcggggagagctgcagctgatcaagatattccagtcatctgtgtttgaagcttttctaaagggcagtacactggaggaggtatacgggagtgtggccaaagtcgccgactactggctggatgtgctctattcaaaggctgccaacatgccggattccgagctctttgagttgatcagcgagaataggagcatgagtcggaaactggaggactacggcgaacaaaaatctactagcattagtaccgccaaaaggctggcagaatttctaggcgaccagatggtgaaggacgctgggcttagttgccgctatatcatttcaaggaagcccgagggcagtccagtgactgaacgcgcaatacctttagccatattccaagcagagccaaccgtgcgcaaacatttcttgcgaaaatggcttaagtcctctagcctgcaggacttcgacatccgagctatcttagattgggattattatatcgagaggctcgggtccgccatccaaaagattattaccatcccagcagccctgcaacaggtcaagaatcctgtgccacgagtgaagcacccagactggctgcacaagaagttgctcgagaaaaacgacgtatataagcagaaaaaaatatcagaactgttcacactggaaggcagaaggcaagttacgatggcagaggcctccgaggactccccaagacctagcgcgcctgatatggaggattttggcctggttaagcttccccatccagctgcacccgtcaccgttaaacgaaagagagttctctgggagagccaagaggagagtcaggatcttaccccgacagttccttggcaggagatcttgggccagccacccgcactgggtacttcacaagaggaatggctggtctggttgagattccacaagaagaaatggcagctccaggctcgccagcgtcttgcccgacgcaagaggcagaggctcgagtcagcggaaggtgtgctccgccctggcgcaatcagagacggacccgctacagggttaggcagcttcctccgaaggactgctagatcaatcctggatctgccgtggcagatagtgcaaatctctgaaacatcccaagcaggcctgtttagactgtgggcattggtgggaagtgacttgcattgtataagattgagcattcctcgcgtcttctacgtgaatcagcgcgtcgccaaggctgaggaaggggcatcctacaggaaagtcaacagggtattgcctagatcaaatatggtctataacttatatgagtatagcgttcccgaggacatgtaccaggaacacataaacgaaatcaacgccgaattgtcagccccagacattgagggggtctatgagacacaggtaccactgctgtttagagccctcgtacacctgggctgtgtgtgtgttgtgaataagcaactcgtcaggcatttgtctggatgggaggctgaaactttcgctctggagcatttagagatgcggagtctggcacagttctcatatctagaaccgggaagtatcaggcacatctacctatatcatcacgcacaggcacacaaagctctcttcggaatcttcattcccagtcagaggagggccagcgtctttgttctggatacagtgcgctcaaatcagatgcccagtctcggagcactgtacagcgccgaacacggattattgttggaaaaggttggaccagagctgctgcctcccccaaaacacacattcgaagtgcgagccgaaacagatctcaaaaccatttgccgggctattcagcgctttcttctggcgtacaaagaggagcgtaggggtcctactttaatcgctgtacaatcatcatgggagttgaagcggctggccagcgagataccagtgttggaagagttcccattggtccccatctgcgtagcagacaagatcaactatggagtattggactggcagcggcatggagccaggagaatgatcagacactacctgaacctcgatacttgtctgtctcaggcatttgagatgtctaggtatttccacatacctattgggaatctaccagaagatatctctactttcggatccgatctattctttgcccgtcacctgcagcggcacaatcatctgctgtggcttagccccacagctcggcctgacttggggggaaaggaggcggacgacaactgcctcgtcatggagtttgatgaccaggcaacagtggagattaactcctcgggctgctattccaccgtgtgtgtggaattggacctgcagaatctggccgttaataccatcctgcagagccatcatgtcaatgacatggaaggcgctgactcaatggggatcagcttcgatgtgattcaacaagcttcactcgaggatatgatcactggcggacaggccgcatccgccccagctagctacgacgagactgcactttgttccaacacgttccgcatactgaaaagtatggtggtgggatgggtaaaggagatcacacagtaccacaacatctacgccgacaatcaggtcatgcacttctatcgctggctgcggagcccctcgtctctgctgcacgatcccgcactccacaggactttacataatatgatgaaaaaactgttcctccagcttatcgctgagttcaaacgcctgggatccagcgtcatttatgccaatttcaaccggattattctgtgtactaagaaacggcgagttgaggatgctatcgcctatgtcgagtacataacttcttccattcacagcaaggagacgtttcattcactgaccatatcattttctcgttgttgggaattcctgctgtggatggatccctcgaactatggaggtatcaagggaaaggtgtcctcacggatccactgtgggttacaggattctcagaaggccggaggtgccgaggacgagcaggagaatgaggacgatgaagaagaaagagacggcgaagaagaagaggaggccgaggaatcgaacgtggaggacctgttagaaaataactggaacattctgcagttcctgcctcaggccgctagttgtcaaaattacttcctgatgatagtgagtgcttatatcgtggctgtctatcattgtatgaaggacggtcttcgacgctctgcccctgggtctacccctgtccgcaggcgcggagcatctcagttgtcacaagaagctgaaggagccgtcggtgccctgcccggtatgattacattctcccaagattacgtggccaatgagcttactcagtcatttttcaccatcacacagaagatccagaaaaaggtgaccggatcccggaacagcaccgaactgtctgagatgtttccggttctcccagggtcacacctgttactcaataatccagctctagagtttatcaaatacgtatgcaaggttctctctctagatacgaatatcacaaatcaggtgaacaagctcaaccgtgatctgctcaggctagtggacgtcggggagttttccgaggaggctcagttcagagatccatgccgctcctacgtgctgccagaggtcatctgtcgatcttgcaacttctgcagagatttggacctttgcaaggatagctctttctccgaggatggagccgtgcttcctcagtggctgtgctctaactgccaggctccttatgatagcagcgctatagagatgacgttggtggaggtgctccagaagaaactgatggcattcacccttcaggatctggtatgcctaaaatgccggggagtaaaggagaccagtatgcccgtgtattgtagctgcgcgggtgatttcgccctgacaatacacacccaggtcttcatggaacagatcggcatttttcgcaatatagcacagcattacgggatgtcctacttgctggaaaccctggaatggcttctccagaaaaatcctcagcttgggcacta

SEQ ID NO: 163083 - DNA, 771 bp, Artificial Sequence
  derived and/or modified sequence
atgttccccgtgctgcccggcagccacctgctgctgaacaaccccgccctggagttcatcaagtacgtgtgcaaggtgctgagcctggacaccaacatcaccaaccaggtgaacaagctgaacagagacctgctgagactggtggacgtgggcgagttcagcgaggaggcccagttcagagacccctgcagaagctacgtgctgcccgaggtgatctgcagaagctgcaacttctgcagagacctggacctgtgcaaggacagcagcttcagcgaggacggcgccgtgctgccccagtggctgtgcagcaactgccaggccccctacgacagcagcgccatcgagatgaccctggtggaggtgctgcagaagaagctgatggccttcaccctgcaggacctgaaggaggccgacacccccaagtgcgaggagaaggagagaagaaagagagagctgcacagcagcgccaccggcagaagctgcagaggcgccagcgagcagagactgggcgacgcccccagctgcagagtggtggtgcacggcgtgcaggcctgcagaatggagggcgtgtgcctgaagtgcagaggcgtgaaggagaccagcatgcccgtgtactgcagctgcgccggcgacttcgccctgaccatccacacccaggtgttcatggagcagatcggcatcttcagaaacatcgcccagcactacggcatgagctacctgctggagaccctggagtggctgctgcagaagaacccccagctgggccactag

SEQ ID NO: 163084 - DNA, 6861 bp, Artificial Sequence
  derived and/or modified sequence
atgagcctgagaagcggcggcagaagaagagccgaccccggcgccgacggcgaggccagcagagacgacggcgccaccagcagcgtgagcgccctgaagagactggagagaagccagtggaccgacaagatggacctgagattcggcttcgagagactgaaggagcccggcgagaagaccggctggctgatcaacatgcaccccaccgagatcctggacgaggacaagagactgggcagcgccgtggactactacttcatccaggacgacggcagcagattcaaggtggccctgccctacaagccctacttctacatcgccaccagaaagggctgcgagagagaggtgagcagcttcctgagcaagaagttccagggcaagatcgccaaggtggagaccgtgcccaaggaggacctggacctgcccaaccacctggtgggcctgaagagaaactacatcagactgagcttccacaccgtggaggacctggtgaaggtgagaaaggagatcagccccgccgtgaagaagaacagagagcaggaccacgccagcgacgcctacaccgccctgctgagcagcgtgctgcagagaggcggcgtgatcaccgacgaggaggagaccagcaagaagatcgccgaccagctggacaacatcgtggacatgagagagtacgacgtgccctaccacatcagactgagcatcgacctgaagatccacgtggcccactggtacaacgtgagatacagaggcaacgccttccccgtggagatcaccagaagagacgacctggtggagagacccgaccccgtggtgctggccttcgacatcgagaccaccaagctgcccctgaagttccccgacgccgagaccgaccagatcatgatgatcagctacatgatcgacggccagggctacctgatcaccaacagagagatcgtgagcgaggacatcgaggacttcgagttcacccccaagcccgagtacgagggccccttctgcgtgttcaacgagcccgacgaggcccacctgatccagagatggttcgagcacgtgcaggagaccaagcccaccatcatggtgacctacaacggcgacttcttcgactggcccttcgtggaggccagagccgccgtgcacggcctgagcatgcagcaggagatcggcttccagaaggacagccagggcgagtacaaggccccccagtgcatccacatggactgcctgagatgggtgaagagagacagctacctgcccgtgggcagccacaacctgaaggccgccgccaaggccaagctgggctacgaccccgtggagctggaccccgaggacatgtgcagaatggccaccgagcagccccagaccctggccacctacagcgtgagcgacgccgtggccacctactacctgtacatgaagtacgtgcaccccttcatcttcgccctgtgcaccatcatccccatggagcccgacgaggtgctgagaaagggcagcggcaccctgtgcgaggccctgctgatggtgcaggccttccacgccaacatcatcttccccaacaagcaggagcaggagttcaacaagctgaccgacgacggccacgtgctggacagcgagacctacgtgggcggccacgtggaggccctggagagcggcgtgttcagaagcgacatcccctgcagattcagaatgaaccccgccgccttcgacttcctgctgcagagagtggagaagaccctgagacacgccctggaggaggaggagaaggtgcccgtggagcaggtgaccaacttcgaggaggtgtgcgacgagatcaagagcaagctggccagcctgaaggacgtgcccagcagaatcgagtgccccctgatctaccacctggacgtgggcgccatgtaccccaacatcatcctgaccaacagactgcagcccagcgccatggtggacgaggccacctgcgccgcctgcgacttcaacaagcccggcgccaactgccagagaaagatggcctggcagtggagaggcgagttcatgcccgccagcagaagcgagtaccacagaatccagcaccagctggagagcgagaagttcccccccctgttccccgagggccccgccagagccttccacgagctgagcagagaggagcaggccaagtacgagaagagaagactggccgactactgcagaaaggcctacaagaagatccacatcaccaaggtggaggagagactgaccaccatctgccagagagagaacagcttctacgtggacaccgtgagagccttcagagacagaagatacgagttcaagggcctgcacaaggtgtggaagaagaagctgagcgccgccgtggaggtgggcgacgccgccgaggtgaagagatgcaagaacatggaggtgctgtacgacagcctgcagctggcccacaagtgcatcctgaacagcttctacggctacgtgatgagaaagggcgccagatggtacagcatggagatggccggcatcgtgtgcttcaccggcgccaacatcatcacccaggccagagagctgatcgagcagatcggcagacccctggagctggacaccgacggcatctggtgcgtgctgcccaacagcttccccgagaacttcgtgttcaagaccaccaacgtgaagaagcccaaggtgaccatcagctaccccggcgccatgctgaacatcatggtgaaggagggcttcaccaacgaccagtaccaggagctggccgagcccagcagcctgacctacgtgaccagaagcgagaacagcatcttcttcgaggtggacggcccctacctggccatgatcctgcccgccagcaaggaggagggcaagaagctgaagaagagatacgccgtgttcaacgaggacggcagcctggccgagctgaagggcttcgaggtgaagagaagaggcgagctgcagctgatcaagatcttccagagcagcgtgttcgaggccttcctgaagggcagcaccctggaggaggtgtacggcagcgtggccaaggtggccgactactggctggacgtgctgtacagcaaggccgccaacatgcccgacagcgagctgttcgagctgatcagcgagaacagaagcatgagcagaaagctggaggactacggcgagcagaagagcaccagcatcagcaccgccaagagactggccgagttcctgggcgaccagatggtgaaggacgccggcctgagctgcagatacatcatcagcagaaagcccgagggcagccccgtgaccgagagagccatccccctggccatcttccaggccgagcccaccgtgagaaagcacttcctgagaaagtggctgaagagcagcagcctgcaggacttcgacatcagagccatcctggactgggactactacatcgagagactgggcagcgccatccagaagatcatcaccatccccgccgccctgcagcaggtgaagaaccccgtgcccagagtgaagcaccccgactggctgcacaagaagctgctggagaagaacgacgtgtacaagcagaagaagatcagcgagctgttcaccctggagggcagaagacaggtgaccatggccgaggccagcgaggacagccccagacccagcgcccccgacatggaggacttcggcctggtgaagctgccccaccccgccgcccccgtgaccgtgaagagaaagagagtgctgtgggagagccaggaggagagccaggacctgacccccaccgtgccctggcaggagatcctgggccagccccccgccctgggcaccagccaggaggagtggctggtgtggctgagattccacaagaagaagtggcagctgcaggccagacagagactggccagaagaaagagacagagactggagagcgccgagggcgtgctgagacccggcgccatcagagacggccccgccaccggcctgggcagcttcctgagaagaaccgccagaagcatcctggacctgccctggcagatcgtgcagatcagcgagaccagccaggccggcctgttcagactgtgggccctggtgggcagcgacctgcactgcatcagactgagcatccccagagtgttctacgtgaaccagagagtggccaaggccgaggagggcgccagctacagaaaggtgaacagagtgctgcccagaagcaacatggtgtacaacctgtacgagtacagcgtgcccgaggacatgtaccaggagcacatcaacgagatcaacgccgagctgagcgcccccgacatcgagggcgtgtacgagacccaggtgcccctgctgttcagagccctggtgcacctgggctgcgtgtgcgtggtgaacaagcagctggtgagacacctgagcggctgggaggccgagaccttcgccctggagcacctggagatgagaagcctggcccagttcagctacctggagcccggcagcatcagacacatctacctgtaccaccacgcccaggcccacaaggccctgttcggcatcttcatccccagccagagaagagccagcgtgttcgtgctggacaccgtgagaagcaaccagatgcccagcctgggcgccctgtacagcgccgagcacggcctgctgctggagaaggtgggccccgagctgctgcccccccccaagcacaccttcgaggtgagagccgagaccgacctgaagaccatctgcagagccatccagagattcctgctggcctacaaggaggagagaagaggccccaccctgatcgccgtgcagagcagctgggagctgaagagactggccagcgagatccccgtgctggaggagttccccctggtgcccatctgcgtggccgacaagatcaactacggcgtgctggactggcagagacacggcgccagaagaatgatcagacactacctgaacctggacacctgcctgagccaggccttcgagatgagcagatacttccacatccccatcggcaacctgcccgaggacatcagcaccttcggcagcgacctgttcttcgccagacacctgcagagacacaaccacctgctgtggctgagccccaccgccagacccgacctgggcggcaaggaggccgacgacaactgcctggtgatggagttcgacgaccaggccaccgtggagatcaacagcagcggctgctacagcaccgtgtgcgtggagctggacctgcagaacctggccgtgaacaccatcctgcagagccaccacgtgaacgacatggagggcgccgacagcatgggcatcagcttcgacgtgatccagcaggccagcctggaggacatgatcaccggcggccaggccgccagcgcccccgccagctacgacgagaccgccctgtgcagcaacaccttcagaatcctgaagagcatggtggtgggctgggtgaaggagatcacccagtaccacaacatctacgccgacaaccaggtgatgcacttctacagatggctgagaagccccagcagcctgctgcacgaccccgccctgcacagaaccctgcacaacatgatgaagaagctgttcctgcagctgatcgccgagttcaagagactgggcagcagcgtgatctacgccaacttcaacagaatcatcctgtgcaccaagaagagaagagtggaggacgccatcgcctacgtggagtacatcaccagcagcatccacagcaaggagaccttccacagcctgaccatcagcttcagcagatgctgggagttcctgctgtggatggaccccagcaactacggcggcatcaagggcaaggtgagcagcagaatccactgcggcctgcaggacagccagaaggccggcggcgccgaggacgagcaggagaacgaggacgacgaggaggagagagacggcgaggaggaggaggaggccgaggagagcaacgtggaggacctgctggagaacaactggaacatcctgcagttcctgccccaggccgccagctgccagaactacttcctgatgatcgtgagcgcctacatcgtggccgtgtaccactgcatgaaggacggcctgagaagaagcgcccccggcagcacccccgtgagaagaagaggcgccagccagctgagccaggaggccgagggcgccgtgggcgccctgcccggcatgatcaccttcagccaggactacgtggccaacgagctgacccagagcttcttcaccatcacccagaagatccagaagaaggtgaccggcagcagaaacagcaccgagctgagcgagatgttccccgtgctgcccggcagccacctgctgctgaacaaccccgccctggagttcatcaagtacgtgtgcaaggtgctgagcctggacaccaacatcaccaaccaggtgaacaagctgaacagagacctgctgagactggtggacgtgggcgagttcagcgaggaggcccagttcagagacccctgcagaagctacgtgctgcccgaggtgatctgcagaagctgcaacttctgcagagacctggacctgtgcaaggacagcagcttcagcgaggacggcgccgtgctgccccagtggctgtgcagcaactgccaggccccctacgacagcagcgccatcgagatgaccctggtggaggtgctgcagaagaagctgatggccttcaccctgcaggacctggtgtgcctgaagtgcagaggcgtgaaggagaccagcatgcccgtgtactgcagctgcgccggcgacttcgccctgaccatccacacccaggtgttcatggagcagatcggcatcttcagaaacatcgcccagcactacggcatgagctacctgctggagaccctggagtggctgctgcagaagaacccccagctgggccactag

SEQ ID NO: 163085 - DNA, 1491 bp, Artificial Sequence
  derived and/or modified sequence
atggagggcatcctgaagagcatggtggtgggctgggtgaaggagatcacccagtaccacaacatctacgccgacaaccaggtgatgcacttctacagatggctgagaagccccagcagcctgctgcacgaccccgccctgcacagaaccctgcacaacatgatgaagaagctgttcctgcagctgatcgccgagttcaagagactgggcagcagcgtgatctacgccaacttcaacagaatcatcctgtgcaccaagaagagaagagtggaggacgccatcgcctacgtggagtacatcaccagcagcatccacagcaaggagaccttccacagcctgaccatcagcttcagcagatgctgggagttcctgctgtggatggaccccagcaactacggcggcatcaagggcaaggtgagcagcagaatccactgcggcctgcaggacagccagaaggccggcggcgccgaggacgagcaggagaacgaggacgacgaggaggagagagacggcgaggaggaggaggaggccgaggagagcaacgtggaggacctgctggagaacaactggaacatcctgcagttcctgccccaggccgccagctgccagaactacttcctgatgatcgtgagcgcctacatcgtggccgtgtaccactgcatgaaggacggcctgagaagaagcgcccccggcagcacccccgtgagaagaagaggcgccagccagctgagccaggaggccgagggcgccgtgggcgccctgcccggcatgatcaccttcagccaggactacgtggccaacgagctgacccagagcttcttcaccatcacccagaagatccagaagaaggtgaccggcagcagaaacagcaccgagctgagcgagatgttccccgtgctgcccggcagccacctgctgctgaacaaccccgccctggagttcatcaagtacgtgtgcaaggtgctgagcctggacaccaacatcaccaaccaggtgaacaagctgaacagagacctgctgagactggtggacgtgggcgagttcagcgaggaggcccagttcagagacccctgcagaagctacgtgctgcccgaggtgatctgcagaagctgcaacttctgcagagacctggacctgtgcaaggacagcagcttcagcgaggacggcgccgtgctgccccagtggctgtgcagcaactgccaggccccctacgacagcagcgccatcgagatgaccctggtggaggtgctgcagaagaagctgatggccttcaccctgcaggacctggtgtgcctgaagtgcagaggcgtgaaggagaccagcatgcccgtgtactgcagctgcgccggcgacttcgccctgaccatccacacccaggtgttcatggagcagatcggcatcttcagaaacatcgcccagcactacggcatgagctacctgctggagaccctggagtggctgctgcagaagaacccccagctgggccactag

SEQ ID NO: 163086 - DNA, 6894 bp, Artificial Sequence
  derived and/or modified sequence
atgagcagacccctgggcctgaagagcttccccagacacaagcaggcccccctgcccctgagcctgaccttccacggctgcctgctgctgagaagagacgacggcgccaccagcagcgtgagcgccctgaagagactggagagaagccagtggaccgacaagatggacctgagattcggcttcgagagactgaaggagcccggcgagaagaccggctggctgatcaacatgcaccccaccgagatcctggacgaggacaagagactgggcagcgccgtggactactacttcatccaggacgacggcagcagattcaaggtggccctgccctacaagccctacttctacatcgccaccagaaagggctgcgagagagaggtgagcagcttcctgagcaagaagttccagggcaagatcgccaaggtggagaccgtgcccaaggaggacctggacctgcccaaccacctggtgggcctgaagagaaactacatcagactgagcttccacaccgtggaggacctggtgaaggtgagaaaggagatcagccccgccgtgaagaagaacagagagcaggaccacgccagcgacgcctacaccgccctgctgagcagcgtgctgcagagaggcggcgtgatcaccgacgaggaggagaccagcaagaagatcgccgaccagctggacaacatcgtggacatgagagagtacgacgtgccctaccacatcagactgagcatcgacctgaagatccacgtggcccactggtacaacgtgagatacagaggcaacgccttccccgtggagatcaccagaagagacgacctggtggagagacccgaccccgtggtgctggccttcgacatcgagaccaccaagctgcccctgaagttccccgacgccgagaccgaccagatcatgatgatcagctacatgatcgacggccagggctacctgatcaccaacagagagatcgtgagcgaggacatcgaggacttcgagttcacccccaagcccgagtacgagggccccttctgcgtgttcaacgagcccgacgaggcccacctgatccagagatggttcgagcacgtgcaggagaccaagcccaccatcatggtgacctacaacggcgacttcttcgactggcccttcgtggaggccagagccgccgtgcacggcctgagcatgcagcaggagatcggcttccagaaggacagccagggcgagtacaaggccccccagtgcatccacatggactgcctgagatgggtgaagagagacagctacctgcccgtgggcagccacaacctgaaggccgccgccaaggccaagctgggctacgaccccgtggagctggaccccgaggacatgtgcagaatggccaccgagcagccccagaccctggccacctacagcgtgagcgacgccgtggccacctactacctgtacatgaagtacgtgcaccccttcatcttcgccctgtgcaccatcatccccatggagcccgacgaggtgctgagaaagggcagcggcaccctgtgcgaggccctgctgatggtgcaggccttccacgccaacatcatcttccccaacaagcaggagcaggagttcaacaagctgaccgacgacggccacgtgctggacagcgagacctacgtgggcggccacgtggaggccctggagagcggcgtgttcagaagcgacatcccctgcagattcagaatgaaccccgccgccttcgacttcctgctgcagagagtggagaagaccctgagacacgccctggaggaggaggagaaggtgcccgtggagcaggtgaccaacttcgaggaggtgtgcgacgagatcaagagcaagctggccagcctgaaggacgtgcccagcagaatcgagtgccccctgatctaccacctggacgtgggcgccatgtaccccaacatcatcctgaccaacagactgcagcccagcgccatggtggacgaggccacctgcgccgcctgcgacttcaacaagcccggcgccaactgccagagaaagatggcctggcagtggagaggcgagttcatgcccgccagcagaagcgagtaccacagaatccagcaccagctggagagcgagaagttcccccccctgttccccgagggccccgccagagccttccacgagctgagcagagaggagcaggccaagtacgagaagagaagactggccgactactgcagaaaggcctacaagaagatccacatcaccaaggtggaggagagactgaccaccatctgccagagagagaacagcttctacgtggacaccgtgagagccttcagagacagaagatacgagttcaagggcctgcacaaggtgtggaagaagaagctgagcgccgccgtggaggtgggcgacgccgccgaggtgaagagatgcaagaacatggaggtgctgtacgacagcctgcagctggcccacaagtgcatcctgaacagcttctacggctacgtgatgagaaagggcgccagatggtacagcatggagatggccggcatcgtgtgcttcaccggcgccaacatcatcacccaggccagagagctgatcgagcagatcggcagacccctggagctggacaccgacggcatctggtgcgtgctgcccaacagcttccccgagaacttcgtgttcaagaccaccaacgtgaagaagcccaaggtgaccatcagctaccccggcgccatgctgaacatcatggtgaaggagggcttcaccaacgaccagtaccaggagctggccgagcccagcagcctgacctacgtgaccagaagcgagaacagcatcttcttcgaggtggacggcccctacctggccatgatcctgcccgccagcaaggaggagggcaagaagctgaagaagagatacgccgtgttcaacgaggacggcagcctggccgagctgaagggcttcgaggtgaagagaagaggcgagctgcagctgatcaagatcttccagagcagcgtgttcgaggccttcctgaagggcagcaccctggaggaggtgtacggcagcgtggccaaggtggccgactactggctggacgtgctgtacagcaaggccgccaacatgcccgacagcgagctgttcgagctgatcagcgagaacagaagcatgagcagaaagctggaggactacggcgagcagaagagcaccagcatcagcaccgccaagagactggccgagttcctgggcgaccagatggtgaaggacgccggcctgagctgcagatacatcatcagcagaaagcccgagggcagccccgtgaccgagagagccatccccctggccatcttccaggccgagcccaccgtgagaaagcacttcctgagaaagtggctgaagagcagcagcctgcaggacttcgacatcagagccatcctggactgggactactacatcgagagactgggcagcgccatccagaagatcatcaccatccccgccgccctgcagcaggtgaagaaccccgtgcccagagtgaagcaccccgactggctgcacaagaagctgctggagaagaacgacgtgtacaagcagaagaagatcagcgagctgttcaccctggagggcagaagacaggtgaccatggccgaggccagcgaggacagccccagacccagcgcccccgacatggaggacttcggcctggtgaagctgccccaccccgccgcccccgtgaccgtgaagagaaagagagtgctgtgggagagccaggaggagagccaggacctgacccccaccgtgccctggcaggagatcctgggccagccccccgccctgggcaccagccaggaggagtggctggtgtggctgagattccacaagaagaagtggcagctgcaggccagacagagactggccagaagaaagagacagagactggagagcgccgagggcgtgctgagacccggcgccatcagagacggccccgccaccggcctgggcagcttcctgagaagaaccgccagaagcatcctggacctgccctggcagatcgtgcagatcagcgagaccagccaggccggcctgttcagactgtgggccctggtgggcagcgacctgcactgcatcagactgagcatccccagagtgttctacgtgaaccagagagtggccaaggccgaggagggcgccagctacagaaaggtgaacagagtgctgcccagaagcaacatggtgtacaacctgtacgagtacagcgtgcccgaggacatgtaccaggagcacatcaacgagatcaacgccgagctgagcgcccccgacatcgagggcgtgtacgagacccaggtgcccctgctgttcagagccctggtgcacctgggctgcgtgtgcgtggtgaacaagcagctggtgagacacctgagcggctgggaggccgagaccttcgccctggagcacctggagatgagaagcctggcccagttcagctacctggagcccggcagcatcagacacatctacctgtaccaccacgcccaggcccacaaggccctgttcggcatcttcatccccagccagagaagagccagcgtgttcgtgctggacaccgtgagaagcaaccagatgcccagcctgggcgccctgtacagcgccgagcacggcctgctgctggagaaggtgggccccgagctgctgcccccccccaagcacaccttcgaggtgagagccgagaccgacctgaagaccatctgcagagccatccagagattcctgctggcctacaaggaggagagaagaggccccaccctgatcgccgtgcagagcagctgggagctgaagagactggccagcgagatccccgtgctggaggagttccccctggtgcccatctgcgtggccgacaagatcaactacggcgtgctggactggcagagacacggcgccagaagaatgatcagacactacctgaacctggacacctgcctgagccaggccttcgagatgagcagatacttccacatccccatcggcaacctgcccgaggacatcagcaccttcggcagcgacctgttcttcgccagacacctgcagagacacaaccacctgctgtggctgagccccaccgccagacccgacctgggcggcaaggaggccgacgacaactgcctggtgatggagttcgacgaccaggccaccgtggagatcaacagcagcggctgctacagcaccgtgtgcgtggagctggacctgcagaacctggccgtgaacaccatcctgcagagccaccacgtgaacgacatggagggcgccgacagcatgggcatcagcttcgacgtgatccagcaggccagcctggaggacatgatcaccggcggccaggccgccagcgcccccgccagctacgacgagaccgccctgtgcagcaacaccttcagaatcctgaagagcatggtggtgggctgggtgaaggagatcacccagtaccacaacatctacgccgacaaccaggtgatgcacttctacagatggctgagaagccccagcagcctgctgcacgaccccgccctgcacagaaccctgcacaacatgatgaagaagctgttcctgcagctgatcgccgagttcaagagactgggcagcagcgtgatctacgccaacttcaacagaatcatcctgtgcaccaagaagagaagagtggaggacgccatcgcctacgtggagtacatcaccagcagcatccacagcaaggagaccttccacagcctgaccatcagcttcagcagatgctgggagttcctgctgtggatggaccccagcaactacggcggcatcaagggcaaggtgagcagcagaatccactgcggcctgcaggacagccagaaggccggcggcgccgaggacgagcaggagaacgaggacgacgaggaggagagagacggcgaggaggaggaggaggccgaggagagcaacgtggaggacctgctggagaacaactggaacatcctgcagttcctgccccaggccgccagctgccagaactacttcctgatgatcgtgagcgcctacatcgtggccgtgtaccactgcatgaaggacggcctgagaagaagcgcccccggcagcacccccgtgagaagaagaggcgccagccagctgagccaggaggccgagggcgccgtgggcgccctgcccggcatgatcaccttcagccaggactacgtggccaacgagctgacccagagcttcttcaccatcacccagaagatccagaagaaggtgaccggcagcagaaacagcaccgagctgagcgagatgttccccgtgctgcccggcagccacctgctgctgaacaaccccgccctggagttcatcaagtacgtgtgcaaggtgctgagcctggacaccaacatcaccaaccaggtgaacaagctgaacagagacctgctgagactggtggacgtgggcgagttcagcgaggaggcccagttcagagacccctgcagaagctacgtgctgcccgaggtgatctgcagaagctgcaacttctgcagagacctggacctgtgcaaggacagcagcttcagcgaggacggcgccgtgctgccccagtggctgtgcagcaactgccaggccccctacgacagcagcgccatcgagatgaccctggtggaggtgctgcagaagaagctgatggccttcaccctgcaggacctggtgtgcctgaagtgcagaggcgtgaaggagaccagcatgcccgtgtactgcagctgcgccggcgacttcgccctgaccatccacacccaggtgttcatggagcagatcggcatcttcagaaacatcgcccagcactacggcatgagctacctgctggagaccctggagtggctgctgcagaagaacccccagctgggccactag

SEQ ID NO: 163087 - DNA, 6780 bp, Artificial Sequence
  derived and/or modified sequence
atgagcctgagaagcggcggcagaagaagagccgaccccggcgccgacggcgaggccagcagagacgacggcgccaccagcagcgtgagcgccctgaagagactggagagaagccagtggaccgacaagatggacctgagattcggcttcgagagactgaaggagcccggcgagaagaccggctggctgatcaacatgcaccccgtggccctgccctacaagccctacttctacatcgccaccagaaagggctgcgagagagaggtgagcagcttcctgagcaagaagttccagggcaagatcgccaaggtggagaccgtgcccaaggaggacctggacctgcccaaccacctggtgggcctgaagagaaactacatcagactgagcttccacaccgtggaggacctggtgaaggtgagaaaggagatcagccccgccgtgaagaagaacagagagcaggaccacgccagcgacgcctacaccgccctgctgagcagcgtgctgcagagaggcggcgtgatcaccgacgaggaggagaccagcaagaagatcgccgaccagctggacaacatcgtggacatgagagagtacgacgtgccctaccacatcagactgagcatcgacctgaagatccacgtggcccactggtacaacgtgagatacagaggcaacgccttccccgtggagatcaccagaagagacgacctggtggagagacccgaccccgtggtgctggccttcgacatcgagaccaccaagctgcccctgaagttccccgacgccgagaccgaccagatcatgatgatcagctacatgatcgacggccagggctacctgatcaccaacagagagatcgtgagcgaggacatcgaggacttcgagttcacccccaagcccgagtacgagggccccttctgcgtgttcaacgagcccgacgaggcccacctgatccagagatggttcgagcacgtgcaggagaccaagcccaccatcatggtgacctacaacggcgacttcttcgactggcccttcgtggaggccagagccgccgtgcacggcctgagcatgcagcaggagatcggcttccagaaggacagccagggcgagtacaaggccccccagtgcatccacatggactgcctgagatgggtgaagagagacagctacctgcccgtgggcagccacaacctgaaggccgccgccaaggccaagctgggctacgaccccgtggagctggaccccgaggacatgtgcagaatggccaccgagcagccccagaccctggccacctacagcgtgagcgacgccgtggccacctactacctgtacatgaagtacgtgcaccccttcatcttcgccctgtgcaccatcatccccatggagcccgacgaggtgctgagaaagggcagcggcaccctgtgcgaggccctgctgatggtgcaggccttccacgccaacatcatcttccccaacaagcaggagcaggagttcaacaagctgaccgacgacggccacgtgctggacagcgagacctacgtgggcggccacgtggaggccctggagagcggcgtgttcagaagcgacatcccctgcagattcagaatgaaccccgccgccttcgacttcctgctgcagagagtggagaagaccctgagacacgccctggaggaggaggagaaggtgcccgtggagcaggtgaccaacttcgaggaggtgtgcgacgagatcaagagcaagctggccagcctgaaggacgtgcccagcagaatcgagtgccccctgatctaccacctggacgtgggcgccatgtaccccaacatcatcctgaccaacagactgcagcccagcgccatggtggacgaggccacctgcgccgcctgcgacttcaacaagcccggcgccaactgccagagaaagatggcctggcagtggagaggcgagttcatgcccgccagcagaagcgagtaccacagaatccagcaccagctggagagcgagaagttcccccccctgttccccgagggccccgccagagccttccacgagctgagcagagaggagcaggccaagtacgagaagagaagactggccgactactgcagaaaggcctacaagaagatccacatcaccaaggtggaggagagactgaccaccatctgccagagagagaacagcttctacgtggacaccgtgagagccttcagagacagaagatacgagttcaagggcctgcacaaggtgtggaagaagaagctgagcgccgccgtggaggtgggcgacgccgccgaggtgaagagatgcaagaacatggaggtgctgtacgacagcctgcagctggcccacaagtgcatcctgaacagcttctacggctacgtgatgagaaagggcgccagatggtacagcatggagatggccggcatcgtgtgcttcaccggcgccaacatcatcacccaggccagagagctgatcgagcagatcggcagacccctggagctggacaccgacggcatctggtgcgtgctgcccaacagcttccccgagaacttcgtgttcaagaccaccaacgtgaagaagcccaaggtgaccatcagctaccccggcgccatgctgaacatcatggtgaaggagggcttcaccaacgaccagtaccaggagctggccgagcccagcagcctgacctacgtgaccagaagcgagaacagcatcttcttcgaggtggacggcccctacctggccatgatcctgcccgccagcaaggaggagggcaagaagctgaagaagagatacgccgtgttcaacgaggacggcagcctggccgagctgaagggcttcgaggtgaagagaagaggcgagctgcagctgatcaagatcttccagagcagcgtgttcgaggccttcctgaagggcagcaccctggaggaggtgtacggcagcgtggccaaggtggccgactactggctggacgtgctgtacagcaaggccgccaacatgcccgacagcgagctgttcgagctgatcagcgagaacagaagcatgagcagaaagctggaggactacggcgagcagaagagcaccagcatcagcaccgccaagagactggccgagttcctgggcgaccagatggtgaaggacgccggcctgagctgcagatacatcatcagcagaaagcccgagggcagccccgtgaccgagagagccatccccctggccatcttccaggccgagcccaccgtgagaaagcacttcctgagaaagtggctgaagagcagcagcctgcaggacttcgacatcagagccatcctggactgggactactacatcgagagactgggcagcgccatccagaagatcatcaccatccccgccgccctgcagcaggtgaagaaccccgtgcccagagtgaagcaccccgactggctgcacaagaagctgctggagaagaacgacgtgtacaagcagaagaagatcagcgagctgttcaccctggagggcagaagacaggtgaccatggccgaggccagcgaggacagccccagacccagcgcccccgacatggaggacttcggcctggtgaagctgccccaccccgccgcccccgtgaccgtgaagagaaagagagtgctgtgggagagccaggaggagagccaggacctgacccccaccgtgccctggcaggagatcctgggccagccccccgccctgggcaccagccaggaggagtggctggtgtggctgagattccacaagaagaagtggcagctgcaggccagacagagactggccagaagaaagagacagagactggagagcgccgagggcgtgctgagacccggcgccatcagagacggccccgccaccggcctgggcagcttcctgagaagaaccgccagaagcatcctggacctgccctggcagatcgtgcagatcagcgagaccagccaggccggcctgttcagactgtgggccctggtgggcagcgacctgcactgcatcagactgagcatccccagagtgttctacgtgaaccagagagtggccaaggccgaggagggcgccagctacagaaaggtgaacagagtgctgcccagaagcaacatggtgtacaacctgtacgagtacagcgtgcccgaggacatgtaccaggagcacatcaacgagatcaacgccgagctgagcgcccccgacatcgagggcgtgtacgagacccaggtgcccctgctgttcagagccctggtgcacctgggctgcgtgtgcgtggtgaacaagcagctggtgagacacctgagcggctgggaggccgagaccttcgccctggagcacctggagatgagaagcctggcccagttcagctacctggagcccggcagcatcagacacatctacctgtaccaccacgcccaggcccacaaggccctgttcggcatcttcatccccagccagagaagagccagcgtgttcgtgctggacaccgtgagaagcaaccagatgcccagcctgggcgccctgtacagcgccgagcacggcctgctgctggagaaggtgggccccgagctgctgcccccccccaagcacaccttcgaggtgagagccgagaccgacctgaagaccatctgcagagccatccagagattcctgctggcctacaaggaggagagaagaggccccaccctgatcgccgtgcagagcagctgggagctgaagagactggccagcgagatccccgtgctggaggagttccccctggtgcccatctgcgtggccgacaagatcaactacggcgtgctggactggcagagacacggcgccagaagaatgatcagacactacctgaacctggacacctgcctgagccaggccttcgagatgagcagatacttccacatccccatcggcaacctgcccgaggacatcagcaccttcggcagcgacctgttcttcgccagacacctgcagagacacaaccacctgctgtggctgagccccaccgccagacccgacctgggcggcaaggaggccgacgacaactgcctggtgatggagttcgacgaccaggccaccgtggagatcaacagcagcggctgctacagcaccgtgtgcgtggagctggacctgcagaacctggccgtgaacaccatcctgcagagccaccacgtgaacgacatggagggcgccgacagcatgggcatcagcttcgacgtgatccagcaggccagcctggaggacatgatcaccggcggccaggccgccagcgcccccgccagctacgacgagaccgccctgtgcagcaacaccttcagaatcctgaagagcatggtggtgggctgggtgaaggagatcacccagtaccacaacatctacgccgacaaccaggtgatgcacttctacagatggctgagaagccccagcagcctgctgcacgaccccgccctgcacagaaccctgcacaacatgatgaagaagctgttcctgcagctgatcgccgagttcaagagactgggcagcagcgtgatctacgccaacttcaacagaatcatcctgtgcaccaagaagagaagagtggaggacgccatcgcctacgtggagtacatcaccagcagcatccacagcaaggagaccttccacagcctgaccatcagcttcagcagatgctgggagttcctgctgtggatggaccccagcaactacggcggcatcaagggcaaggtgagcagcagaatccactgcggcctgcaggacagccagaaggccggcggcgccgaggacgagcaggagaacgaggacgacgaggaggagagagacggcgaggaggaggaggaggccgaggagagcaacgtggaggacctgctggagaacaactggaacatcctgcagttcctgccccaggccgccagctgccagaactacttcctgatgatcgtgagcgcctacatcgtggccgtgtaccactgcatgaaggacggcctgagaagaagcgcccccggcagcacccccgtgagaagaagaggcgccagccagctgagccaggaggccgagggcgccgtgggcgccctgcccggcatgatcaccttcagccaggactacgtggccaacgagctgacccagagcttcttcaccatcacccagaagatccagaagaaggtgaccggcagcagaaacagcaccgagctgagcgagatgttccccgtgctgcccggcagccacctgctgctgaacaaccccgccctggagttcatcaagtacgtgtgcaaggtgctgagcctggacaccaacatcaccaaccaggtgaacaagctgaacagagacctgctgagactggtggacgtgggcgagttcagcgaggaggcccagttcagagacccctgcagaagctacgtgctgcccgaggtgatctgcagaagctgcaacttctgcagagacctggacctgtgcaaggacagcagcttcagcgaggacggcgccgtgctgccccagtggctgtgcagcaactgccaggccccctacgacagcagcgccatcgagatgaccctggtggaggtgctgcagaagaagctgatggccttcaccctgcaggacctggtgtgcctgaagtgcagaggcgtgaaggagaccagcatgcccgtgtactgcagctgcgccggcgacttcgccctgaccatccacacccaggtgttcatggagcagatcggcatcttcagaaacatcgcccagcactacggcatgagctacctgctggagaccctggagtggctgctgcagaagaacccccagctgggccactag

SEQ ID NO: 163088 - protein, 150 aa, Artificial Sequence
  derived and/or modified sequence
MAGILFEDIFDVKDIDPEGKKFDRVSRLHCESESFKMDLILDVNIQIYPVDLGDKFRLVIASTLYEDGTLDDGEYNPTDDRPSRADQFEYVMYGKVYRIEGDETSTEAATRLSAYVSYGGLLMRLQGDANNLHGFEVDSRVYLLMKKLAF

SEQ ID NO: 163089 - protein, 149 aa, Artificial Sequence
  derived and/or modified sequence
MAGILFEDIFDVKDIDPEGKKFDRVSRLHCESESFKMDLILDVNIQIYPVDLGDKFRLVIASTLYEDGTLDDGEYNPTDDRPSRADQFEYVMYGKVYRIEGDETSTEAATRLSAYVSYGGLLMRLQGDANNLHGFEVDSRVYLLMKKLA

SEQ ID NO: 163090 - DNA, 453 bp, Artificial Sequence
  derived and/or modified sequence
atggccggtattttatttgaggatatcttcgacgtcaaggacatagatccggaggggaaaaagtttgacagagtcagccgcctgcattgcgagagtgaatctttcaaaatggacctgatcttggacgttaatattcagatttacccagttgacttaggcgacaagttcaggctggtgatcgcctctacactgtacgaggacggcacactggacgacggggaatataatcccacagatgatagaccttcgcgagccgatcagtttgagtatgttatgtatggaaaggtttacagaatagaaggtgatgaaacatccaccgaggcggctactcgattgtccgcgtacgtgagctacggtggactgctgatgaggctgcagggggacgccaataacctgcacggtttcgaagtggattctcgggtgtatctgttgatgaaaaaactagccttttag

SEQ ID NO: 163091 - DNA, 450 bp, Artificial Sequence
  derived and/or modified sequence
atggcaggtatcctgtttgaggacattttcgatgtcaaagatatcgaccccgagggcaaaaaattcgacagagtatcacgtctacactgcgaatctgagtcttttaaaatggatctgatcctcgatgtcaatatccagatctatccggtggatctgggagataagtttcgcctagttatagcctccactttgtacgaggatggaactctagacgacggcgagtacaaccccactgacgatcgcccttcaagagctgaccagttcgaatacgtgatgtacgggaaagtttataggatagaaggagacgagactagtaccgaagccgcgaccaggctgagcgcctacgtaagctatggcggtctgttgatgcgtctgcagggcgatgcgaacaatttgcacgggttcgaggttgattcgagggtttatctgctcatgaagaagcttgcctag

SEQ ID NO: 163092 - DNA, 453 bp, Artificial Sequence
  derived and/or modified sequence
atggccggcatcctgtttgaggacatctttgacgtgaaagacatcgatcccgaaggcaaaaagttcgaccgcgtatctcggttgcattgcgaatccgaatcttttaaaatggacctcattctggatgtgaatattcaaatttaccccgttgatttgggagacaagtttaggctggtgattgccagcacattgtatgaggacgggacccttgacgacggagaatacaacccgacggacgacagaccatccagagctgaccaattcgagtacgtaatgtatgggaaggtgtaccgcatagagggcgacgagaccagcaccgaggctgctactagactgagcgcgtacgtatcttatgggggccttctcatgcggctgcagggggatgccaacaaccttcatgggttcgaggtagactcgagggtatatctcctgatgaaaaaactggccttttag

SEQ ID NO: 163093 - DNA, 453 bp, Artificial Sequence
  derived and/or modified sequence
atggccggcatcctgtttgaggacatctttgatgtgaaggacattgatcctgagggcaagaagtttgacagagtgtcccggctgcactgtgagagcgagagcttcaagatggacctgatcctggatgtgaacatccagatctaccctgtggacctgggggacaagttccggctggtgattgccagcaccctgtatgaagatggcaccctggatgatggagagtacaaccccacagatgaccggcccagcagagctgaccagtttgaatatgtgatgtatggcaaggtgtacagaattgaaggagatgagaccagcacagaggccgccacccggctgagcgcctacgtgtcctatggaggcctgctgatgaggctgcagggagatgccaacaacctgcacggctttgaggtggacagccgggtgtacctgctgatgaagaagctggccttctag

SEQ ID NO: 163094 - DNA, 450 bp, Artificial Sequence
  derived and/or modified sequence
atggccggcatcctgtttgaggacatctttgatgtgaaggacattgatcctgagggcaagaagtttgacagagtgtcccggctgcactgtgagagcgagagcttcaagatggacctgatcctggatgtgaacatccagatctaccctgtggacctgggggacaagttccggctggtgattgccagcaccctgtatgaagatggcaccctggatgatggagagtacaaccccacagatgaccggcccagcagagctgaccagtttgaatatgtgatgtatggcaaggtgtacagaattgaaggagatgagaccagcacagaggccgccacccggctgagcgcctacgtgtcctatggaggcctgctgatgaggctgcagggagatgccaacaacctgcacggctttgaggtggacagccgggtgtacctgctgatgaagaagctggcctag

SEQ ID NO: 163095 - DNA, 453 bp, Artificial Sequence
  derived and/or modified sequence
atggccggcatcctgttcgaggacatcttcgacgtgaaggacatcgaccctgagggaaaaaagttcgaccgggtgtcccgcctacactgcgagtctgagagtttcaagatggatctcatactcgacgtcaacatacagatctaccccgtcgatctgggcgataagtttaggctggtgattgcctccacactttacgaagacgggaccttggatgatggggagtataatccaacagatgatagaccatctcgagccgaccagtttgaatacgtgatgtacggcaaggtgtacaggatcgagggggacgaaacatctaccgaggccgcaacaaggttatctgcctacgtttcttatggcggcttgttaatgcggctccagggagacgccaacaatctgcatgggttcgaggtggacagccgagtttacctgttgatgaagaagctcgctttctag

SEQ ID NO: 163096 - DNA, 450 bp, Artificial Sequence
  derived and/or modified sequence
atggccggcatcctgttcgaggacatcttcgacgtgaaggacatcgaccccgaagggaagaagtttgaccgggtcagccgtctgcattgtgaatctgagagtttcaagatggaccttattcttgacgtgaatatacagatctatcccgtcgatttaggcgataaattcagacttgtgatcgccagtactctgtacgaggacggcaccctggatgatggagaatataatccaaccgatgaccggccaagtagggccgaccagtttgagtatgtgatgtatggcaaggtttaccggatcgagggcgacgagacctccaccgaggcagctacccgactgagtgcatacgtgagctatggcggcctgctaatgaggctgcagggcgatgcgaacaaccttcacgggtttgaggtcgacagtagggtttatcttctgatgaagaaactggcgtag

SEQ ID NO: 163097 - DNA, 453 bp, Artificial Sequence
  derived and/or modified sequence
atggccggcatcctgttcgaggacatcttcgacgtgaaggacatcgatcccgaaggtaagaagtttgaccgtgtctccaggctgcattgtgagagcgagtccttcaagatggacctgattctggatgtgaacatacaaatctacccagtagaccttggtgacaagtttaggcttgtcatcgcgagtaccctctacgaggatggcacattggatgatggcgaatataatcccaccgacgacaggccaagcagagccgatcaatttgagtacgtcatgtacgggaaagtctaccgcattgaaggggatgagacatctactgaagccgcaactcggttgtccgcctatgtctcttacggcggactgctgatgaggttacagggtgacgcaaacaatcttcatggtttcgaagtcgattcaagagtgtatttgcttatgaagaagctggcattctag

SEQ ID NO: 163098 - DNA, 821 bp, Artificial Sequence
  derived and/or modified sequence
tccggtcttgtccacgctagggggtgcacgtactcccaactgtggtcgcgctctcaccccttctgctgctctcgtggccccctcgcgatggcgggcatcctgtttgaggatattttcgatgtgaaggatattgacccggagggcaagaagtttgaccgagtgtctcgactgcattgtgagagtgaatctttcaagatggatctaatcttagatgtaaacattcaaatttaccctgtagacttgggtgacaagtttcggttggtcatagctagtaccttgtatgaagatggtaccctggatgatggtgaatacaaccccactgatgataggccttccagggctgaccagtttgagtatgtaatgtatggaaaagtgtacaggattgagggagatgaaacttctactgaagcagcaacacgcctctctgcgtacgtgtcctatgggggcctgctcatgaggctgcagggggatgccaacaacctgcatggattcgaggtggactccagagtttatctcctgatgaagaagctagccttctgaacctcgcctgaagccagcctctctgccaagtcactcaggtcatgggcattgttcaagcctgagtggcagccgctcttgctcacctgttgaggaagggctggctcactgtccaccgtggcggcatctttaactggcctccactcaatgggaaactgactcgcctgtgaaagacacagtgggagagctgaaaatgaatcagaagctttatgtatatgatttttaaattaaactttactttttcagactgcccctcccctttttgtaaaaagtccatttactgt

SEQ ID NO: 163099 - DNA, 823 bp, Artificial Sequence
  derived and/or modified sequence
gaagagctggtatccaagggacagggcagtgccaggctgaaggggcacggaggggatccgtgtccaggagaaggcagtggagggggaacgcgcagcactaagctggagggagccacctggacatgagacccgccctcaatgccgaagcctctcggaagcaatctttcgggacggaagttaagtagccccgagcgggaggctgtggcggaagtggtcgcgttaccgcttgtttgtgcgcatgcgccactctcgtctggccgccgcgctttcaggaggtgcttttggttctctccggtcttgtccacgctagggggtgcacgtactcccaactgtggtcgcgctctcaccccttctgctgctctcgtggccccctcgcgatggcgggcatcctgtttgaggatattttcgatgtgaaggatattgacccggagggcaagaagtttgaccgagtgtctcgactgcattgtgagagtgaatctttcaagatggatctaatcttagatgtaaacattcaaatttaccctgtagacttgggtgacaagtttcggttggtcatagctagtaccttgtatgaagatggtaccctggatgatggtgaatacaaccccactgatgataggccttccagggctgaccagtttgagtatgtaatgtatggaaaagtgtacaggattgagggagatgaaacttctactgaagcagcaacacgcctctctgcgtacgtgtcctatgggggcctgctcatgaggctgcagggggatgccaacaacctgcatggattcgaggtggactccagagtttatctcctgatgaagaagctagc

SEQ ID NO: 163100 - DNA, 1802 bp, Artificial Sequence
  derived and/or modified sequence
gggacggcccagccaggctggggtccgcgcggggcctcccgagaggcggcaaggggcgctgggaaggcgcaagcccgcgccggctccctgcggatgcccgggtcggagaggggcgcccgggaggggcgggtctactggcacgtggaggggccggcccgggttcgcggttccccgtgcccaggcaggaggggctgcagacgcctgagctccgtaggggttggggctgggggctgcggagctgtctacatcggactcctccgggtcagcccgttaggagccgcctcccctctgcccctccgaagagacgagcggcccagacaggcctgggaaggcccctctgccccgtcaggggtgaaaagcaaagctggaaggattcggagagggttggggccgtcttcctcatccttccttttctcggggctcccgtggcgacgtcatggcaaattcccaaactggacggatccggctcgggttacgtccagcagggccgagccggcccaggccggccccggggtcctcggtgccggctggaggggctgggcacctctggggcggggttctgctccacctgccctcggcgcggactgtgccctcggcgggcacgcggaccggcggggtagggctagggcccggcttctctgggccaaggatcaaggtccctgcctgggttaggcccccacgcattccagtcttcggaacccggcctctgaagagggcgcagtagggccccagcggagcgcgagaacccgctctacagcctattgcttccccgccctgggcagagccacctggacatgagacccgccctcaatgccgaagcctctcggaagcaatctttcgggacggaagttaagtagccccgagcgggaggctgtggcggaagtggtcgcgttaccgcttgtttgtgcgcatgcgccactctcgtctggccgccgcgctttcaggaggtgcttttggttctctccggtcttgtccacgctagggggtgcacgtactcccaactgtggtcgcgctctcaccccttctgctgctctcgtggccccctcgcgatggcgggcatcctgtttgaggatattttcgatgtgaaggatattgacccggagggcaagaagtttgaccgagtgtctcgactgcattgtgagagtgaatctttcaagatggatctaatcttagatgtaaacattcaaatttaccctgtagacttgggtgacaagtttcggttggtcatagctagtaccttgtatgaagatggtaccctggatgatggtgaatacaaccccactgatgataggccttccagggctgaccagtttgagtatgtaatgtatggaaaagtgtacaggattgagggagatgaaacttctactgaagcagcaacacgcctctctgcgtacgtgtcctatgggggcctgctcatgaggctgcagggggatgccaacaacctgcatggattcgaggtggactccagagtttatctcctgatgaagaagctagccttctgaacctcgcctgaagccagcctctctgccaagtcactcaggtcatgggcattgttcaagcctgagtggcagccgctcttgctcacctgttgaggaagggctggctcactgtccaccgtggcggcatctttaactggcctccactcaatgggaaactgactcgcctgtgaaagacacagtgggagagctgaaaatgaatcagaagctttatgtatatgatttttaaattaaactttactttttcagactgcccctcccctttttgtaaaaagtccatttactgtaaaatcgttttttccagtt

SEQ ID NO: 163101 - DNA, 453 bp, Artificial Sequence
  derived and/or modified sequence
atggcagggatcttgtttgaagacatctttgacgtgaaggatattgaccctgaaggaaaaaaattcgatagagttagtcgattgcattgtgagtcagagtcttttaagatggacctgatcctggatgtcaatatccagatttaccctgtcgacttaggcgataaattcagactggtcattgcatctactttgtatgaggacggtaccctcgacgacggcgaatataacccaacggacgatcggcctagtcgcgcagaccagttcgagtacgttatgtatggcaaagtctacagaattgagggcgacgaaacatccaccgaggctgccactcgactgtctgcatacgtaagctatggtgggctgctcatgagactgcagggagatgcaaacaacctccacggattcgaagtggacagcagagtgtatctcctcatgaagaagctggccttctag

SEQ ID NO: 163102 - DNA, 450 bp, Artificial Sequence
  derived and/or modified sequence
atggctggaatccttttcgaggacatttttgacgttaaggacattgatcccgaaggaaaaaagttcgaccgcgtttcacgcctccactgtgagagcgagtctttcaagatggatctgattctagatgttaatattcagatctaccctgtggacttgggggacaaattccgcttagtgatcgcctctacactgtacgaagatggaacccttgatgacggtgagtacaatcccactgatgatagaccatcacgggcagatcaatttgagtacgtcatgtacggcaaagtttacaggattgaaggagatgaaacttctacagaagcagctacaaggttgtcagcctacgtcagttatggaggcctgcttatgagacttcaaggggacgccaacaatttacatggatttgaagttgacagcagagtgtaccttctaatgaaaaaactcgcttag

SEQ ID NO: 163103 - DNA, 453 bp, Artificial Sequence
  derived and/or modified sequence
atggcgggtatcctgttcgaagacatcttcgacgtgaaggacatagatccggaaggtaaaaagttcgatagggtgtcccgcctgcattgcgagagcgaaagctttaagatggatctcattctcgatgttaatatacagatctaccctgtggatctaggagataagttcaggctcgtgatcgcatctaccctgtacgaagacggaaccctcgatgatggcgaatacaacccaactgacgatcgcccaagccgtgccgatcaattcgagtacgttatgtatggtaaagtatatcggatcgagggggacgaaacttcaacggaagccgcaaccaggctcagtgcctacgtgagctatggagggcttctgatgcgtctgcagggggacgccaacaacctccatggctttgaagtcgacagccgcgtttatcttttaatgaagaagcttgccttctag

SEQ ID NO: 163104 - DNA, 453 bp, Artificial Sequence
  derived and/or modified sequence
atggccggcatcctgttcgaggacatcttcgacgtgaaggacatcgaccccgagggcaagaagttcgacagagtgagcagactgcactgcgagagcgagagcttcaagatggacctgatcctggacgtgaacatccagatctaccccgtggacctgggcgacaagttcagactggtgatcgccagcaccctgtacgaggacggcaccctggacgacggcgagtacaaccccaccgacgacagacccagcagagccgaccagttcgagtacgtgatgtacggcaaggtgtacagaatcgagggcgacgagaccagcaccgaggccgccaccagactgagcgcctacgtgagctacggcggcctgctgatgagactgcagggcgacgccaacaacctgcacggcttcgaggtggacagcagagtgtacctgctgatgaagaagctggccttctag

SEQ ID NO: 163105 - DNA, 450 bp, Artificial Sequence
  derived and/or modified sequence
atggccggcatcctgttcgaggacatcttcgacgtgaaggacatcgaccccgagggcaagaagttcgacagagtgagcagactgcactgcgagagcgagagcttcaagatggacctgatcctggacgtgaacatccagatctaccccgtggacctgggcgacaagttcagactggtgatcgccagcaccctgtacgaggacggcaccctggacgacggcgagtacaaccccaccgacgacagacccagcagagccgaccagttcgagtacgtgatgtacggcaaggtgtacagaatcgagggcgacgagaccagcaccgaggccgccaccagactgagcgcctacgtgagctacggcggcctgctgatgagactgcagggcgacgccaacaacctgcacggcttcgaggtggacagcagagtgtacctgctgatgaagaagctggcctag

SEQ ID NO: 163106 - protein, 117 aa, Artificial Sequence
  derived and/or modified sequence
MNAPPAFESFLLFEGEKKITINKDTKVPNACLFTINKEDHTLGNIIKSQLLKDPQVLFAGYKVPHPLEHKIIIRVQTTPDYSPQEAFTNAITDLISELSLLEERFRVAIKDKQEGIE

SEQ ID NO: 163107 - DNA, 354 bp, Artificial Sequence
  derived and/or modified sequence
atgaacgccccaccagcattcgaatcattccttcttttcgagggtgaaaagaaaatcacaataaataaggatacaaaggtacctaatgcgtgtttgttcaccattaataaggaggaccatacgcttggaaatattatcaagagccagcttctaaaagatccccaagtgctgttcgcgggctacaaagttcctcatccactggaacataagatcattatccgagtccaaacgactcccgactattcgcctcaggaggcatttacaaacgcaatcactgacctcatatcggagcttagtctgctggaggagaggtttagagtcgcaatcaaggataaacaggagggtatcgaatag

SEQ ID NO: 163108 - DNA, 354 bp, Artificial Sequence
  derived and/or modified sequence
atgaatgcccccccagcctttgagagcttcctgctgtttgaaggagagaagaagatcaccatcaacaaggacaccaaggtgcccaatgcctgcctcttcaccatcaacaaggaggaccacaccctgggcaacatcatcaagagccagctgctgaaggacccccaggtgctgtttgctggctacaaggtgccccaccccctggagcacaagatcatcatccgggtgcagaccaccccagactacagcccccaggaggccttcaccaatgccatcacagacctgatcagcgagctgagcctgctggaggagcgcttccgggtggccatcaaggacaagcaggagggcatcgagtag

SEQ ID NO: 163109 - DNA, 354 bp, Artificial Sequence
  derived and/or modified sequence
atgaacgccccccccgccttcgagagcttcctgctgttcgagggcgaaaagaagatcactattaataaggatactaaggtcccaaacgcctgcctgtttaccattaacaaggaagaccacacactgggaaacataattaagtcccagctgctgaaggacccacaggtcctgttcgccggatacaaggtaccccatccgctggagcataagattatcatcagggtgcagacaactcccgactacagccctcaggaggcttttacaaatgccatcaccgatctgatttcggagctgtcattactggaggaacggttccgcgtagcgattaaggataaacaggagggcatagaatag

SEQ ID NO: 163110 - DNA, 932 bp, Artificial Sequence
  derived and/or modified sequence
gcggcggcggcggacccttggggtctggacgcaacggcggcgggagcatgaacgcccctccagccttcgagtcgttcttgctcttcgagggcgagaagaagatcaccattaacaaggacaccaaggtacccaatgcctgtttattcaccatcaacaaagaagaccacacactgggaaacatcattaaatcacaactcctaaaagacccgcaagtgctatttgctggctacaaagtcccccaccccttggagcacaagatcatcatccgagtgcagaccacgccggactacagcccccaggaagcctttaccaacgccatcaccgacctcatcagtgagctgtccctgctggaggagcgctttcgggtggccataaaagacaagcaggaaggaattgagtaggggccagagggggctctgctcggcctgtgagccccgttcctacctgtgcctgaccctccgctccaggtaccacaccgaggagagcggccggtcccagccatggcccgccttgtggccacccctcaccctgacaccgacgtgtcctgtacatagattaggttttatattcctaataaagtatagcgggagagacctggatgtggacttgagcagcggtgacttcgcaagcaaatggattgtcaggcttgatgcaggcagatgacctgtttcaggggcgtccggctggcagggatgaattcattctggaccaaagatccggggtccaggggctgctgcgggggctgtgctgagccggagagaagtgtgcaaacccatgagctcccaagagtctctgctctagaagcctcaactcctgggcctgcctgtcagtcaaagcaggaacacttcttcctgcataactcgaaacacctttccacaggcttcttgtccacagtagagtttaataaaaatattcactgaaagacccccccc

SEQ ID NO: 163111 - DNA, 354 bp, Artificial Sequence
  derived and/or modified sequence
atgaacgctccaccagccttcgaatcgtttctgctttttgagggggaaaagaagatcaccatcaacaaagataccaaggtccctaatgcatgcttgtttaccatcaataaggaagatcacaccctggggaatatcatcaaatcacagctcctcaaggatccccaggtgctgtttgccggatataaagtgccacacccattggaacataagattatcatccgggttcagactactccagattattccccacaggaggcttttactaatgcaatcaccgatctgattagtgaactatctctcttggaagaaagatttcgggtggcaattaaggacaagcaggaagggatcgaatag

SEQ ID NO: 163112 - DNA, 354 bp, Artificial Sequence
  derived and/or modified sequence
atgaacgccccccccgccttcgagagcttcctgctgttcgagggcgagaagaagatcaccatcaacaaggacaccaaggtgcccaacgcctgcctgttcaccatcaacaaggaggaccacaccctgggcaacatcatcaagagccagctgctgaaggacccccaggtgctgttcgccggctacaaggtgccccaccccctggagcacaagatcatcatcagagtgcagaccacccccgactacagcccccaggaggccttcaccaacgccatcaccgacctgatcagcgagctgagcctgctggaggagagattcagagtggccatcaaggacaagcaggagggcatcgagtag

SEQ ID NO: 163113 - protein, 256 aa, Artificial Sequence
  derived and/or modified sequence
MLWQKPTAPEQAPAPARPYQGVRVKEPVKELLRRKRGHASSGAAPAPTAVVLPHQPLATYTTVGPSCLDMEGSVSAVTEEAALCAGWLSQPTPATLQPLAPWTPYTEYVPHEAVSCPYSADMYVQPVCPSYTVVGPSSVLTYASPPLITNVTTRSSATPAVGPPLEGPEHQAPLTYFPWPQPLSTLPTSTLQYQPPAPALPGPQFVQLPISIPEPVLQDMEDPRRAASSLTIDKLLLEEEDSDAYALNHTLSVEGF

SEQ ID NO: 163114 - DNA, 771 bp, Artificial Sequence
  derived and/or modified sequence
atgctctggcagaagcctacggctccagagcaggccccagcgcctgcaagaccctatcagggagtgcgcgttaaagaaccggtgaaagagctcttgcggcggaagcggggccacgcgtcttctggcgctgcacctgcccccacagcagtggtactgccccaccagccacttgccacctataccactgtcggtccatcttgcctggacatggagggatccgtcagcgctgtgacagaggaggcggccctctgcgcgggttggttgtcacagcccacacccgcgacgctgcaaccgttggccccttggacaccgtataccgaatatgtccctcacgaggccgtcagctgcccttactctgccgatatgtacgtgcagcccgtttgtccctcatacactgtggtagggcccagttctgtcctgacctatgcgtcgccacccttgatcaccaacgtgaccactcggagttctgccactcctgccgtgggccccccactcgaggggccggagcatcaagcacctttgacgtacttcccctggccccagccccttagcaccctgcctacctcaactctgcagtatcagcctcccgcccctgctttaccaggtccccaattcgttcagctgccgatcagcatccctgagcccgtgctgcaggatatggaggacccaaggagggccgctagttctctaacaatagataagttgttgctcgaggaggaagactctgacgcttatgccctaaatcacactctcagtgtggagggcttttag

SEQ ID NO: 163115 - DNA, 771 bp, Artificial Sequence
  derived and/or modified sequence
atgctgtggcagaagcccacagcccctgagcaggccccagccccagcccggccctaccagggcgtgcgggtgaaggagcctgtgaaggagctgctgcggaggaagaggggccacgccagcagtggagctgccccagcccccacagctgtggtgctgccccaccagcccctggccacctacaccaccgtgggccccagctgcctggacatggagggctctgtgtctgctgtgacagaggaggccgccctgtgtgccggctggctgagccagcccaccccagccaccctgcagcccctggccccctggaccccctacacagaatatgtgccccatgaagctgtgtcctgcccctacagcgctgacatgtatgtgcagcctgtgtgccccagctacacagtggtgggccccagctctgtgctgacctacgccagccccccactcatcaccaacgtgaccaccaggagcagcgccaccccagctgtgggcccccccctggagggccctgagcaccaggcccccctgacctacttcccctggccccagcccctgagcaccctgcccaccagcaccctgcagtaccagcccccagccccagccctgcccggcccccagtttgtgcagctgcccatcagcatccctgagcctgtgctgcaggacatggaggacccccggcgggccgccagcagcctgaccatcgacaagctgctgctggaggaggaggacagtgatgcctatgccctgaaccacaccctgtctgtggagggcttctag

SEQ ID NO: 163116 - DNA, 771 bp, Artificial Sequence
  derived and/or modified sequence
atgctgtggcagaagcccaccgcccccgagcaggcccccgcccccgccaggccatatcagggcgtgagagtaaaagagccggtcaaggagctattaaggcgtaaacggggacatgcaagttctggggccgcccccgcgccaacggccgtggtgcttccccatcaacccttagctacctatacgacagtgggcccctcctgcctggacatggaaggctccgtttcagcagtaacagaagaggctgccttatgcgccggctggctctcgcaacccacacctgcaactctgcagccccttgccccttggacaccttacacggagtatgtgccacacgaggccgtcagctgtccttactccgctgacatgtacgttcagccagtctgtcctagctatactgtggtagggccctcgtccgtcctcacatacgcgtcgccacccctgattaccaacgtgacaactcgctcgtcagctacccctgctgtgggtcctccactggagggtcccgagcatcaggcaccattaacatacttcccctggcctcagccactttctaccctccccactagtaccttacaataccagccacctgccccggccttaccaggccctcagtttgtgcagttgccaatctcaattcccgagcccgtgctccaggacatggaagaccctcgcagggccgcttcttcccttaccatagacaagcttctgctggaggaggaggactcggatgcctacgccctgaatcacaccctatcggtggaagggttttag

SEQ ID NO: 163117 - DNA, 3295 bp, Artificial Sequence
  derived and/or modified sequence
gcaggcgcccatggcgggctgagtcctgcccatgccctggtggcctggaagcctgcatgggcgccgtgcaaagatcaacgttttccagaggagcttttgggctcatcactggcctggggagggcttgacacggggttcccacagcttgccccacaccaccttcacacccacacacagcaggtccccgcggggccggtgcaggctgtggctgcccgcgctgcgctgttgctctgtcccagctggctagctccgagtgtggagcgctctgggccggggccgctggggcgcgcacagtggggtgacaggcggcctggctgcagaaacgttgcaccggtgcctgaggtgggaggatgtgatgacgcggcccacgcagcgggaacccaggcctttaaaaagcccaggaaacagcctcagctcaagcggtggctccactggaggaaaacacaccccggtctcacattaaagaagccaaactgtcggcttcaaagagaaaaggcaacatcctgtcacaggccatgctctggcaaaaacccacagctccggagcaagccccagccccggcccggccataccagggcgtccgtgtgaaggagccagtgaaggaactgctgaggaggaagcgaggccacgccagcagtggggcagcacctgcacctacggcggtggtgctgccccatcagcccctggcgacctacaccacagtgggtccttcctgcctggacatggaaggttctgtgtctgcagtgacagaggaggctgccctgtgtgccggctggctctcccagcccaccccggccaccctgcagcccctggccccatggacaccttacaccgagtatgtgccccatgaagctgtcagctgcccctactcagctgacatgtatgtgcagcccgtgtgccccagctacacggtggtggggccctcctcagtgttgacctatgcctctccgccactcatcaccaatgtcacgacaagaagctccgccacgcccgcagtggggcccccgctggagggcccagagcaccaggcacccctcacctatttcccgtggcctcagcccctttccacactacccacctccaccctgcagtaccagcctccggccccagccctacctgggccccagtttgtccagctccccatctctatcccagagccagtccttcaggacatggaagaccccagaagagccgccagctcgttgaccatcgacaagctgcttttggaggaagaggatagcgacgcctatgcgcttaaccacactctctctgtggaaggcttttaggcgtggctcccacctgagtcctgttccctgaaactgggattttaaaatgagcctggaattgagccccaggttcatgcttgtttggagtagtcatttcatgactacactttctacgcacagctagaattgtagacctgtaaaccttccttcccttcttccttcccctccctccctcacttcctccctctcccccatccttccattcttcccctccctcccttcttcctttccaaccccttccttccttttcctccctcccttccttccctccttcccttctccctttccaaccccttccttccttttcctccctcccttccttccctccttcccttctccctttccttctttacctccctccctccctcgcttcttctctctttcttacttcttttttcaattctgttccattttgggaggtaattatagggattttagcaataacattttatgtcaaatgttgccaagtctgtggtccatgggctttcatttctgtcacatttcatttcttggaaaaggcctccttcctccagtgcctgctgaaccatcttagggtcactcacaccctctgtaattttaagatgtatgtggtggccggcgggaagaccagccccgacagcacctcctgagaaagtcagccaagggcctaccctgatgccagagtccttgagctgtcagttcccacagttgctcctttgtttgctcttctcagcctcggccagatttacagtccaggcagcaaaatctcaaggcctggggctcagagtagtaaggggtgggaagtgggtggcagggagaaaagaacatcagggtgggtggggacaggccagtgacgaagagagggacagaggagggatgggaacaggctgtgcatcttagttggagagaggggtgtgggaggaagcttgagtttgatgcagggaggaggaaggctgaggaatgacttggctccagattacttggttattaagaagaacaataaactaaaggaaagcattgcttgaagagatggttttgctgctctccttgaggatacgtgcaagggaagttgggctgttgtaaacagggtgaagggtgtgtttggtcggccatttctgtctcacctctaggccctctgctggtgctgtggaggccaagaccccattaagcctaaaggtgatgggtcctcgcctaggcttagtgctaccatgtgggttttgtttctttccttccttccttccttccttccttccttccttccttccttccttccttccttccttccttctttccttccttccttccttccttccttcctctctctttctttcttttttttggttttttttgggacggagtctcactccattgcccaggctggagtacaatggtgcgatcttggctcactgcacctctgtctcccaagttcaagtgattctcctgcctgagcctcccgagtagctgggattacaggtgcatgccaccatgcctggctaatttttgtatttttagtagagacggggtttcaccatgttggccaggctggtctcgaactcctgaccttgtgatccgcccgcctcagcctctcagagtgctgggatcacaggcgtgagccaccgcacccagccttttaccatgtgggtttctttagtgtcttaaaagcgtccataagccaccattctgtggaaccaaggccccctccacgcaaacaccctccctcctggggacctctggagcctcagccagaagtaccattaggtttaattttaatttgttttgctggagaaacatcaggtttgtaggagactgagttgttagcaggtgtgcttagctcttgatagtgaacgtgtaccttgggaactggctcacccacctgctaatagcaccatcgtcactattaagcagacatttcagttggtagaatccatgtagaagtcatggacttttctgggaaatgacttttctgggaaatgacagtttctttgacatattttctttgcccactttaaataaaaactctggagaaagtt

SEQ ID NO: 163118 - DNA, 771 bp, Artificial Sequence
  derived and/or modified sequence
atgctctggcagaaacccacagctcctgagcaagctccagcacctgccaggccttaccaaggcgttagggttaaggaacccgtgaaagaactgcttcggaggaagcggggtcacgcctccagcggagcagcccctgcccctacagccgtggttttgccccaccagcctctagccacctatacgaccgtcggtccctcttgtttggatatggaaggaagcgtgagcgcggtgaccgaagaggcagcattgtgcgctgggtggctgagtcagcccacacccgcaaccctgcagcctcttgcaccatggacaccttatacagagtacgtaccacacgaggccgtaagctgtccttattctgcggacatgtatgtacaacctgtatgccccagctacacagtcgtcggcccttccagtgtgctgacatacgcaagtccaccattgatcaccaacgtgaccacaaggtcatctgccacccccgctgtaggaccacccctagagggaccagagcatcaggcccctctgacatattttccctggcctcagcccttgtctaccctgcctaccagcacgttacagtaccagcccccagcacctgccctgcccggaccgcaatttgtgcagttaccaatatcaatcccagagcccgtgcttcaggatatggaggaccccagacgcgctgctagtagcctgactatagataaacttctgcttgaggaagaagatagcgatgcatatgctctgaatcacacgctctctgtggagggcttttag

SEQ ID NO: 163119 - DNA, 771 bp, Artificial Sequence
  derived and/or modified sequence
atgctgtggcagaagcccaccgcccccgagcaggcccccgcccccgccagaccctaccagggcgtgagagtgaaggagcccgtgaaggagctgctgagaagaaagagaggccacgccagcagcggcgccgcccccgcccccaccgccgtggtgctgccccaccagcccctggccacctacaccaccgtgggccccagctgcctggacatggagggcagcgtgagcgccgtgaccgaggaggccgccctgtgcgccggctggctgagccagcccacccccgccaccctgcagcccctggccccctggaccccctacaccgagtacgtgccccacgaggccgtgagctgcccctacagcgccgacatgtacgtgcagcccgtgtgccccagctacaccgtggtgggccccagcagcgtgctgacctacgccagcccccccctgatcaccaacgtgaccaccagaagcagcgccacccccgccgtgggcccccccctggagggccccgagcaccaggcccccctgacctacttcccctggccccagcccctgagcaccctgcccaccagcaccctgcagtaccagccccccgcccccgccctgcccggcccccagttcgtgcagctgcccatcagcatccccgagcccgtgctgcaggacatggaggaccccagaagagccgccagcagcctgaccatcgacaagctgctgctggaggaggaggacagcgacgcctacgccctgaaccacaccctgagcgtggagggcttctag

SEQ ID NO: 163120 - protein, 500 aa, Artificial Sequence
  derived and/or modified sequence
MATAASNPYLPGNSLLAAGSIVHSDAAGAGGGGGGGGGGGGGGAGGGGGGMQPGSAAVTSGAYRGDPSSVKMVQSDFMQGAMAASNGGHMLSHAHQWVTALPHAAAAAAAAAAAAVEASSPWSGSAVGMAGSPQQPPQPPPPPPQGPDVKGGAGRDDLHAGTALHHRGPPHLGPPPPPPHQGHPGGWGAAAAAAAAAAAAAAAAHLPSMAGGQQPPPQSLLYSQPGGFTVNGMLSAPPGPGGGGGGAGGGAQSLVHPGLVRGDTPELAEHHHHHHHHAHPHPPHPHHAQGPPHHGGGGGGAGPGLNSHDPHSDEDTPTSDDLEQFAKQFKQRRIKLGFTQADVGLALGTLYGNVFSQTTICRFEALQLSFKNMCKLKPLLNKWLEEADSSTGSPTSIDKIAAQGRKRKKRTSIEVSVKGALESHFLKCPKPSAQEITNLADSLQLEKEVVRVWFCNRRQKEKRMTPPGIQQQTPDDVYSQVGTVSADTPPPHHGLQTSVQ

SEQ ID NO: 163121 - DNA, 1503 bp, Artificial Sequence
  derived and/or modified sequence
atggccacggcggcttctaacccctacctgccggggaacagcctgctcgcggccggctctattgtgcactcggacgcggcaggggctggcggcggcgggggtggcggcggcggcggcggcgggggcggcgcagggggcgggggcggcggcatgcagccgggcagcgccgccgtgacctcgggcgcctaccggggggacccgtcctctgtcaagatggtccagagcgacttcatgcagggggccatggccgccagcaacggcggccatatgctgagccacgcgcaccagtgggtcacagccctgccccacgccgccgccgccgccgccgctgccgccgccgccgccgtggaggcgagctcgccgtggtcgggcagcgccgtgggcatggctggcagcccccagcagccaccgcagccgccgccgccaccgccgcagggccccgacgtgaagggcggcgccgggcgcgacgacctgcacgcgggcacagcgctgcaccaccgcgggccgccgcacctcggacccccgccgccgcccccacaccagggccaccctgggggctggggggcggccgccgctgccgcagccgcagccgccgccgccgccgccgccgcgcacctcccgtccatggccgggggccagcagccgccgccgcagagtctgctctactcgcagcccggaggcttcacggtgaacggcatgctgagcgcgccaccggggcccggcggcggcggcggcggcgcgggcggtggagcccagagcttggtgcacccggggctggtgcgcggggacacgccagagctggccgagcaccaccaccaccaccaccaccacgcgcatcctcacccgccgcacccgcaccacgcgcagggacccccgcaccacggcggcggcggcggcggcgcggggcctggactcaacagccacgacccgcactcggacgaggacacgccgacgtcggacgacctggagcagttcgccaagcagttcaagcagcggcgcatcaagctgggcttcacgcaggccgacgtggggttggcgctgggcacactctacggcaacgtgttctcgcagaccaccatctgccgcttcgaggccctgcagctgagcttcaagaacatgtgcaagctcaagccgctgctgaacaagtggctggaggaggcggactcaagcaccggcagccccacaagcatcgacaagatcgcggcgcagggccgcaagcgcaagaagcggacctctatcgaggtgagcgtcaagggcgcgctggagagccacttcctcaagtgccccaagccctccgcgcaggagatcaccaacctggccgacagcctgcagctcgagaaggaggtggtgcgggtctggttctgcaatcggcgccaaaaggagaagcgcatgacgccgcccgggatccaacagcagacgcccgacgacgtctactcgcaggtgggcaccgtgagcgccgacacgccgccgcctcaccacgggctgcagacgagcgttcagtga

SEQ ID NO: 163122 - DNA, 387 bp, Artificial Sequence
  derived and/or modified sequence
atgggaacgtcaagtatctttctatgtgtactgttcctatgcggggcactgggactgactatgtcccccgcccgcggaaggttgcgctgttatatttgtgggtttactaaaccatgccaccccgtgcccaccgagtgtagagatgatgaggcatgtggcatatccatcggaaccagcgttaaaaaactgcccttaaaggggcccgtgccttcagcacggttgtgtcacctcctcgctgcattgctgcacagcgtggcaccactgctgagagccggacctgttcaacacagccggtttccaacagccgcccaccagccccctagactgcccgcacccctctgcggacaattgaggtgggagcgtacgccgccgcccctcgcgtcatag

SEQ ID NO: 163123 - DNA, 1503 bp, Artificial Sequence
  derived and/or modified sequence
atggccacggcagcttctaatccgtatctgcccggtaacagcctcctggcggctggttccatagtacacagcgatgccgcaggggccggagggggcggcgggggtggggggggaggcggaggtggtggcgcgggcgggggcggtggcggcatgcagcctggttccgccgccgtgaccagcggcgcatacagaggcgacccctcctcagtcaaaatggtacagagcgacttcatgcagggggctatggctgctagcaatggtggacacatgctatcccacgcacaccaatgggttacagctctcccacacgccgcagccgctgctgcagctgctgccgctgcagctgtcgaggcttcatccccctggtcaggcagcgccgtgggaatggcgggttctccacagcagcctccacaacccccccctcctcccccccaggggcccgacgtcaagggaggagccggacgcgatgatctgcatgcggggactgcgctacatcaccgtggaccaccgcacctcggtccaccacccccacctcctcatcagggacatccagggggttggggcgctgccgccgcggctgctgccgccgccgctgccgcagcggcagcagcccacctgcctagcatggctggcggtcagcaaccccccccccagtctcttctctattctcagccaggaggcttcactgtgaatggaatgctctcggcccctccaggccctggaggcgggggtggcggcgccgggggtggtgcccaatcactcgtccatccgggactggttagaggcgacacgccggaactggctgaacaccaccaccaccatcaccatcacgctcatccacaccctccccacccgcaccacgcacaaggaccgcctcaccacggggggggaggaggaggagccggacccgggttaaactctcacgatccacattccgacgaggataccccaactagcgacgaccttgagcagttcgccaagcaatttaagcagcgaagaatcaagctggggttcacacaagcagatgtggggcttgcactcggcaccctctatgggaacgtatttagtcaaaccaccatttgtaggttcgaagcccttcaattgagcttcaagaatatgtgcaagctcaagccacttcttaacaagtggctggaagaagcagatagtagcacagggtcacccacctctattgacaagatagccgcccagggaagaaagcgaaagaagcgcaccagtatcgaagtgtctgtgaaaggcgctttagagagccacttccttaaatgtcccaagcctagcgcgcaagagataacaaaccttgcggattcccttcagctggagaaagaggtggtgcgtgtttggttttgcaatcgtaggcagaaggagaaacggatgactcccccaggcatccagcagcaaaccccagacgatgtatatagccaggtggggaccgttagcgccgacactcccccccctcaccacgggcttcagacttcggtccaatag

SEQ ID NO: 163124 - DNA, 1503 bp, Artificial Sequence
  derived and/or modified sequence
atggccacagctgccagcaacccctacctgcccggcaacagcctgctggccgccggcagcatcgtgcacagtgatgctgctggagctgggggcggcggcggcggcggcggcggcggcggcggcggcggggccggcggcggcggcggcggcatgcagcccggcagcgctgctgtgaccagcggggcctacagaggagaccccagctctgtgaagatggtgcagagcgacttcatgcagggcgccatggccgccagcaatggaggccacatgctgagccacgcccaccagtgggtgacagccctgccccacgccgctgctgctgctgctgctgctgctgctgctgctgtggaggccagcagcccctggagcggcagcgctgtgggcatggccggcagcccccagcagcccccccagcccccacctcctccaccccagggcccagatgtgaagggcggggccggcagagatgacctgcacgccggcacagccctgcaccaccggggccccccccacctgggccccccacctcctccaccccaccagggccaccctgggggctggggcgctgctgctgctgctgctgctgctgctgctgctgctgctgctgctgcccacctgcccagcatggccggcggccagcagcccccaccccagagcctgctgtacagccagcccggcggcttcaccgtgaatggcatgctgagcgcccctcctggccctgggggcggcggcggcggggccggcggcggggcccagagcctggtgcaccctggcctggtgcggggggacaccccagagctggccgagcaccaccaccaccaccaccaccacgcccacccccaccccccccacccccaccacgcccagggccccccccaccacggcggcggcggcggcggggccggccctggcctgaacagccatgacccccacagtgatgaggacacccccaccagtgatgacctggagcagtttgccaagcagttcaagcagaggcgcatcaagctgggcttcacccaggctgatgtgggcctggccctgggcaccctgtatggaaatgtgttcagccagaccaccatctgccgctttgaggccctgcagctgtccttcaagaacatgtgcaagctgaagcccctgctgaacaagtggctggaggaggccgacagcagcacaggcagccccaccagcattgacaagattgctgcccagggcaggaagaggaagaagaggaccagcattgaggtgtctgtgaagggggccctggagagccacttcctgaagtgccccaagcccagcgcccaggagatcaccaacctggccgacagcctgcagctggagaaggaggtggtgcgggtgtggttctgcaacagacggcagaaggagaagaggatgaccccacctggcatccagcagcagaccccagatgatgtgtacagccaggtgggcaccgtgtctgctgacaccccaccaccccaccacggcctgcagacctctgtgcagtag

SEQ ID NO: 163125 - DNA, 1503 bp, Artificial Sequence
  derived and/or modified sequence
atggccaccgccgccagcaacccctacctgcccggcaacagcctgttagccgcaggtagcatcgtgcacagcgatgctgccggcgccggggggggtgggggcggtgggggaggaggaggcggtggtggtgctggaggcggcgggggcggtatgcagccaggctcggccgcagtgacttctggagcttaccgtggggacccttcctccgtgaaaatggtccaatcagactttatgcagggggccatggcagcgagtaacggaggacacatgctgtcccatgcccaccagtgggttacagccttaccacatgctgctgctgctgccgcagccgccgccgcagccgccgtcgaggcgtctagtccgtggtccgggagcgcagtgggcatggctggaagccctcaacaacccccacagccacctcctcctccacctcagggaccagatgtaaaagggggcgccggcagagatgacctgcatgcaggtactgccctccaccacagggggccgccgcacctgggccctcctccgccccctccccatcagggtcatccgggagggtggggagcggccgcggccgctgccgccgctgctgcagcagccgcagccgccgctcacctgccaagcatggccggcggtcagcaaccacctccccaatcacttctgtacagtcaacctgggggattcacagtgaatggaatgctcagcgcaccaccgggaccgggcgggggaggaggcggggcaggaggtggtgcccagtcactggtacacccaggtttagtaagaggtgatacccccgagctggctgaacatcatcatcaccaccatcaccatgctcacccacatccgccgcatcctcaccacgcccagggccctccacatcatggcggaggcggcggcggagcagggcccgggctaaattcgcacgatcctcactcagatgaagacacaccaacgtcggacgatttggaacaatttgccaaacagttcaagcagcgccgtatcaaactcgggtttacacaggctgatgtaggactggccttaggcaccctctacgggaatgtattttctcaaacaacaatttgtcgcttcgaagctttacagctgtcgttcaagaacatgtgtaagctcaagcctctgctgaacaaatggcttgaggaagcagacagcagtaccggaagtcctacaagcattgacaagatcgcggcccagggcaggaaacgcaaaaaaagaaccagcatcgaagtttccgttaagggcgctctggaatcccacttcctgaaatgtcccaaacccagtgctcaggagatcaccaatttggctgactctctccagctggagaaggaagtcgtgcgggtctggttttgcaatcgacggcaaaaagagaagcgcatgactcctccgggaatccagcagcagactccagatgatgtatactcccaggtgggcactgtgagcgccgacacgccacccccacaccacggacttcagacttctgttcagtag

SEQ ID NO: 163126 - DNA, 4961 bp, Artificial Sequence
  derived and/or modified sequence
atggccacggcggcttctaacccctacctgccggggaacagcctgctcgcggccggctctattgtgcactcggacgcggcaggggctggcggcggcgggggtggcggcggcggcggcggcgggggcggcgcagggggcgggggcggcggcatgcagccgggcagcgccgccgtgacctcgggcgcctaccggggggacccgtcctctgtcaagatggtccagagcgacttcatgcagggggccatggccgccagcaacggcggccatatgctgagccacgcgcaccagtgggtcacagccctgccccacgccgccgccgccgccgccgctgccgccgccgccgccgtggaggcgagctcgccgtggtcgggcagcgccgtgggcatggctggcagcccccagcagccaccgcagccgccgccgccaccgccgcagggccccgacgtgaagggcggcgccgggcgcgacgacctgcacgcgggcacagcgctgcaccaccgcgggccgccgcacctcggacccccgccgccgcccccacaccagggccaccctgggggctggggggcggccgccgctgccgcagccgcagccgccgccgccgccgccgccgcgcacctcccgtccatggccgggggccagcagccgccgccgcagagtctgctctactcgcagcccggaggcttcacggtgaacggcatgctgagcgcgccaccggggcccggcggcggcggcggcggcgcgggcggtggagcccagagcttggtgcacccggggctggtgcgcggggacacgccagagctggccgagcaccaccaccaccaccaccaccacgcgcatcctcacccgccgcacccgcaccacgcgcagggacccccgcaccacggcggcggcggcggcggcgcggggcctggactcaacagccacgacccgcactcggacgaggacacgccgacgtcggacgacctggagcagttcgccaagcagttcaagcagcggcgcatcaagctgggcttcacgcaggccgacgtggggttggcgctgggcacactctacggcaacgtgttctcgcagaccaccatctgccgcttcgaggccctgcagctgagcttcaagaacatgtgcaagctcaagccgctgctgaacaagtggctggaggaggcggactcaagcaccggcagccccacaagcatcgacaagatcgcggcgcagggccgcaagcgcaagaagcggacctctatcgaggtgagcgtcaagggcgcgctggagagccacttcctcaagtgccccaagccctccgcgcaggagatcaccaacctggccgacagcctgcagctcgagaaggaggtggtgcgggtctggttctgcaatcggcgccaaaaggagaagcgcatgacgccgcccgggatccaacagcagacgcccgacgacgtctactcgcaggtgggcaccgtgagcgccgacacgccgccgcctcaccacgggctgcagacgagcgttcagtgaagccagggcgcagagcgaagagggccgccgccgccgccgcctccgcagccgccgtcagcaccgccgccgcccctgccgccgccgccgccgccgccgccgccgctgccgccgccgcgccgaccctgcacctgggccgctccgggctccagcccaggcccatccgccgccctcccctccacccagagacaggcatgcccgcccttggaggagaaaacgcgggagaaacggaccaaggaggcatttttgcagtccaaggaaggaggggccaaaaaataaaaagcataataaacacccagactgttttgtatacatatataacaaacaaaaccggaagagaaaaagggggcgatcatgagatctcgttcatactgtggtggtgtttcgtttttgtttttgtttttaaagaagggtgaagatgcctgacgcacgaaaactgcactcgtgaggtttttccaccctgagatgacctacacggcagcggtggacagcacctgcctcgtcttctcctctttgaaaaaaagagagagagagagtcccctttcctttcactttctccctccaaaacagctgcctaaagagatccacggaaactttatttcctgggagcgacctgagagaaaacagaggcaccaggttccatcaggggacgacaccgtgctctgggaccctgtttttcttggccatattaaagtcatttggaaacaaatcaactctgaaatgggaaggaggggggaaaaacagtctccaagaaaaaaataattatattgacagcttctgaaactaacagactgaatagcaaagccaaaagaaaagtatcctcaaagtaaccttggaaataaaaggatcgggaaggagcagagggagagggggaacgtccgctgaggagtggcgagaggccccggccgagtcgggtcgcgggcgggcgggcgaactgggagcagagcgggggcccagccagcgaggccgccgagccaggcccggccgcgtacccaggctttgacggctgccattcagggtggacgatgcctaaagattccaccgctaatattttttttattaatattttttattttttatttctggactgactcagataaaggaatttagaaagactgagcaccagccgctgcacttctctggacttctctcctcaatccgttgccaactttgattgaatgggtgctgtggatgtgattatataatactgccatttccaagcagtgtttttggtaggttttaataaacagacttttcaaaagacggcaatatagaattgttagatccgttgttgatctaaaaatatttgctttatattttcattaaatgacttcttttaatattttattcagaatacttatgaactgctgcaaaacggtaatttatttttccccagatcttgtattacgtgtttttttcagacgagcacaaatcaaaatgaaatgaaaatatggacagttgttaggtaataagggtatcttttgatgtgatcatttgattgtaatttaatttgagtagtgattccgtaagagctgatcgagaaaataaatttgttagaatgaaatagtctgtgtctgatgcgtaaacactgtgtgggaagaaaagagttctttaagaaatatttttttactaatgaaaatccctaagtaatagcgttgaggaagtagagcctgctccacttaaggtacttttggaaatctagagtaaagcataggcattgctgagacagctagtattttaacatagtagtcactcctcgataatccataaattcacaatatttttctctcccttaattttagtggatgtctttagtgttttcaggtgagattgcctaaatattaacccttttcttggcgatacctgtgtttcttatcgaaagattgaacgatatcaccagtaaaaatgagccaactggctattaatggttaatacagcccctccccccaagttcagcttcttttttcttctcctgtccccctcccaacatgttcctgtctcttttctctttttctcaagactatagttgttaggagtcgcttataagtcttataaaatattttgatatcaattacttcccatcaataactatatgtaattaaatttaaattattaagctttttgggttttttccccccgtaataaaagaatatagttctaaaatcctgattatggtccacactgcataccatctgtgcaattaccaactcagacttaaggttctatatttctgtgtttttgtctctccccagtatgattctatatcttctttactggtgctgggggttttaggtcaccttttacataaaccctgcagagtggtcacattgatcaagttaatgtttcaatatttacaatgtgggaaaatgaaagtgtaatgcctcaggttgtgagtacttaagacgctaaaggctcggcttagttgagtccctatatattgtacttaaaagtatttagcagtggtagagcaacgattttatagacaaattccccccaatctcacttagctgtcactcactttttttcctccttctctcatcttcactccctctccctgtgatatcaatgcaggggttaaaaaacccggaaaactgtgagagcaacaaggcacagttatttctcccagacaggccctgtgtcactttcataaatcaaacccagccagatggccatgtattgggttgcattattttaaacaccaaatcgtactaaaaatcacaatcattttgatttgtgaaatctgaaaaaggccacatatattaaacagagagaagaaaaaaatgaagacaagaaaccacaatttacttttctttgccttcttgttccctatttctcttgctgctgtaatccctatgcccagcaaatttacaacctggagtgggggtgggggagaagttcaccattttgggggtgtctagagaggcaagcaaagaagtcctcattggaaagctgaggactggtcaggttgtttttatgtggtggatactactggcacgtgagatggaatcttgtttttcctatgggaatggtggtggttgattagacaagtaataggtctattaaaaaaatttcaggaggtatctacttagttgatttagctgacaacaaaagagctaacattagatttcacactgttttctattaaaaagcaaactttgctgattactttggaagaatccctgatttgggggtagcagagtaacttttaattggagaagctgggaaagcaaacccattttgtttcattatttgcattttataaagtgagctaatgcttgcactccattttttttaatcaaccctttcaatgtaattacaaaatgaaattcatggttgaaaaacaaaagagggcagatataactgagaggttttgtgctaaggcttatattgttacacatgtaaataatgaaaatattgttatatatcaccagatctttttaatgaatttggtcattgtgttc

SEQ ID NO: 163127 - DNA, 1503 bp, Artificial Sequence
  derived and/or modified sequence
atggctaccgcagcttctaacccttacttaccaggcaactccttgcttgcggctggttcaatcgttcactccgatgcggctggggctggaggaggcggaggcggaggcggagggggtgggggaggaggggctgggggtggaggaggtggcatgcagcctggcagcgccgcagtcacaagtggtgcctatagaggggacccttcgtccgttaaaatggtccagagcgatttcatgcaaggggctatggccgcaagcaacgggggacacatgttgtcccatgctcatcagtgggtgacggccctgcctcatgccgctgctgcagctgctgccgcagcagcggcagccgttgaagcctcttccccgtggtccggctccgcagttggtatggctggatccccccagcaaccccctcagcctcctccaccccctccccagggacccgacgttaagggtggcgctggaagggacgatttgcatgcgggaaccgccctccatcaccggggacctccacatttgggaccgcctcccccaccaccgcatcaaggacaccccggagggtggggggctgccgctgccgctgcggctgcagctgccgcagcagccgcagcggctcacctgccatctatggctggagggcaacagcccccaccccagagcctgctgtactcacagccaggcggatttactgtaaacggcatgttgtccgctccacccggtcccggtggcggagggggaggagctgggggtggcgcacagtccttggttcatcccggtctggtccgtggtgacacaccagaactagcagagcaccatcatcaccatcatcatcatgctcatccacaccctcctcacccacaccacgcccaaggccctcctcaccatgggggtggtggaggcggtgccggtcctggtctgaattctcacgatccccattctgacgaggacacacccacttcagacgacctggaacagtttgcgaagcagttcaaacagaggaggatcaagctgggatttacgcaggccgatgtcggactggcactcgggacgctttatggaaatgtgttcagtcagacgactatatgccgttttgaagccttgcagctttcatttaaaaacatgtgcaagctgaagcccctgctgaataaatggctggaagaagctgacagcagtacaggttcacccacaagtatcgacaagattgctgcccaggggcgaaaacggaagaagagaacctccatagaagtgagcgttaagggggcactcgagtctcattttttgaagtgccccaagccaagcgcacaggagataaccaacctcgcagactctctccagctcgaaaaagaggtcgtgcgtgtctggttctgtaatcgcaggcagaaagaaaaacgaatgactcccccaggcatccagcagcaaacccccgacgacgtctattctcaggttggcacggttagcgccgacaccccaccgcctcatcacggcctccagacatccgtccagtag

SEQ ID NO: 163128 - DNA, 1503 bp, Artificial Sequence
  derived and/or modified sequence
atggccaccgccgccagcaacccctacctgcccggcaacagcctgctggccgccggcagcatcgtgcacagcgacgccgccggcgccggcggcggcggcggcggcggcggcggcggcggcggcggcggcgccggcggcggcggcggcggcatgcagcccggcagcgccgccgtgaccagcggcgcctacagaggcgaccccagcagcgtgaagatggtgcagagcgacttcatgcagggcgccatggccgccagcaacggcggccacatgctgagccacgcccaccagtgggtgaccgccctgccccacgccgccgccgccgccgccgccgccgccgccgccgccgtggaggccagcagcccctggagcggcagcgccgtgggcatggccggcagcccccagcagcccccccagcccccccccccccccccccagggccccgacgtgaagggcggcgccggcagagacgacctgcacgccggcaccgccctgcaccacagaggccccccccacctgggccccccccccccccccccccaccagggccaccccggcggctggggcgccgccgccgccgccgccgccgccgccgccgccgccgccgccgccgcccacctgcccagcatggccggcggccagcagccccccccccagagcctgctgtacagccagcccggcggcttcaccgtgaacggcatgctgagcgccccccccggccccggcggcggcggcggcggcgccggcggcggcgcccagagcctggtgcaccccggcctggtgagaggcgacacccccgagctggccgagcaccaccaccaccaccaccaccacgcccacccccaccccccccacccccaccacgcccagggccccccccaccacggcggcggcggcggcggcgccggccccggcctgaacagccacgacccccacagcgacgaggacacccccaccagcgacgacctggagcagttcgccaagcagttcaagcagagaagaatcaagctgggcttcacccaggccgacgtgggcctggccctgggcaccctgtacggcaacgtgttcagccagaccaccatctgcagattcgaggccctgcagctgagcttcaagaacatgtgcaagctgaagcccctgctgaacaagtggctggaggaggccgacagcagcaccggcagccccaccagcatcgacaagatcgccgcccagggcagaaagagaaagaagagaaccagcatcgaggtgagcgtgaagggcgccctggagagccacttcctgaagtgccccaagcccagcgcccaggagatcaccaacctggccgacagcctgcagctggagaaggaggtggtgagagtgtggttctgcaacagaagacagaaggagaagagaatgaccccccccggcatccagcagcagacccccgacgacgtgtacagccaggtgggcaccgtgagcgccgacaccccccccccccaccacggcctgcagaccagcgtgcagtag

SEQ ID NO: 163129 - protein, 419 aa, Artificial Sequence
  derived and/or modified sequence
MMSMNSKQPHFAMHPTLPEHKYPSLHSSSEAIRRACLPTPPLQSNLFASLDETLLARAEALAAVDIAVSQGKSHPFKPDATYHTMNSVPCTSTSTVPLAHHHHHHHHHQALEPGDLLDHISSPSLALMAGAGGAGAAAGGGGAHDGPGGGGGPGGGGGPGGGPGGGGGGGPGGGGGGPGGGLLGGSAHPHPHMHSLGHLSHPAAAAAMNMPSGLPHPGLVAAAAHHGAAAAAAAAAAGQVAAASAAAAVVGAAGLASICDSDTDPRELEAFAERFKQRRIKLGVTQADVGSALANLKIPGVGSLSQSTICRFESLTLSHNNMIALKPILQAWLEEAEGAQREKMNKPELFNGGEKKRKRTSIAAPEKRSLEAYFAVQPRPSSEKIAAIAEKLDLKKNVVRVWFCNQRQKQKRMKFSATY

SEQ ID NO: 163130 - DNA, 3817 bp, Artificial Sequence
  derived and/or modified sequence
gcggggctagagctgtcggagaagcgggaccgcgaggccggcgcgcggcgctctgcgcggtcagagggagcgcctggcagcagcaggagcagcagcagcagcccgcggcggggccgccgccagccgccgcgaccgccgcggctgcagcctccgaagggaggccgggtgagccggcgtacgcactttcccgcggactttcggagtgtttgtggatatacatgccaagccgccacgatgatgtccatgaacagcaagcagcctcactttgccatgcatcccaccctccctgagcacaagtacccgtcgctgcactccagctccgaggccatccggcgggcctgcctgcccacgccgccgctgcagagcaacctcttcgccagcctggacgagacgctgctggcgcgggccgaggcgctggcggccgtggacatcgccgtgtcccagggcaagagccatcctttcaagccggacgccacgtaccacacgatgaacagcgtgccgtgcacgtccacttccacggtgcctctggcgcaccaccaccaccaccaccaccaccaccaggcgctcgaacccggcgatctgctggaccacatctcctcgccgtcgctcgcgctcatggccggcgcgggcggcgcgggcgcggcggccggcggcggcggcgcccacgacggcccggggggcggtggcggcccgggcggcggcggcggcccgggcggcggccccgggggaggcggcggtggcggcccggggggcggcggcggcggcccgggcggcgggctcctgggcggctccgcgcaccctcacccgcatatgcacagcctgggccacctgtcgcaccccgcggcggcggccgccatgaacatgccgtccgggctgccgcaccccgggctggtggcggcggcggcgcaccacggcgcggcagcggcagcggcggcggcggcggccgggcaggtggcagcggcatcggcggcggcggccgtggtgggcgcagcgggcctggcgtccatctgcgactcggacacggacccgcgcgagctcgaggcgttcgcggagcgcttcaagcagcggcgcatcaagctgggcgtgacgcaggccgacgtgggctcggcgctggccaacctcaagatcccgggcgtgggctcactcagccagagcaccatctgcaggttcgagtcgctcacgctctcgcacaacaacatgatcgcgctcaagcccatcctgcaggcgtggctcgaggaggccgagggcgcccagcgcgagaaaatgaacaagcctgagctcttcaacggcggcgagaagaagcgcaagcggacttccatcgccgcgcccgagaagcgctccctcgaggcctacttcgccgtgcagccccggccctcgtccgagaagatcgccgccatcgccgagaaactggacctcaaaaagaacgtggtgcgggtgtggttttgcaaccagagacagaagcagaagcggatgaaattctctgccacttactgagggggctgggaggtgtcgggcgggacagaatggggagctgaggaggcatttttggggggctttcctctgcttgcctcccctcggatttggagtgtccgttatcctgcctgcatttggggagtcccttctcgctctctttcctccacccattctctgattttcctgcctttgctgtcccctagccttgaggactggggtgctgggtgtggggattggagtatagggtaggggagaagggggggagcattcgggggagtggggagtggggggaaggaaagcggagacccgagcaggggttttaaggagcaggatggttctggggtttgggtggggggagacgcgggaagggtaggaaaatggactgtttctgaccagagacacttacctaaatatcctggggaccaaggaactatgtacaaaaacaaacctaccaaccaccaaaaactagacaaataaagacaaactaaaacaaaacagaacaaaagcaaaggaaaatgctttagaaattttaactccggggagccataatctgcaacttcattttcccccatagaagagaaaaaagagcaccaccattattaccacctccccaaccctacacgcacgaactgagtcgaaaaacgaaaaccaaacgagcgagaagttgaagttctgggtatcaaagctagttgttctgtctgcgtgtttaatttttccctctctcacctccaccccatccatatcctctttatttcctccgttccaatgagaggcctatggctgctctccaatcccgggaagtgagtgggagcacagctgaaaagagagggtcagggggaggctggctgcttgcttaggtggaatccaagttttcccgtggccctgcctatactctggtggcctggtcctgttggggtgggggtctttggagagaagggcatagtctttgagctactaaaaagcagaattccggagcttcgagatatcttattctaggaaaatgaaacaattttaacaacagttttttttcctcttatgtcgaagatctagttttagacaatttcaaaataagcttttcccactcatagaactttaacttgccctttcagttttatcttttttttagagagaggtttaaactactgatttttcctgttgattcaaatagactaatggggtgaaagttattaggagagatactctctcctgttttctccactgaacgagactcatcttgctcttctaggtcccgtttcttcctctcttggaggacatgaaattatagaaatgttgagaagttcctgctttcttttgcggtaggacttggctgtgagaaaatcacctaaatcccagaaaagaggaagacagatttaaagtgcccccacccccatttgtttcaaagaggtctgcatgttgggcgaaaacagaacaactgtgtttccttttacttgttcttattattcaagagtcatttattacaggggataaatgttgggtagcaagaactttaatttgcactaccagtctcccaaatagaaaatcatgtatagtatttcatagtaataatcaggtaccttacaagctgctggtggattttaaaaaattaagatagttgaaggtggttaggtaaaatgcctgctttgtgtacaagatactctttggatctctcgtagagatggtttgttaccatcctttaatcataactaaaacattgaaaacagaacaaatgagaaaagaaaaaaaacctgccgattaacaagactgaaatcatgcatgatctgaaaggtgtggaaagaaacacaattaggtctcactctggttaggcattatttatttaattatgttgtatatcattgtttgcagggcaaacattctatgcatttgaaactgagcactaaactgggctagctttctggtagaccgttttgtggctagtgcgatttcacagtctactgcctgtttccactgaaaacatttttgtcatattcttgtattcaaagaaaaaggaaaaaagattattgtaaatattttatttaatgcacacattcacacagtggtaacagactgccagtgttcatcctgaaatgtctcacggattgatctacctgtccatgtatgtctgctgagctttctccttggttatgttttttctcttttacctttctcctcccttacttctatcagaaccaattctatgcgccaaaatacaacagggggatgtgtcccagtacacttacaaataaaacataactgaaagaagagcagttttatgatttgggtgcgtttttgtgtttatactgggccaggtcctggtagaacctttcaacaaacaaccaaacaaaaa

SEQ ID NO: 163131 - DNA, 1260 bp, Artificial Sequence
  derived and/or modified sequence
atgatgtccatgaactctaaacaaccccactttgctatgcaccccaccctgcccgaacacaagtatcctagcctgcactcatcgtctgaggccatccggcgagcatgcctgccaactcccccccttcagtctaatttgtttgcttcacttgacgaaaccctgttggctagagcagaggcattagcggctgtggacattgcagtgtcccagggcaagtcacacccatttaagccggatgctacctatcacacaatgaatagtgtcccttgtacatctactagcactgtgcctctcgctcaccaccaccaccatcaccaccatcatcaagctcttgagcctggagacttgcttgatcacatttcttcgccgtccctggccctcatggcgggagccgggggggccggcgctgctgccggcggaggcggggctcacgatggacctggaggggggggcgggcctggtggaggcggggggccgggaggaggccccggcggcggcggcggtgggggacccggtgggggaggtggcggccccggtggaggtctcctgggtggctcagctcatccgcacccccatatgcatagtcttggtcacctttcccacccagcagcagccgctgccatgaacatgccgtcaggacttcctcacccaggcctcgtagccgctgctgcgcaccatggggctgccgctgctgcggcggctgctgcagccggacaggtggccgccgctagcgccgccgctgctgtcgtcggcgccgccggactggcctcgatctgcgattccgacacagatcccagggaactggaagcttttgccgagaggtttaaacagcggcggatcaaactgggcgtgacacaagcagacgttggctctgccctggccaaccttaaaatccctggcgttgggtctctgagccagagcaccatttgtcgattcgagagcctcaccctgtctcataacaatatgatcgcactgaagcctatcctgcaggcctggctagaggaggcggagggggcgcaaagggagaaaatgaataaacctgaactgttcaatggtggcgaaaagaagcgaaagcggacatctattgccgctcccgagaagaggtccctcgaggcgtacttcgccgtgcagcccaggccaagctcagagaaaattgccgccatcgctgaaaagctggacctgaaaaaaaatgtagtgcgcgtgtggttttgcaaccaaaggcagaaacaaaagagaatgaagttctctgctacctattag

SEQ ID NO: 163132 - DNA, 1260 bp, Artificial Sequence
  derived and/or modified sequence
atgatgtccatgaacagcaagcagccccactttgccatgcaccccaccctgcctgagcacaagtaccccagcctgcacagcagcagcgaggccatcagaagagcctgcctgcccaccccacccctgcagagcaacctgtttgccagcctggatgagaccctgctggcccgggcagaggccctggccgctgtggacattgctgtgtcccagggcaagagccaccccttcaagccagatgccacctaccacaccatgaacagcgtgccctgcaccagcaccagcacagtgcccctggcccaccaccaccaccaccaccaccaccaccaggccctggagcccggggacctgctggaccacatcagcagccccagcctggccctgatggccggggccggcggggccggggctgctgctgggggcggcggggcccatgatggccctgggggcggcggcggccctgggggcggcggcggccctgggggcggccctgggggcggcggcggcggcggccctgggggcggcggcggcggccctgggggcggcctgctgggcggcagcgcccacccccacccccacatgcacagcctgggccacctgagccaccctgctgctgctgctgccatgaacatgcccagcggcctgccccaccctggcctggtggccgctgctgcccaccacggggctgctgctgctgctgctgctgctgctgctggccaggtggccgccgccagcgctgctgctgctgtggtgggcgctgctggcctggccagcatctgtgacagcgacacagacccccgggagctggaggcctttgctgagcgcttcaagcagaggcgcatcaagctgggcgtgacccaggctgatgtgggcagcgccctggccaacctgaagatccctggggtgggcagcctgagccagagcaccatctgccgctttgagagcctgaccctgagccacaacaacatgattgccctgaagcccatcctgcaggcctggctggaggaggccgagggcgcccagcgggagaagatgaacaagccagagctgttcaatggaggagagaagaagaggaagaggaccagcattgctgcccctgagaagaggagcctggaggcctactttgctgtgcagccccggcccagcagcgagaagattgctgccatcgccgagaagctggacctgaagaagaatgtggtgcgggtgtggttctgcaaccagaggcagaagcagaagaggatgaagttcagcgccacctactag

SEQ ID NO: 163133 - DNA, 1260 bp, Artificial Sequence
  derived and/or modified sequence
atgatgagcatgaacagcaagcagccccacttcgccatgcaccccacacttccagagcacaagtatccgagcctccatagtagcagtgaagcaatccggcgggcttgcctcccaaccccaccgcttcagtccaacttattcgcttcacttgacgagacactgctggcccgcgccgaagcgctagctgcagttgatatcgctgttagccagggtaagagtcacccctttaaacctgatgccacctaccacaccatgaattccgttccatgcacgtctacttcaacagtcccattggctcaccatcaccaccatcaccatcaccaccaggctctcgagcctggagatctgctggatcatatcagctcaccatccctcgcccttatggctggtgcagggggcgcaggggccgccgccggtgggggtggggctcatgacggaccaggaggcggcggcgggccaggcggaggaggcggcccaggtggtggccctggtggcgggggcggaggcggcccaggaggtggtggcggcggccccggaggcggactgctgggcggtagcgcccaccctcatccacacatgcactccctgggtcacctgtcccacccggccgccgccgctgctatgaatatgcctagcgggctcccacacccgggactggttgcagctgcagctcatcatggcgctgcggcagcagcagcggcagctgccgccggccaggtagctgctgccagcgcagcagctgcagtggtgggggctgccgggcttgcgagcatttgcgattctgacaccgatccgagggaactggaggcctttgctgaacgcttcaagcaaagacggataaaattgggggtaactcaagctgacgttggcagcgcgttagctaatcttaagatcccgggtgtgggaagtctatcccagagcactatatgtcggtttgagtccttaacattaagccacaacaacatgattgctttgaagcctattctgcaggcctggctggaagaagccgagggagcccagagagagaaaatgaataagcccgagctttttaatggcggtgagaaaaagaggaagagaacatcaatcgctgcccccgagaagcggagtctcgaggcctactttgccgtgcagcctcggccatctagtgagaagattgccgccatagctgaaaagttagatctgaaaaagaatgtcgtgcgagtgtggttttgtaaccagagacagaagcagaaacgcatgaagttcagtgcaacatattag

SEQ ID NO: 163134 - DNA, 3795 bp, Artificial Sequence
  derived and/or modified sequence
agcgggaccgcgaggccggcgcgcggcgctctgcgcggtcagagggagcgcctggcagcagcaggagcagcagcagcagcccgcggcggggccgccgccagccgccgcgaccgccgcggctgcagcctccgaagggaggccgggtgagccggcgtacgcactttcccgcggactttcggagtgtttgtggatatacatgccaagccgccacgatgatgtccatgaacagcaagcagcctcactttgccatgcatcccaccctccctgagcacaagtacccgtcgctgcactccagctccgaggccatccggcgggcctgcctgcccacgccgccgctgcagagcaacctcttcgccagcctggacgagacgctgctggcgcgggccgaggcgctggcggccgtggacatcgccgtgtcccagggcaagagccatcctttcaagccggacgccacgtaccacacgatgaacagcgtgccgtgcacgtccacttccacggtgcctctggcgcaccaccaccaccaccaccaccaccaccaggcgctcgaacccggcgatctgctggaccacatctcctcgccgtcgctcgcgctcatggccggcgcgggcggcgcgggcgcggcggccggcggcggcggcgcccacgacggcccggggggcggtggcggcccgggcggcggcggcggcccgggcggcggccccgggggaggcggcggtggcggcccggggggcggcggcggcggcccgggcggcgggctcctgggcggctccgcgcaccctcacccgcatatgcacagcctgggccacctgtcgcaccccgcggcggcggccgccatgaacatgccgtccgggctgccgcaccccgggctggtggcggcggcggcgcaccacggcgcggcagcggcagcggcggcggcggcggccgggcaggtggcagcggcatcggcggcggcggccgtggtgggcgcagcgggcctggcgtccatctgcgactcggacacggacccgcgcgagctcgaggcgttcgcggagcgcttcaagcagcggcgcatcaagctgggcgtgacgcaggccgacgtgggctcggcgctggccaacctcaagatcccgggcgtgggctcactcagccagagcaccatctgcaggttcgagtcgctcacgctctcgcacaacaacatgatcgcgctcaagcccatcctgcaggcgtggctcgaggaggccgagggcgcccagcgcgagaaaatgaacaagcctgagctcttcaacggcggcgagaagaagcgcaagcggacttccatcgccgcgcccgagaagcgctccctcgaggcctacttcgccgtgcagccccggccctcgtccgagaagatcgccgccatcgccgagaaactggacctcaaaaagaacgtggtgcgggtgtggttttgcaaccagagacagaagcagaagcggatgaaattctctgccacttactgagggggctgggaggtgtcgggcgggacagaatggggagctgaggaggcatttttggggggctttcctctgcttgcctcccctcggatttggagtgtccgttatcctgcctgcatttggggagtcccttctcgctctctttcctccacccattctctgattttcctgcctttgctgtcccctagccttgaggactggggtgctgggtgtggggattggagtatagggtaggggagaagggggggagcattcgggggagtggggagtggggggaaggaaagcggagacccgagcaggggttttaaggagcaggatggttctggggtttgggtggggggagacgcgggaagggtaggaaaatggactgtttctgaccagagacacttacctaaatatcctggggaccaaggaactatgtacaaaaacaaacctaccaaccaccaaaaactagacaaataaagacaaactaaaacaaaacagaacaaaagcaaaggaaaatgctttagaaattttaactccggggagccataatctgcaacttcattttcccccatagaagagaaaaaagagcaccaccattattaccacctccccaaccctacacgcacgaactgagtcgaaaaacgaaaaccaaacgagcgagaagttgaagttctgggtatcaaagctagttgttctgtctgcgtgtttaatttttccctctctcacctccaccccatccatatcctctttatttcctccgttccaatgagaggcctatggctgctctccaatcccgggaagtgagtgggagcacagctgaaaagagagggtcagggggaggctggctgcttgcttaggtggaatccaagttttcccgtggccctgcctatactctggtggcctggtcctgttggggtgggggtctttggagagaagggcatagtctttgagctactaaaaagcagaattccggagcttcgagatatcttattctaggaaaatgaaacaattttaacaacagttttttttcctcttatgtcgaagatctagttttagacaatttcaaaataagcttttcccactcatagaactttaacttgccctttcagttttatcttttttttagagagaggtttaaactactgatttttcctgttgattcaaatagactaatggggtgaaagttattaggagagatactctctcctgttttctccactgaacgagactcatcttgctcttctaggtcccgtttcttcctctcttggaggacatgaaattatagaaatgttgagaagttcctgctttcttttgcggtaggacttggctgtgagaaaatcacctaaatcccagaaaagaggaagacagatttaaagtgcccccacccccatttgtttcaaagaggtctgcatgttgggcgaaaacagaacaactgtgtttccttttacttgttcttattattcaagagtcatttattacaggggataaatgttgggtagcaagaactttaatttgcactaccagtctcccaaatagaaaatcatgtatagtatttcatagtaataatcaggtaccttacaagctgctggtggattttaaaaaattaagatagttgaaggtggttaggtaaaatgcctgctttgtgtacaagatactctttggatctctcgtagagatggtttgttaccatcctttaatcataactaaaacattgaaaacagaacaaatgagaaaagaaaaaaaacctgccgattaacaagactgaaatcatgcatgatctgaaaggtgtggaaagaaacacaattaggtctcactctggttaggcattatttatttaattatgttgtatatcattgtttgcagggcaaacattctatgcatttgaaactgagcactaaactgggctagctttctggtagaccgttttgtggctagtgcgatttcacagtctactgcctgtttccactgaaaacatttttgtcatattcttgtattcaaagaaaaaggaaaaaagattattgtaaatattttatttaatgcacacattcacacagtggtaacagactgccagtgttcatcctgaaatgtctcacggattgatctacctgtccatgtatgtctgctgagctttctccttggttatgttttttctcttttacctttctcctcccttacttctatcagaaccaattctatgcgccaaaatacaacagggggatgtgtcccagtacacttacaaataaaacataactgaaagaagagcagttttatgatttgggtgcgtttttgtgtttatactgggccaggtcctggtagaacctttcaacaaacaaccaaacaaaaa

SEQ ID NO: 163135 - DNA, 1260 bp, Artificial Sequence
  derived and/or modified sequence
atgatgagtatgaattctaagcagcctcatttcgcaatgcaccccacgctgccagagcacaaataccctagcttgcactcctcctctgaagctatacgaagagcgtgcctcccgactcccccacttcagtctaacctgtttgcctccttggacgaaacgctgctggcacgggctgaagccctggcagcggtggatatcgccgtcagccaggggaaatcgcatccgttcaaacccgatgctacgtatcacactatgaatagcgtcccgtgcacaagtacttccactgtgccccttgcgcaccaccaccatcaccaccatcaccatcaggctcttgaacctggagacctgctagaccatatttcttcgccaagtctggccctgatggctggcgctggcggtgccggagcagccgcaggagggggaggcgctcatgacggcccaggcggtggcggaggaccaggtggagggggaggaccgggtggcggtcctggcggtgggggaggagggggtcccggtgggggaggcggagggccagggggaggcctgcttggcggttcggcacacccccatccccacatgcatagtcttggacacttgtcccaccctgctgctgctgccgctatgaacatgccgtccggcttgccccatccaggtcttgtcgctgcagcggcacaccacggggcagcagcggcagcagccgctgccgctgctggacaagtggctgcggctagtgctgccgctgcagtggtgggtgctgccggactggcttcgatctgtgatagtgatacggacccaagagaattggaagcctttgcagagcggttcaagcagagaagaatcaaactgggcgtgacacaggctgatgtgggctcggctctggctaaccttaagatccccggtgttgggagtctgtcccagtcgaccatttgtcgcttcgaatccctgactctcagtcataacaatatgattgccctgaaacctattctgcaggcgtggctggaggaagcagaaggggctcaaagggagaaaatgaataaaccagaattatttaatggcggtgagaagaaaagaaagcgcacatccatcgccgcacctgagaagcgcagcttggaggcgtacttcgccgtgcagcctaggccgagcagtgagaagatcgctgcaattgcggaaaagctggatctgaagaaaaacgttgtgagggtgtggttttgcaaccagcgtcagaagcagaagcgcatgaaattcagcgctacatactag

SEQ ID NO: 163136 - DNA, 1260 bp, Artificial Sequence
  derived and/or modified sequence
atgatgagcatgaacagcaagcagccccacttcgccatgcaccccaccctgcccgagcacaagtaccccagcctgcacagcagcagcgaggccatcagaagagcctgcctgcccaccccccccctgcagagcaacctgttcgccagcctggacgagaccctgctggccagagccgaggccctggccgccgtggacatcgccgtgagccagggcaagagccaccccttcaagcccgacgccacctaccacaccatgaacagcgtgccctgcaccagcaccagcaccgtgcccctggcccaccaccaccaccaccaccaccaccaccaggccctggagcccggcgacctgctggaccacatcagcagccccagcctggccctgatggccggcgccggcggcgccggcgccgccgccggcggcggcggcgcccacgacggccccggcggcggcggcggccccggcggcggcggcggccccggcggcggccccggcggcggcggcggcggcggccccggcggcggcggcggcggccccggcggcggcctgctgggcggcagcgcccacccccacccccacatgcacagcctgggccacctgagccaccccgccgccgccgccgccatgaacatgcccagcggcctgccccaccccggcctggtggccgccgccgcccaccacggcgccgccgccgccgccgccgccgccgccgccggccaggtggccgccgccagcgccgccgccgccgtggtgggcgccgccggcctggccagcatctgcgacagcgacaccgaccccagagagctggaggccttcgccgagagattcaagcagagaagaatcaagctgggcgtgacccaggccgacgtgggcagcgccctggccaacctgaagatccccggcgtgggcagcctgagccagagcaccatctgcagattcgagagcctgaccctgagccacaacaacatgatcgccctgaagcccatcctgcaggcctggctggaggaggccgagggcgcccagagagagaagatgaacaagcccgagctgttcaacggcggcgagaagaagagaaagagaaccagcatcgccgcccccgagaagagaagcctggaggcctacttcgccgtgcagcccagacccagcagcgagaagatcgccgccatcgccgagaagctggacctgaagaagaacgtggtgagagtgtggttctgcaaccagagacagaagcagaagagaatgaagttcagcgccacctactag

SEQ ID NO: 163137 - protein, 205 aa, Artificial Sequence
  derived and/or modified sequence
MAASTASHRPIKGILKNKTSTTSSMVASAEQPRGNVDEELSKKSQKWDEMNILATYHPADKDYGLMKIDEPSTPYHSMMGDDEDACSDTEATEAMAPDILARKLAAAEGLEPKYRIQEQESSGEEDSDLSPEEREKKRQFEMKRKLHYNEGLNIKLARQLISKDLHDDDEDEEMLETADGESMNTEESNQGSTPSDQQQNKLRSS

SEQ ID NO: 163138 - DNA, 618 bp, Artificial Sequence
  derived and/or modified sequence
atggcagcgagtacagctagtcacagacctatcaaaggcatcctcaagaacaaaacctcaaccactagcagtatggtggcctctgcagaacagcccagggggaatgttgacgaagaactgtcaaaaaaaagccagaagtgggatgaaatgaatattctggctacctaccatccggcggacaaggactacgggctaatgaaaatagatgaaccctccaccccataccatagcatgatgggggatgacgaggacgcctgtagtgacacggaggctaccgaggctatggctccagatatcctagcacgaaagctcgccgccgctgagggactggaacccaaatatagaatccaggagcaggagtctagtggagaagaggattctgaccttagtccagaggagagagaaaagaagagacagtttgaaatgaaacgtaagctgcattacaacgaaggtcttaacataaaactggcaagacagctgatttccaaagacctccatgacgacgacgaggacgaggagatgctcgagactgctgacggggaatccatgaacacggaagaatcaaatcagggatcgactccaagcgaccagcagcaaaataaattgaggtcctcttag

SEQ ID NO: 163139 - DNA, 618 bp, Artificial Sequence
  derived and/or modified sequence
atggccgccagcacagccagccaccggcccatcaagggcatcctgaagaacaagaccagcaccaccagctccatggtggccagcgctgagcagcccagaggaaatgtggatgaggagctgagcaagaagagccagaagtgggatgagatgaacatcctggccacctaccaccctgctgacaaggactatggcctgatgaagattgatgagcccagcaccccctaccacagcatgatgggagatgatgaagatgcctgcagcgacacagaggccacagaggccatggccccagacatcctggccaggaagctggccgctgctgagggcctggagcccaagtaccgcatccaggagcaggagagcagcggggaggaggacagcgacctgagccctgaggagcgggagaagaagaggcagtttgagatgaagaggaagctgcactacaatgaaggcctgaacatcaagctggcccggcagctgatcagcaaggacctgcatgatgatgatgaagatgaggagatgctggagacagcagatggagagagcatgaacacagaggagagcaaccagggcagcacccccagcgaccagcagcagaacaagctgcggagcagctag

SEQ ID NO: 163140 - DNA, 618 bp, Artificial Sequence
  derived and/or modified sequence
atggccgccagcaccgccagccaccggcccatcaagggcatcctgaagaacaaaaccagtacaacctctagcatggtcgcaagcgccgaacagccgagggggaatgttgacgaggagttgtcaaaaaaatcacaaaagtgggatgagatgaacattttggcgacgtatcatcctgctgacaaagattacggtctcatgaagatagatgagccatcgactccttatcacagtatgatgggagatgacgaggatgcctgcagtgacacagaggctacggaggccatggcaccggatatcctggcacggaaactcgctgctgctgaaggactggagcccaagtaccggatacaggaacaagaatcctccggtgaagaagacagcgatctatcccctgaggagagagaaaagaagcgacagttcgaaatgaaaaggaagctgcactataacgagggactgaatattaagcttgctcggcagctgataagcaaagacctacacgacgacgatgaagacgaagagatgctcgagaccgccgatggcgaaagcatgaatacagaagaaagcaaccagggctctacaccatcagatcagcagcaaaacaagctgcgaagttcctag

SEQ ID NO: 163141 - DNA, 618 bp, Artificial Sequence
  derived and/or modified sequence
atggccgcttccactgctagccaccggccaatcaaaggcattcttaagaacaagacatccacgacatcatctatggtcgctagcgccgaacagcctcggggtaacgttgatgaggaattaagcaaaaagagtcagaaatgggacgagatgaatattcttgccacctatcatcccgcagacaaggattacggacttatgaagatcgatgagccctccactccctatcattctatgatgggcgacgacgaagacgcctgcagcgatacagaggctaccgaggctatggcgcctgacatcctggcacgcaaattggcggctgcagaaggattggagcccaagtataggatccaggagcaggagtctagcggcgaggaggactctgacctcagccccgaggagagggagaaaaaacgccaatttgagatgaagcggaaattacactataacgagggcctcaacataaagctagcaagacagctgataagcaaagacctccacgacgatgatgaagacgaggagatgctcgagaccgctgacggagaatctatgaataccgaggagtcgaatcaggggagcaccccttctgatcagcaacagaataagttgaggagtagctag

SEQ ID NO: 163142 - DNA, 3452 bp, Artificial Sequence
  derived and/or modified sequence
gttctcgccccgccctctccccgcctcctccctagatatcgcgagagggcgggtccgcttggcttcggcgtcgcgtcgctcctgcgctggagctctaggccggcgtctctccgcgagccgcgggtcaagtggcagtggctaagggtgcgcgagtagccgccacccgttcggcgttggctctggcgtcggggtcgttgtgtcgtgacaaccgctgcggtagccgtttccgaggcagcagttgcggccgctttagccctgagcgggatctgcggctgcctgcgagtctctgctgtgccgacccttctcttcgcggaccccacgccaagcagcgaccctgagccgacagccggagcgcccggcaatggcggcctcgacggcctcgcaccggcccatcaaggggatcttgaagaacaagacctctacgacttcctctatggtggcgtcggccgaacagccccgcgggaatgtcgacgaggagctgagcaaaaaatcccagaagtgggatgaaatgaacatcttggcgacgtatcatccagcagacaaagactatggtttaatgaaaatagatgaaccaagcactccttaccatagtatgatgggggatgatgaagatgcctgtagtgacaccgaggccactgaagccatggcgccagacatcttagccaggaaattagctgcagctgaaggcttggagccaaagtatcggattcaggaacaagaaagcagtggagaggaggatagtgacctctcacctgaagaacgagaaaaaaagcgacaatttgaaatgaaaaggaagcttcactacaatgaaggactcaatatcaaactagccagacaattaatttcaaaagacctacatgatgatgatgaagatgaagaaatgttagagactgcagatggagaaagcatgaatacggaagaatcaaatcaaggatctactccaagtgaccaacagcaaaacaaattacgaagttcatagacgagatttgttcaacactgcaattgtttgttagatgtaaaccctgtgactatagtacgttgcttcttgttcttcacaattcatgacttaagtaccaaaatgcataccagttattatatattgccaagaattaaatgataaacttagagactgattagactgaaaatgcctaatcgatatatatattcttgtgcctagtactttaccacaaatacagtgtaatatcatcagtccaaaactgcattacttttgtaaaaacactggttaatttgtataagatattatagagctttttatgctttagaagttaaacaatatctttgggggggaactaatttattttcatcacttgaaatgtggtagctcttacaaagtttattgatttgatttttttaaaaatcaaaagccaattgaacaacaggatatatagactgataaatatttaggctgaatagtattttaacacttgtcttcaacttgatttgtctgtttaattgaaaagaattataagagttactgttgcattttctgacctactatttttaaaattcctgttgagtttctttgtgtttacaaggaaaggactgaactttttctcatcaaaactagcttttttccccacaaataaattatcaggttaaactttcaccaatgtctgctctgttttttgtttttggggggttttttgtttgtttttgttttttaatgtttttggtacactgggcagacttcagagcagttttttaaaaaaataaatattctaatgtagctatctcgccattccctttaaatacctgtcttaacctcctgcttttctttcctactcctttccacacatacgcacacaatcttctaccttttaaaggatcattaagactgtcaccacattaggagctctttctctcactcttctgtcatttgctgctatgttgaaattcttattttgaccatcaatgcctatgaattcttctaatacgtgaagaaaatagtttgagtagcagcagtgctataggtgggaaatacagtttagctgctgaatttctatacctctctgatttacagattgctaattaaatggctattattagtttggattaattagacttaagaaaacaactaactgagggttttttttgtttgttttttgagggttttctttgcatgagagttgtatgtaaccagtgatatgattattcctgaatgtacagacagaagtaagcctggacattgttaaatagtccctgctttaagggactacgataatgtgtactatgacaaacgtgctttattcttctaacgcagtaagaattaggtggaattttttccttcaaccaagtgcaggaaagccctgtgtgtcttggtttagttatggtttcatttctagccatacaattgatgaattgtgtacaacttttgttagtaccaaaataatctgttatatgaacagacttctaaaataacgtctgtatattttatatatagatacatatatgaaagaaggcttttattgaacagcttatcttccacttgcaggtttatggaaacagcagtatttgaaaataaataaaaagtgggagaattccttgctgttagaagaatgtggccattattttgattttttgaatgagatatataatcaaagtactgctgaactgtgagtgcagtattctaaacatttcagctaggaataccactgatttagaaacaaaactgtttgtctctggtttctgaatttaaaatgttgggattacctgtttaaatctgtcttgggggatgtagagattaagtctgtacatgtgcgtgcacatatattcatgcaccctctgattttggttttcttgtttctgagttcttagaaagtacccacatactcttttttttttttttgtagaagtagctgtcatagagtgaagaaaaggataagactttaaacagttgattctttttgtgttttctacaaactattttttgaaatttaaatcacaaactcattttctggtttttagaaagtagatgatgatttcagaggagtaaggcatgccaagcagcatgctcagtggggttttaggctgtcacatgcagctgagaaaaggtatgttcaagtcataagtaggtaattgatagggtatgaactagtcaaaatatgaaccattatgattcaagttagattttcctctggagagacagatctgaatgttcagttctagccaaggtagattttactttcaactttttaatcagtatcactttctgtgcttaactatttggtgttaccttgtctgttttcatttgtctaaaattctgcagagatgactaaaatttgacataatggtgtaaatggattgttaaggtaactttcagttgaagattaaagcaagatgccattttccccatgactttggttttgtttacatttttccctttcagttagtatacactacacgtactgtaataaaatacaataatatgacaa

SEQ ID NO: 163143 - DNA, 618 bp, Artificial Sequence
  derived and/or modified sequence
atggccgccagcaccgccagccacagacccatcaagggcatcctgaagaacaagaccagcaccaccagcagcatggtggccagcgccgagcagcccagaggcaacgtggacgaggagctgagcaagaagagccagaagtgggacgagatgaacatcctggccacctaccaccccgccgacaaggactacggcctgatgaagatcgacgagcccagcaccccctaccacagcatgatgggcgacgacgaggacgcctgcagcgacaccgaggccaccgaggccatggcccccgacatcctggccagaaagctggccgccgccgagggcctggagcccaagtacagaatccaggagcaggagagcagcggcgaggaggacagcgacctgagccccgaggagagagagaagaagagacagttcgagatgaagagaaagctgcactacaacgagggcctgaacatcaagctggccagacagctgatcagcaaggacctgcacgacgacgacgaggacgaggagatgctggagaccgccgacggcgagagcatgaacaccgaggagagcaaccagggcagcacccccagcgaccagcagcagaacaagctgagaagcagctag

SEQ ID NO: 163144 - protein, 486 aa, Artificial Sequence
  derived and/or modified sequence
MSSSSPPAGAASAAISASEKVDGFTRKSVRKAQRQKRSQGSSQFRSQGSQAELHPLPQLKDATSNEQQELFCQKLQQCCILFDFMDSVSDLKSKEIKRATLNELVEYVSTNRGVIVESAYSDIVKMISANIFRTLPPSDNPDFDPEEDEPTLEASWPHIQLVYEFFLRFLESPDFQPSIAKRYIDQKFVQQLLELFDSEDPRERDFLKTVLHRIYGKFLGLRAFIRKQINNIFLRFIYETEHFNGVAELLEILGSIINGFALPLKAEHKQFLMKVLIPMHTAKGLALFHAQLAYCVVQFLEKDTTLTEPVIRGLLKFWPKTCSQKEVMFLGEIEEILDVIEPTQFKKIEEPLFKQISKCVSSSHFQVAERALYFWNNEYILSLIEENIDKILPIMFASLYKISKEHWNPTIVALVYNVLKTLMEMNGKLFDDLTSSYKAERQREKKKELEREELWKKLEELKLKKALEKQNSAYNMHSILSNTSAE

SEQ ID NO: 163145 - DNA, 1461 bp, Artificial Sequence
  derived and/or modified sequence
atgtcttctagcagcccgcccgccggagcagcatccgcggccatttcagccagcgagaaagtggacggctttaccagaaaaagtgtgcgcaaggcgcagagacagaagcggtcccaaggatcctcgcagtttaggtctcagggaagtcaggcagaactgcatccgctcccacaactcaaagatgccaccagtaatgagcagcaagaactgttttgccaaaaactgcaacagtgttgcatattgttcgacttcatggactcagtgagcgatctgaagagtaaggaaatcaagcgggcaacactcaacgaactcgttgagtacgtttcaaccaatcggggagtcattgttgagtcggcgtacagcgacatcgtcaaaatgatttccgcgaacatcttcaggacactgcccccgagtgacaatcccgacttcgaccccgaggaagatgaaccaactctggaggctagctggccccacattcagctggtgtacgaattcttcttaagattcctcgagtcccccgatttccagccgagcatcgcaaaacgatacatagatcagaaatttgtgcagcagctgttggaattgtttgactccgaggacccccgcgaaagagacttcctgaaaaccgtgcttcacagaatctatggtaagtttctaggcctgagggccttcatcaggaaacagatcaacaacatctttctcaggtttatctatgaaaccgaacacttcaatggtgtggctgaactgcttgaaattttaggaagcattattaatggctttgcactgccactgaaagccgagcacaagcaattcttaatgaaggtgctgatccccatgcacacagccaaaggattagcactgtttcatgcacagttagcttattgtgtagtgcagttcttagaaaaagacaccaccttgactgaacctgtcatccggggcctgttaaaattctggcccaaaacctgctcccaaaaggaggtcatgttcctcggggagatcgaggaaatcttggatgtaatcgagccaacacaattcaagaagatagaggagcctttattcaaacaaatctccaagtgcgtgagtagttctcattttcaggtggcggagcgcgccctgtacttttggaataatgaatacattctaagcttgattgaagaaaacatcgataagattttaccaatcatgtttgcatccttgtacaagatatctaaggaacattggaaccccacaattgtcgcgcttgtctataatgtcctgaaaacgttaatggaaatgaacgggaagctctttgatgacctgacttcctcctacaaggcagaacgccaacgcgagaagaaaaaagagctggagcgggaagagctttggaaaaagctggaggaactgaagttgaaaaaggctctggaaaagcagaatagcgcctataatatgcactcgatcctgtcaaatactagcgcagaatag

SEQ ID NO: 163146 - DNA, 1461 bp, Artificial Sequence
  derived and/or modified sequence
atgtctagcagtagtcctccagctggcgccgcaagcgctgctatttccgcctcagaaaaagtggacggattcaccagaaaatctgtccggaaagcccaacggcagaaacggtcacagggctcgtcacagttccgctcccaaggatcacaagctgaactgcatccactcccacagcttaaggacgctacttctaacgaacagcaagagctcttctgtcaaaaactccagcagtgttgtatcctgtttgactttatggattcagtgtccgacctcaagagtaaggagatcaagcgcgctacactgaacgaactcgtggagtacgtgtctacaaatcgcggcgtcatcgtggaatccgcctatagtgatattgtgaaaatgatctccgctaatatcttccgcaccttaccgccgagtgacaacccagatttcgaccctgaggaggatgagcctacactggaagcatcctggccgcatattcaactcgtctacgagttctttcttcggtttttggagtcacctgattttcaaccatccattgcaaagagatacatagaccaaaaatttgtccagcagctgctcgagctgttcgatagtgaggacccacgtgagcgggatttcctgaagacggtgttgcacaggatctacggcaaatttcttggcttgcgtgccttcattcgcaagcagatcaacaatatttttctacgatttatctatgagacagaacattttaacggcgtcgctgaacttttggagattcttggctccatcatcaacggttttgcactcccacttaaggctgaacacaaacagtttctgatgaaagtactgatacctatgcatacagccaagggtctagccctgtttcatgctcaattagcctactgtgtggtccaatttcttgaaaaagacacgaccctcactgaaccggtaatccgtggccttctcaagttttggcccaaaacctgctctcagaaggaggttatgttccttggggagatcgaagagattctcgacgtgattgagcccacgcagttcaagaaaatcgaggagcccctgttcaaacagatctctaaatgcgtgtccagctcacattttcaggtagctgagagagccctgtatttttggaataacgagtatattctgagccttatcgaggaaaacattgataagatcctgccaattatgttcgcatctctctacaagatctctaaagaacattggaatcccactatcgtagcactcgtatacaatgtgctcaagaccctcatggagatgaatggaaagttattcgacgatctaacttcatcctataaggcagaacggcagcgggaaaagaaaaaggagttagagcgtgaagaactgtggaagaaacttgaggagctgaaattaaagaaagcgcttgagaaacagaactccgcctacaacatgcatagtattttgagcaatacttcggccgagtag

SEQ ID NO: 163147 - DNA, 1461 bp, Artificial Sequence
  derived and/or modified sequence
atgagcagcagcagccccccagctggggccgccagcgctgccatcagcgccagcgagaaggtggatggcttcaccaggaagtctgtgaggaaggcccagaggcagaagaggagccagggcagcagccagttccgcagccagggcagccaggccgagctgcaccccctgccccagctgaaggatgccaccagcaatgagcagcaggagctgttctgccagaagctgcagcagtgctgcatcctgtttgacttcatggattctgtgtctgacctgaagagcaaggagatcaagagggccaccctgaatgagctggtggagtatgtgtccaccaacagaggagtgattgtggagagcgcctacagcgacatcgtgaagatgatcagcgccaacatcttccgcaccctgccccccagcgacaacccagactttgatcctgaagaagatgagcccaccctggaggcctcctggccccacatccagctggtgtatgagttcttcctgcgcttcctggagagcccagacttccagcccagcatcgccaagcgctacatcgaccagaagtttgtgcagcagctgctggagctgtttgacagcgaggacccccgggagcgggacttcctgaagacagtgctgcaccgcatctacggcaagttcctgggcctgcgggccttcatcaggaagcagatcaacaacatcttcctgcgcttcatctatgaaacagagcacttcaacggggtggccgagctgctggagatcctgggcagcatcatcaatggatttgccctgcccctgaaggccgagcacaagcagttcctgatgaaggtgctgatccccatgcacacagccaagggcctggccctcttccacgcccagctggcctactgtgtggtgcagttcctggagaaggacaccaccctgacagagcctgtgatccggggcctgctgaagttctggcccaagacctgcagccagaaggaggtgatgttcctgggggagattgaggagatcctggatgtgattgagcccacccagttcaagaagattgaggagcccctcttcaagcagatcagcaaatgtgtgagcagcagccacttccaggtggccgagcgggccctgtacttctggaacaatgagtacatcctgagcctcatcgaggagaacatcgacaagatcctgcccatcatgtttgccagcctgtacaagatcagcaaggagcactggaaccccaccatcgtggccctggtgtacaacgtgctgaagaccctgatggagatgaatggcaagctgtttgatgacctgaccagcagctacaaggccgagcggcagcgggagaagaagaaggagctggagcgggaggagctgtggaagaagctggaggagctgaagctgaagaaggccctggagaagcagaacagcgcctacaacatgcacagcatcctgagcaacaccagcgctgagtag

SEQ ID NO: 163148 - DNA, 1461 bp, Artificial Sequence
  derived and/or modified sequence
atgagcagcagcagcccccccgccggcgccgccagcgccgccatctccgcctccgaaaaggtagacggatttaccaggaagagcgtgaggaaggcccaacgacagaagaggagtcaaggctcatctcagttccggtcccagggtagccaggctgaactgcatcctctgccccagctcaaagacgctacaagcaatgaacagcaggagttgttctgtcagaaactgcaacagtgttgtatcctgtttgattttatggactctgtatctgacttgaaatcaaaagagataaaacgggccaccctcaacgagctcgtggaatacgtgtccactaatagaggtgtcattgtggaaagtgcttacagcgatatcgttaagatgattagcgcgaatattttcagaaccctcccaccttctgacaaccctgactttgatccagaagaagacgagcccacactcgaggcttcttggcctcatattcagctagtctacgaatttttccttagatttttagagagtccagatttccagcccagtatagctaagagatatatcgatcaaaaattcgtgcagcagctgcttgagttgtttgattcagaggacccccgggagcgagatttcttgaaaacggtcctccaccggatttacggaaagtttctcggcctgcgggccttcatcaggaagcagatcaacaacatctttcttcgcttcatctacgaaacagagcatttcaatggagtcgccgaactcttagagattttgggcagcattatcaatggctttgcactgcccctcaaagccgaacataagcagtttctgatgaaggttcttatccctatgcacacagccaaaggattggctttatttcatgcgcaattagcatattgcgtggtccagttcctggaaaaggacactacactcacagaaccggtcatccgcggactgctaaaattctggccaaagacgtgctcccagaaggaggtgatgtttctcggagagattgaggagattttagacgtgatcgagcctacacaattcaagaagatcgaagaaccgctgttcaagcaaatttccaagtgcgtgagctcatcacatttccaggttgccgaacgggcactgtacttctggaacaacgaatacatactgtcattgattgaagagaatatagacaaaatccttccaataatgttcgccagtctctataagatttcaaaagaacattggaaccctacaatcgtagctttagtatacaacgtgctaaagacgttgatggaaatgaacgggaagctcttcgacgatttgacgagtagttacaaggctgagagacaaagagaaaaaaaaaaagagctcgaaagagaagaattatggaagaaactggaggagctaaagctgaaaaaggccctggagaagcagaacagtgcctacaatatgcactctattctcagtaataccagtgcggagtag

SEQ ID NO: 163149 - DNA, 1461 bp, Artificial Sequence
  derived and/or modified sequence
atgagcagcagcagcccccccgccggcgccgccagcgccgccatctccgcttccgagaaagtggacggattcactcgaaagagcgtccggaaggcccaaaggcagaagcggtcacagggatcaagccagtttagatcccagggcagccaggcagagctgcaccccttgccacagcttaaagacgcaacctccaatgagcagcaggagctattctgtcagaaactccaacagtgctgtattctttttgattttatggattccgtgtccgatctcaaaagtaaagaaatcaagcgcgccacgctgaacgaactggtggaatacgtgagtacaaatagaggcgtaattgtcgaatccgcttactccgacattgtgaagatgatcagtgccaacatctttaggaccctcccgccctctgacaatcctgatttcgacccagaagaggatgagcctaccctggaggcgagttggccacacattcagctggtgtacgaattcttcttaaggttccttgagagtcccgacttccagccttcaattgctaagcgatacattgaccagaagttcgtccagcagcttttggaattgttcgattccgaggatccaagagagcgtgacttcctcaagaccgttctgcataggatctatggcaaattcttgggactcagggcctttataaggaaacagattaataatatatttctgaggtttatctatgaaactgaacatttcaacggggtggcagaactgcttgaaatacttggttccataattaacggttttgccctgcctctgaaagccgaacataagcagttcctcatgaaggttctcattcctatgcacaccgctaaaggtctggccttatttcatgctcagttagcatattgcgtggtccagttcctagagaaagacacaaccctcacagagcccgtgatccgcggcttgctgaagttctggcccaagacctgtagccaaaaggaggtgatgtttctgggggagattgaggagatactagatgtgatcgaaccgacacaatttaagaagatcgaagaaccgctattcaaacagatttcaaagtgtgtctccagttcacacttccaggtcgcggagcgagctctctatttctggaataatgaatacatccttagcctgattgaggaaaatattgacaagattctgcccataatgttcgccagcctatataaaatctcaaaggaacattggaatcccacaatagtggccttggtctataatgtcctgaagacgctgatggagatgaacgggaaactttttgacgatcttacctcaagttacaaggccgaaagacaacgggagaaaaaaaaggagctcgaacgtgaggagctatggaaaaagctcgaggaactgaaactgaagaaggccctggaaaaacagaacagcgcctataacatgcactctattcttagcaacacttctgccgagtag

SEQ ID NO: 163150 - DNA, 1461 bp, Artificial Sequence
  derived and/or modified sequence
atgtcctctagcagtccccctgcaggcgcagcatctgcagcgatcagtgcctcggaaaaggtggacggctttactcgtaaaagtgtgaggaaggcccagcgccaaaagcgcagtcagggcagcagccagtttaggtctcaggggagccaggcagagctccaccctctcccccagctgaaagatgctacttccaatgaacagcaggaattgttctgccagaagttacagcagtgttgtattctatttgacttcatggactctgtgtctgacttaaagagcaaagaaattaagcgagcgaccttgaacgagcttgtcgagtacgtatctactaaccgaggggtgatcgtggaatctgcctactctgacatcgttaaaatgatctccgctaacatcttcagaactctgcccccttctgataatcctgattttgaccccgaagaggacgaacccacattggaggccagttggccacatatccagttagtatatgagttcttcctgcggttcctggagagccctgacttccaaccctctattgctaagcggtatattgatcagaaattcgtccagcagctactggagctgttcgattccgaggatccccgagagagggacttcctaaagacggttctccacagaatttatggcaaatttctgggcttgcgggcatttataagaaagcagattaataatatatttctgcggtttatctatgagaccgaacacttcaacggcgttgctgagttgctagaaattctcggctcgatcattaatggttttgctcttccgcttaaagccgaacacaagcagtttctgatgaaagtgctgatcccaatgcacaccgcgaagggcctcgccctctttcacgcccaactggcttactgtgtggtgcagttcctcgagaaagataccacgctaacagagccagttattagaggcttacttaagttctggcccaagacatgttctcagaaggaagtgatgtttttgggggagattgaagagattctggacgtgatcgagcccacccagttcaaaaagattgaggagcccctgttcaagcagatttcaaagtgtgtcagcagttctcactttcaggtcgccgagcgagccctttacttctggaataatgagtacattctaagtctgatagaggagaacatcgacaaaattctgcccatcatgtttgctagtttgtataagatcagtaaggagcactggaatccaacaattgtggctctggtttacaatgtccttaagacactgatggaaatgaatggaaaattgtttgacgatctgacatcctcatacaaggccgagcgccagcgagagaaaaagaaggagctagagagggaggagctgtggaagaaattagaggaattgaagttgaagaaggcacttgagaaacagaatagcgcctataacatgcattcaattctgtcgaacacaagcgcggagtag

SEQ ID NO: 163151 - DNA, 1461 bp, Artificial Sequence
  derived and/or modified sequence
atgtcttcaagcagcccgccagccggtgctgcaagtgccgctatttcggcgtccgaaaaagtcgatgggttcacgcgcaaatccgtgcgtaaggcccagcgtcagaagagatctcagggaagctcccagttccggtcccaaggttctcaggcagagctccatcccctgccgcagttgaaggacgcgacatccaatgagcagcaggaactattttgtcaaaaactgcaacagtgttgcattttatttgactttatggattccgtgagtgaccttaagtccaaggagattaaacgcgcaacgctgaacgagcttgtagagtacgtaagcacgaacaggggggtcatagtcgagagtgcctattcagacatagtaaaaatgatatctgccaacatttttaggacgctcccaccttctgataatcctgatttcgacccggaggaagacgagcctaccctggaggccagctggcctcacatccagttggtttacgaatttttcttaagattcttagagtctcccgatttccagccgtctattgcgaagagatacatcgatcaaaaattcgtgcaacagcttctggaactgttcgactcagaagaccccagagaaagggatttcctgaaaactgtgctgcacaggatctatggaaaatttctgggcctccgtgcttttatccggaaacagatcaacaatatcttcctgaggtttatctatgaaacagaacattttaatggagttgctgagctgctagagattctgggatcaattataaacgggtttgctctccccctaaaggctgaacacaagcagtttctcatgaaagttctgatccccatgcacaccgctaagggcctggctctgttccatgcacaactggcttactgcgtggtgcagttccttgagaaggatacgacgctgacggaacctgtgattcgcggtctcttgaagttctggcccaagacttgttctcagaaagaagtgatgttcctaggggagattgaagagattcttgacgtcatagaacctacacagtttaaaaagattgaagaacccctatttaagcagatatccaaatgcgtgtcttcgtcccactttcaggtggctgagcgggcactgtacttttggaacaacgagtatatactgagtctcattgaggagaacattgacaagattctgccaataatgtttgcatcgctgtataagatctcaaaagagcattggaaccctacaatcgtggctctggtatacaatgtgctgaaaaccctgatggaaatgaatgggaaattattcgatgacctgacaagttcctacaaagcagagcgacaacgggaaaagaagaaagagctcgagcgcgaagaattgtggaagaagctggaggagcttaaactgaagaaggccttagagaaacagaacagcgcatacaacatgcactccatcctcagcaatacatccgcggagtag

SEQ ID NO: 163152 - DNA, 3123 bp, Artificial Sequence
  derived and/or modified sequence
cgcagagggccggggctacggggcagcgccccgggcgatgaggggccggcgttgaccgggaagagcgggcaccgcggcagtggctccgaggggacccgcgatggcagcgccctgagaggaggctccaggcagggcgggctgcgctggcagcggccgctgaggtgctggccggccggctggctggcgacgggggcagaagcgacgagaggcgcgctcggcacccgcacccccgtgcccccgcctcagttgtctaaacttcgggctctcttccacccgctctgcgcgcccagagtcaacaacttcttcacccccctccgcccccgcccttccctccgtcagccccgggagctcgccgcgcgccggggaccaggaacctccagcgctgagatgtggccgtgaggcgttggcgggcggcgaggagaagctcggcggcgtcccggggccggagggccgtggggccggggcgcaggggcgcgagcaccccgcgcctctcccccgcctcctcctgccgtctccgccgctgcccgtgccttgcaagcagcagccggagctgccaagcgtcagggccgcggagatgtcgtcgtcgtcgccgccggcgggggctgccagcgccgccatctcggcctcggagaaagtggacggcttcacccggaaatcggtccgcaaggcgcagaggcagaagcgctcccagggctcgtcgcagtttcgcagccagggcagccaggcagagctgcacccgctgccccagctcaaagatgccacttcaaatgaacaacaagagcttttctgtcagaagttgcagcagtgttgtatactgtttgatttcatggactctgtttcagacttgaagagcaaagaaattaaaagagcaacactgaatgaactggttgagtatgtttcaactaatcgtggtgtaattgttgaatcagcgtattctgatatagtaaaaatgatcagtgctaacatcttccgtacacttcctccaagtgataatccagattttgatccagaagaggatgaacccacgcttgaggcctcttggcctcacatacagttggtatatgaattcttcttgagatttttggagagccctgatttccagcctagcattgcaaaacgatacattgatcagaaattcgtacaacagctcctggagctttttgatagtgaagatcccagagaacgtgacttcctgaagactgttctgcaccgaatttatgggaaatttcttggattaagagcattcatcagaaaacaaattaacaacattttcctcaggtttatatatgaaacagaacatttcaatggtgttgctgaacttcttgaaatattaggaagtattatcaatggctttgcattgccactgaaagcagaacataaacaatttctaatgaaggttcttattcctatgcatactgcaaaaggattagctttgtttcatgctcagctagcatattgtgttgtacagttcctggagaaagatacaacactaacagagccagtgatcagaggactgctgaaattttggccaaaaacctgcagtcagaaagaggtgatgtttttaggagaaattgaagaaatcttagatgtcattgaaccaacacagttcaaaaaaattgaagagccacttttcaagcagatatccaagtgtgtatccagttctcattttcaggttgcagaaagggcattgtacttctggaataacgaatatattcttagtttgattgaggagaacattgataaaattctgccaattatgtttgccagtttgtacaaaatttccaaagaacactggaatccgaccattgtagcactggtatacaatgtgctgaaaaccctaatggaaatgaatggcaagcttttcgatgaccttactagctcatacaaagctgaaagacagagagagaaaaagaaggaattggaacgtgaagaattatggaaaaaattagaggagctaaagctaaagaaagctctagaaaaacagaatagtgcttacaacatgcacagtattctcagcaatacaagtgccgaataaaaaaaaagcctcccacctctgccggataggcagagttttgtatgcttttttgaaatatgtaaaaattacaaaacaaacctcatcagtataatataattaaaaggccaattttttctggcaactgtaaatggaaaaatatatggactaaacgtagccctgtgctgtatcatggccatagtatattgtaacctttgtctaatcattggatttattgtgtcacttctgaagtttcacagaaatgaatgaattttatcatctatgatatgagtgagataattatgggagtggtaagaattatgacttgaattcttctttgattgtgttgcacatagatatggtagtctgctctgtatatttttcccttttataatgtgcttttcacactgctgcaaaccttagttacatcctaggaaaaaatacttcctaaaataaaactaaggtatcatccttacccttctctttgtctcacccagaaatatgatggggggaattacctgccctaacccctccctcaataaatacattactgtactctggaatttaggcaaaaccttaaatctccaggctttttaaagcacaaaatataaataaaagctgggaaagtaaaccaaaattcttcagattgttcctcatgaatatcccccttcctctgcaattctccagagtggtaacagatgggtagaggcagctcaggtgaattacccagcttgcctctcaattcattcctcctcttcctctcaaaggctgaaggcagggcctttccagtcctcacaacctgtccttcacctagtccctcctgacccagggatggaggctttgagtcccacagtgtggtgatacagagcactagttgtcactgcctggctttatttaaaggaactgcagtaggcttcctctgtagagctctgaaaaggttgactatatagaggtcttgtatgtttttacttggtcaagtatttctcacatcttttgttatcagagtaccattccaatctcttaacttgcagttgtgtggaaaactgttttgtaatgaaagatcttcattgggggattgagcagcatttaataaagtctatgtttgtattttg

SEQ ID NO: 163153 - DNA, 1850 bp, Artificial Sequence
  derived and/or modified sequence
gtagcggtcgctcgcctggggttctccgtgggcggccgacgggcccgtgcccccgcctcagttgtctaaacttcgggctctcttccacccgctctgcgcgcccagagtcaacaacttcttcacccccctccgcccccgcccttccctccgtcagccccgggagctcgccgcgcgccggggaccaggaacctccagcgctgagatgtggccgtgaggcgttggcgggcggcgaggagaagctcggcggcgtcccggggccggagggccgtggggccggggcgcaggggcgcgagcaccccgcgcctctcccccgcctcctcctgccgtctccgccgctgcccgtgccttgcaagcagcagccggagctgccaagcgtcagggccgcggagatgtcgtcgtcgtcgccgccggcgggggctgccagcgccgccatctcggcctcggagaaagtggacggcttcacccggaaatcggtccgcaaggcgcagaggcagaagcgctcccagggctcgtcgcagtttcgcagccagggcagccaggcagagctgcacccgctgccccagctcaaagatgccacttcaaatgaacaacaagagcttttctgtcagaagttgcagcagtgttgtatactgtttgatttcatggactctgtttcagacttgaagagcaaagaaattaaaagagcaacactgaatgaactggttgagtatgtttcaactaatcgtggtgtaattgttgaatcagcgtattctgatatagtaaaaatgatcagtgctaacatcttccgtacacttcctccaagtgataatccagattttgatccagaagaggatgaacccacgcttgaggcctcttggcctcacatacagttggtatatgaattcttcttgagatttttggagagccctgatttccagcctagcattgcaaaacgatacattgatcagaaattcgtacaacagctcctggagctttttgatagtgaagatcccagagaacgtgacttcctgaagactgttctgcaccgaatttatgggaaatttcttggattaagagcattcatcagaaaacaaattaacaacattttcctcaggtttatatatgaaacagaacatttcaatggtgttgctgaacttcttgaaatattaggaagtattatcaatggctttgcattgccactgaaagcagaacataaacaatttctaatgaaggttcttattcctatgcatactgcaaaaggattagctttgtttcatgctcagctagcatattgtgttgtacagttcctggagaaagatacaacactaacagagccagtgatcagaggactgctgaaattttggccaaaaacctgcagtcagaaagaggtgatgtttttaggagaaattgaagaaatcttagatgtcattgaaccaacacagttcaaaaaaattgaagagccacttttcaagcagatatccaagtgtgtatccagttctcattttcaggttgcagaaagggcattgtacttctggaataacgaatatattcttagtttgattgaggagaacattgataaaattctgccaattatgtttgccagtttgtacaaaatttccaaagaacactggaatccgaccattgtagcactggtatacaatgtgctgaaaaccctaatggaaatgaatggcaagcttttcgatgaccttactagctcatacaaagctgaaagacagagagagaaaaagaaggaattggaacgtgaagaattatggaaaaaattagaggagctaaagctaaagaaagctctagaaaaacagaatagtgcttacaacatgcacagtattctcagcaatacaagtgccgaataa

SEQ ID NO: 163154 - DNA, 1461 bp, Artificial Sequence
  derived and/or modified sequence
atgagcagcagcagcccccccgccggcgccgccagcgccgccatcagcgccagcgagaaggtggacggcttcaccagaaagagcgtgagaaaggcccagagacagaagagaagccagggcagcagccagttcagaagccagggcagccaggccgagctgcaccccctgccccagctgaaggacgccaccagcaacgagcagcaggagctgttctgccagaagctgcagcagtgctgcatcctgttcgacttcatggacagcgtgagcgacctgaagagcaaggagatcaagagagccaccctgaacgagctggtggagtacgtgagcaccaacagaggcgtgatcgtggagagcgcctacagcgacatcgtgaagatgatcagcgccaacatcttcagaaccctgccccccagcgacaaccccgacttcgaccccgaggaggacgagcccaccctggaggccagctggccccacatccagctggtgtacgagttcttcctgagattcctggagagccccgacttccagcccagcatcgccaagagatacatcgaccagaagttcgtgcagcagctgctggagctgttcgacagcgaggaccccagagagagagacttcctgaagaccgtgctgcacagaatctacggcaagttcctgggcctgagagccttcatcagaaagcagatcaacaacatcttcctgagattcatctacgagaccgagcacttcaacggcgtggccgagctgctggagatcctgggcagcatcatcaacggcttcgccctgcccctgaaggccgagcacaagcagttcctgatgaaggtgctgatccccatgcacaccgccaagggcctggccctgttccacgcccagctggcctactgcgtggtgcagttcctggagaaggacaccaccctgaccgagcccgtgatcagaggcctgctgaagttctggcccaagacctgcagccagaaggaggtgatgttcctgggcgagatcgaggagatcctggacgtgatcgagcccacccagttcaagaagatcgaggagcccctgttcaagcagatcagcaagtgcgtgagcagcagccacttccaggtggccgagagagccctgtacttctggaacaacgagtacatcctgagcctgatcgaggagaacatcgacaagatcctgcccatcatgttcgccagcctgtacaagatcagcaaggagcactggaaccccaccatcgtggccctggtgtacaacgtgctgaagaccctgatggagatgaacggcaagctgttcgacgacctgaccagcagctacaaggccgagagacagagagagaagaagaaggagctggagagagaggagctgtggaagaagctggaggagctgaagctgaagaaggccctggagaagcagaacagcgcctacaacatgcacagcatcctgagcaacaccagcgccgagtag

SEQ ID NO: 163155 - protein, 497 aa, Artificial Sequence
  derived and/or modified sequence
METKLPPASTPTSPSSPGLSPVPPPDKVDGFSRRSLRRARPRRSHSSSQFRYQSNQQELTPLPLLKDVPASELHELLSRKLAQCGVMFDFLDCVADLKGKEVKRAALNELVECVGSTRGVLIEPVYPDIIRMISVNIFRTLPPSENPEFDPEEDEPNLEPSWPHLQLVYEFFLRFLESPDFQPSVAKRYVDQKFVLMLLELFDSEDPREREYLKTILHRVYGKFLGLRAYIRKQCNHIFLRFIYEFEHFNGVAELLEILGSIINGFALPLKTEHKQFLVRVLIPLHSVKSLSVFHAQLAYCVVQFLEKDATLTEHVIRGLLKYWPKTCTQKEVMFLGEMEEILDVIEPSQFVKIQEPLFKQVARCVSSPHFQVAERALYFWNNEYILSLIEDNCHTVLPAVFGTLYQVSKEHWNQTIVSLIYNVLKTFMEMNGKLFDELTASYKLEKQQEQQKAQERQELWQGLEELRLRRLQGTQGAKEAPLQRLTPQVAASGGQS

SEQ ID NO: 163156 - protein, 368 aa, Artificial Sequence
  derived and/or modified sequence
SVQSHPAPPRPRENPRGSESLPCRLTAMETKLPPASTPTSPSSPGLSPVPPPDKVDGFSRRSLRRARPRRSHSSSQFRYQSNQQELTPLPLLKDVPASELHELLSRKLAQCGVMFDFLDCVADLKGKEVKRAALNELVECVGSTRGVLIEPVYPDIIRMISVNIFRTLPPSENPEFDPEEDEPNLEPSWPHLQLVYEFFLRFLESPDFQPSVAKRYVDQKFVLMLLELFDSEDPREREYLKTILHRVYGKFLGLRAYIRKQCNHIFLRFIYEFEHFNGVAELLEILGSIINGFALPLKTEHKPGSRPDPPALCQVAVCLPCPAGILCGAVPGEGCHSDRARDPGAAQILAKNLHPEGGDVSGGDGRDS

SEQ ID NO: 163157 - protein, 193 aa, Artificial Sequence
  derived and/or modified sequence
METKLPPASTPTSPSSPGLSPVPPPDKVDGFSRRSLRRARPRRSHSSSQFRYQSNQQELTPLPLLKDVPASELHELLSRKLAQCGVMFDFLDCVADLKGKEVKRAALNELVECVGSTRGVLIEPVYPDIIRMISVNIFRTLPPSENPEFDPEEDEPNLEPSWPHLQLVYEFFLRFLESPDFQPSVAKRYVDQK

SEQ ID NO: 163158 - DNA, 1494 bp, Artificial Sequence
  derived and/or modified sequence
atggagaccaagctccctccagcatctacccccacctcccccagctctcctgggctgagcccagtgcctcctccggataaggtggatggattcagccgtcggagtctgcgtcgcgctagaccccgaaggagccactcctcaagccagtttcgctatcagtccaatcaacaagaactgactccgttgcctcttctgaaggacgtgcccgcaagcgaacttcacgagctgctgtcacgcaaactggcacagtgcggcgtgatgttcgactttttagattgcgttgcagatctcaagggcaaagaagtgaagcgagccgctctgaatgaactggtggaatgcgttggcagtaccagaggagtacttattgagcccgtgtatcctgacattatccgaatgatctcagtgaacatatttcggaccttgccaccctccgagaacccagaattcgaccccgaagaggatgagccaaacctcgagcctagctggccgcatctccagctggtgtacgagttcttcctccgcttcctcgaatccccagacttccaaccttcagttgcaaaaaggtacgtggaccaaaagttcgtcctcatgctgctggagctgtttgactcggaggacccccgcgagagagaatacctaaaaacaatcctgcatagggtgtatggcaaatttctaggattgcgggcttatataagaaagcagtgtaatcacatttttttgaggttcatctatgaatttgaacactttaatggggtcgcggagctgctggaaatcttaggctccatcatcaacggatttgccctccctctgaagacggagcacaagcagtttctggtaagggtactgattcccctgcatagcgtgaaatcactaagcgtatttcacgcccaactcgcctactgcgtggtgcaattcttggaaaaagatgccacccttacggagcatgtgattcggggattattgaaatactggcccaagacctgcacacaaaaggaagtcatgttcctaggggaaatggaagaaatactcgacgtgattgagccatcacagttcgtaaagatacaggaaccgctgtttaaacaggtggcacgatgtgtctccagcccccacttccaggtagctgagagagccttatatttttggaataatgagtacatattgtccctgattgaagataattgccacaccgtactgcctgcagtttttgggaccctataccaagtttctaaagaacattggaatcagaccatcgtcagcctcatctataacgtccttaagacttttatggagatgaatgggaagctgtttgatgaactgaccgcttcatataaactcgagaaacagcaagagcagcagaaagcacaggagcggcaggaactttggcagggccttgaagaactgcgtctccgcagactccagggcacacagggagctaaagaggcgcctttgcaaagactgacaccgcaggtggcagcaagcggaggtcagtcctag

SEQ ID NO: 163159 - DNA, 1107 bp, Artificial Sequence
  derived and/or modified sequence
tctgtgcagtcccaccccgccccaccaaggccccgcgaaaacccgcgaggatctgagtcactcccatgtcggctgactgcgatggagactaagttgcctccggccagcaccccaacctcgcctagttcacccggcctctcacccgttccacctcccgataaggtggacggtttttctcgtaggtccttgcgcagggcaaggcccagacgatcacattcgagctcacaatttagataccaatccaaccaacaggagttgacgccactcccactgctcaaagatgttccagcgtcggaattgcatgagcttctgagccggaagctggcacagtgcggagtcatgttcgacttccttgactgtgtggccgaccttaaaggtaaggaggtcaaaagagccgccctcaatgaattggtggagtgcgttggctctaccagaggggtgctgatcgaacctgtttaccccgacattatccgcatgatcagcgttaatatctttcggaccctgccacctagcgagaatccagaatttgatcctgaggaggacgagcccaacttagaaccgagctggccccacctgcagctggtttatgaattctttctgaggttccttgagtctcctgacttccaacctagtgtggctaaacgttatgtcgatcagaagttcgttctgatgctgcttgagctgttcgacagcgaagaccccagggagagggaatacctgaaaaccattctgcaccgcgtatacggtaaatttctgggactacgtgcctacataagaaaacagtgcaatcatattttcttgcgatttatctatgagtttgagcactttaacggcgtggctgagctgctcgaaattctaggatcgattattaacggcttcgccttgccattaaaaactgaacacaagcctggcagtcgccccgatccgcccgctttgtgccaggtggccgtctgcctgccatgccccgccggaattctatgcggtgcagtcccgggggaaggctgtcattctgacagggccagggaccccggcgccgcccaaatcctggcaaaaaatctccaccctgagggtggcgacgtcagcggcggggacggtcgagatagctag

SEQ ID NO: 163160 - DNA, 582 bp, Artificial Sequence
  derived and/or modified sequence
atggagacgaagttgccgccggcctccactcccacaagcccttcttcccccggattatccccagttcctcctcccgataaggttgacggattcagtcgtcggtcacttcggcgcgcgcgcccacgacggagtcactcttcctcccaattcaggtatcaatctaatcagcaagagttaactcctttacccttgttgaaggatgttcctgctagcgaactgcacgagctgcttagtcggaagctcgcccagtgcggagtgatgttcgactttcttgactgtgtggctgacctgaaaggtaaagaagttaagagagctgcactgaatgaattggttgaatgtgtgggctctacaaggggcgtactgatcgaacctgtttaccccgacataatcaggatgatcagcgttaacatttttcgaaccttgccaccttcagagaatccagagtttgatcccgaagaggacgaacccaacctggaaccctcctggccacaccttcagcttgtgtacgaatttttccttagatttctggaatctccagattttcaaccctcagtggccaaaagatacgtggatcagaagtag

SEQ ID NO: 163161 - DNA, 1494 bp, Artificial Sequence
  derived and/or modified sequence
atggaaactaagctgccaccggccagcacgcctacttccccctcctcccccgggttgagcccagtccctcctcctgacaaggtcgatggattcagtcgcagaagtctgagacgcgctcgccccaggcgttcccactcttctagtcaatttagatatcagagtaatcagcaggaactcacccctctgcccctgcttaaggacgttcctgcttcggaacttcatgaactcctctctcggaaactggcccaatgcggtgtcatgttcgactttctcgattgcgtggctgacttaaagggaaaagaggtaaagcgcgcagctctgaatgaactggtagaatgcgtggggagcacgcgcggtgtcctcatcgaacccgtctatccagatataattcgcatgatcagcgtcaacatattccggacactgcctccatcggagaatcctgagttcgaccctgaagaagatgagcctaatttggaaccctcctggccccaccttcagctcgtgtatgagttctttctcagatttctggaatctccagacttccagccgtcagtggctaaacggtacgtcgaccagaaattcgttttgatgttgctggaattatttgattcagaggatcctagagagcgcgagtaccttaagacaattctgcatagggtttacgggaaattcctcggattgagggcttacattaggaagcagtgtaatcacatcttcttaagatttatctacgagtttgaacatttcaatggcgtggcagagctgctggagatcctgggctctatcatcaatggattcgccctccctttgaagacagaacacaaacagttcttggtgagagtgctgattcccctgcatagcgttaaaagtctcagcgtgtttcacgcacaactggcatattgtgttgtgcagttcctggaaaaggatgcaacattaaccgagcacgtaatccgagggcttctgaaatactggccaaaaacctgtacacagaaggaggttatgttcctgggagagatggaagaaattttggacgtgatcgaaccgtcacaatttgttaagattcaggagcccttgtttaaacaagtcgctagatgcgtgtcttcaccacattttcaggtggccgagagggctttgtatttctggaataatgagtacattctgtccctcatcgaagacaattgccatacggttctgccagcagtttttggtaccctatatcaggtgtcaaaagaacattggaatcaaactattgttagccttatctataacgttcttaaaacctttatggaaatgaacggcaaattatttgatgagcttaccgcatcatataagttggaaaaacagcaggagcaacaaaaggctcaggaacggcaggagctgtggcagggcttggaggaactcagactccgccggctgcagggaacccagggtgcgaaggaggcgccgttacagagactgaccccgcaggtcgcagcctccggcggacagtcctag

SEQ ID NO: 163162 - DNA, 1494 bp, Artificial Sequence
  derived and/or modified sequence
atggagaccaagctgcccccagccagcacccccaccagccccagcagccctggcctgagccctgtgcccccaccagacaaggtggatggcttcagcagaagaagcctgcggcgggcccggccccggcgcagccacagcagcagccagttccgctaccagagcaaccagcaggagctgacccccctgcccctgctgaaggatgtgcctgccagcgagctgcacgagctgctgagcaggaagctggcccagtgtggggtgatgtttgacttcctggactgtgtggccgacctgaagggcaaggaggtgaagagagctgccctgaatgagctggtggagtgtgtgggcagcacccggggcgtgctgattgagcctgtgtacccagacatcatccgcatgatctctgtgaacatcttccgcaccctgcccccatctgaaaatcctgagtttgatcctgaagaagatgagcccaacctggagcccagctggccccacctgcagctggtgtatgagttcttcctgcgcttcctggagagcccagacttccagcccagcgtggccaagagatatgtggaccagaagtttgtgctgatgctgctggagctgtttgacagcgaggacccccgggagcgggagtacctgaagaccatcctgcaccgggtgtatggcaagttcctgggcctgcgggcctacatcaggaagcagtgcaaccacatcttcctgcgcttcatctatgaatttgagcacttcaacggggtggccgagctgctggagatcctgggcagcatcatcaatggatttgccctgcccctgaagacagagcacaagcagttcctggtgcgggtgctgatccccctgcacagcgtgaagagcctgagcgtcttccacgcccagctggcctactgtgtggtgcagttcctggagaaggatgccaccctgacagaacatgtgatccggggcctgctgaagtactggcccaagacctgcacccagaaggaggtgatgttcctgggggagatggaggagatcctggatgtgattgagcccagccagtttgtgaagatccaggagcccctcttcaagcaggtggcccgctgtgtgagcagcccccacttccaggtggccgagcgggccctgtacttctggaacaatgagtacatcctgagcctgattgaggacaactgccacacagtgctgcctgctgtgtttggcaccctgtaccaggtgtccaaggagcactggaaccagaccatcgtgtccctcatctacaacgtgctgaagaccttcatggagatgaatggcaagctgtttgatgagctgacagccagctacaagctggagaagcagcaggagcagcagaaggcccaggagcggcaggagctgtggcagggcctggaggagctgcggctgcggcggctgcagggcacccagggcgccaaggaggcccccctgcagaggctgaccccccaggtggccgccagcggcggccagagctag

SEQ ID NO: 163163 - DNA, 1107 bp, Artificial Sequence
  derived and/or modified sequence
tctgtgcagagccacccagccccaccccggccccgggagaacccccggggcagcgagagcctgccctgccgcctgacagccatggagaccaagctgcccccagccagcacccccaccagccccagcagccctggcctgagccctgtgcccccaccagacaaggtggatggcttcagccgccgcagcctgcggcgggcccggcccaggaggagccacagcagcagccagttccgctaccagagcaaccagcaggagctgacccccctgcccctgctgaaggatgtgcctgccagcgagctgcacgagctgctgagcaggaagctggcccagtgtggggtgatgtttgacttcctggactgtgtggccgacctgaagggcaaggaggtgaagagagctgccctgaatgagctggtggagtgtgtgggcagcacccggggcgtgctgattgagcctgtgtacccagacatcatccgcatgatctctgtgaacatcttccgcaccctgcccccatctgagaaccctgagtttgatcctgaggaggatgagcccaacctggagcccagctggccccacctgcagctggtgtatgagttcttcctgcgcttcctggagagcccagacttccagcccagcgtggccaagcgctacgtggaccagaagtttgtgctgatgctgctggagctgtttgattctgaggacccccgggagcgggagtacctgaagaccatcctgcaccgggtgtatggcaagttcctgggcctgcgggcctacatcaggaagcagtgcaaccacatcttcctgcgcttcatctatgaatttgagcacttcaatggagtggccgagctgctggagatcctgggcagcatcatcaatggatttgccctgcccctgaagacagagcacaagccaggcagcaggccagaccccccagccctgtgccaggtggccgtgtgcctgccctgcccagctggcatcctgtgtggggctgtgcctggagagggctgccacagcgaccgggcccgggaccctggagctgcccagatcctggccaagaacctgcaccctgagggcggagatgtgtctggaggagatggccgggacagctag

SEQ ID NO: 163164 - DNA, 582 bp, Artificial Sequence
  derived and/or modified sequence
atggagaccaagctgcccccagccagcacccccaccagccccagcagccctggcctgagccctgtgcccccaccagacaaggtggatggcttcagcagaagaagcctgcggcgggcccggccccggcgcagccacagcagcagccagttccgctaccagagcaaccagcaggagctgacccccctgcccctgctgaaggatgtgcctgccagcgagctgcacgagctgctgagcaggaagctggcccagtgtggggtgatgtttgacttcctggactgtgtggccgacctgaagggcaaggaggtgaagagagctgccctgaatgagctggtggagtgtgtgggcagcacccggggcgtgctgattgagcctgtgtacccagacatcatccgcatgatctctgtgaacatcttccgcaccctgcccccatctgaaaatcctgagtttgatcctgaagaagatgagcccaacctggagcccagctggccccacctgcagctggtgtatgagttcttcctgcgcttcctggagagcccagacttccagcccagcgtggccaagagatatgtggaccagaagtag

SEQ ID NO: 163165 - DNA, 1494 bp, Artificial Sequence
  derived and/or modified sequence
atggagaccaagctgccccccgccagcacccccaccagccccagctcccctggactcagccctgtcccaccacccgacaaggttgatggcttctcacgtcgctcactgcggcgagctaggccgaggagatctcattccagctcgcagtttcgttatcagtcaaatcagcaggagctgacacccttgccattgctaaaggacgtgccagcatccgaactccacgaactactctcacgtaagctcgcacagtgcggcgttatgtttgactttctcgactgtgttgcagatctgaagggaaaggaggtaaagagggccgccctgaatgaactggtggaatgcgttggctccactagaggagttctgatcgaacctgtttacccagatatcattagaatgatctctgtgaatatcttcagaacactgcctccgtcggaaaatcccgaattcgaccctgaggaggacgaacccaacctggaacccagctggccacacctgcagctggtttatgagttcttcttgagattcctggagtcccccgatttccaacccagtgtcgctaagagatatgtggaccagaaattcgtccttatgcttttggaactgttcgactcagaggacccccgagaacgggagtacctgaagacaatactgcatcgggtttatggaaaattcctcggtctgcgcgcctacatcaggaaacagtgcaatcacatatttttgagattcatctacgagtttgagcacttcaatggggttgccgagttgctggaaattctcggtagcatcattaatggatttgccttgcctctcaaaacagagcacaagcagtttctagtccgggttctcatccccctccactctgtgaagtcgctatctgtgttccacgcgcaactcgcgtactgtgtggtgcagttcttggagaaagatgctaccctgaccgagcatgtcatcagagggctccttaagtattggcccaagacctgcacccagaaagaagtgatgttcttaggggaaatggaagaaatcctagatgttatcgagccatcacagtttgtcaaaatccaggagcctctgtttaagcaggtggctcgctgcgtgagcagccctcattttcaggtggccgagagagccctgtacttctggaataacgagtatattctgtcattgattgaggataactgccacaccgttctgccagccgtgtttggcaccctgtaccaggtgagcaaagagcactggaatcagaccatagtgtctctgatatacaacgtcctgaagacatttatggagatgaacgggaagctttttgacgaactcacggcctcttacaaactcgagaaacagcaggaacaacaaaaggcgcaggagcggcaggaactatggcaggggctggaagaactcagactaaggaggctgcagggaacacagggcgctaaggaggctccgctccaacgtctcaccccacaagtggccgcttccggcggacaaagttag

SEQ ID NO: 163166 - DNA, 1107 bp, Artificial Sequence
  derived and/or modified sequence
agcgtgcagagccaccccgcccccccccggccccgggagaacccccgcgggagcgagagcctaccctgccgtctgactgctatggagaccaaactgccgccagcaagcacccctacaagcccgtccagcccaggactctcaccagttcccccaccggataaagtggatggcttttcacgcaggtctctaagacgggcacgccctcgccggtcacacagcagctcccagttcagatatcaatccaatcaacaagaactaacacctctgcccctcttgaaagacgtgccggcctctgagctccacgaattactctcacgcaagctcgctcaatgtggcgtcatgttcgatttcctggattgcgtagctgacctgaaaggaaaagaggtcaagcgtgcagctctcaacgagcttgtggagtgtgtaggaagtactcgcggcgtgctaattgagcctgtttatccagatatcataaggatgatcagtgtgaacatcttcaggacactgccaccatccgaaaaccccgagtttgacccagaagaagatgaaccaaacctcgaaccttcctggccccacctgcaactggtatatgagttcttccttaggttcctggagtcacctgactttcagccaagcgtcgctaaacgctatgtagaccagaagttcgttctcatgcttctggaactgtttgactctgaggaccctagagagcgagagtacctgaagaccattctgcatagagtatatggcaaatttctcgggttgagggcatacatacgaaaacagtgcaaccacattttcctgaggtttatttacgagttcgaacactttaacggagtggccgagctcctcgagatcctcggctcaatcataaacggcttcgcactcccgctgaaaaccgaacataaaccaggcagcagacctgacccacctgccttgtgccaagtcgctgtctgcctgccctgtccggctggtatactgtgtggcgccgtgcccggtgaaggctgccacagtgatagagcccgggatcccggtgctgctcaaatacttgccaaaaatctgcaccccgaggggggagacgtgtcaggtggcgacggaagagactcgtag

SEQ ID NO: 163167 - DNA, 582 bp, Artificial Sequence
  derived and/or modified sequence
atggagaccaagctgccccccgccagcacccccaccagccccagctcgccaggattaagccccgtgccacccccagataaagtagatggcttttctcggcggagcctccgtcgagcccggccacgtcgctcccatagttcaagtcagttcaggtaccagtcaaatcagcaggagctcactcctctccctcttctgaaagatgtcccagccagtgagctgcatgagctgttatccaggaagcttgcccagtgcggcgtgatgttcgatttcctggactgtgtcgccgatctgaaaggaaaagaggtgaagcgagccgctctcaatgagctggtggaatgcgtaggctcaacaagaggtgtcctcattgagcctgtgtatccagatattatacggatgatctccgtcaacatttttaggaccctgccgcccagcgagaaccctgaattcgatccagaggaagacgagcctaacttggaaccatcctggccacatctccagctcgtctatgagttttttttgagatttctggaatccccggactttcagccgtccgtcgcgaagcggtacgtggatcagaagtag

SEQ ID NO: 163168 - DNA, 1494 bp, Artificial Sequence
  derived and/or modified sequence
atggagaccaagctgccccccgccagcacccccaccagccccagctcacctggcctgtccccggtgcctccgcccgacaaagtggacggcttctctcggcgcagcctgcgtcgagcccggccacggcggtctcactctagtagtcagtttcgataccagtccaatcagcaggagctaacccctttgcctctgttaaaagacgtgcccgcttccgaactgcacgagctactgagccggaagctcgcccagtgtggcgttatgttcgacttcctcgattgcgtcgctgatttgaaagggaaggaagtaaaaagagcagctctgaatgaattggtcgaatgcgtcggcagcactaggggcgtgctgattgagccagtgtaccccgacataattaggatgataagcgtaaatatcttccgaaccctgcccccttcagagaacccagaattcgaccccgaggaagatgaaccaaatctagagccaagttggccccacctgcagctcgtgtatgaatttttcctgaggttcttagaatcccctgactttcagcctagcgtggccaagcggtatgttgaccaaaagttcgtcttaatgttactggagctctttgattctgaagatccgagagagcgggaatatctgaagaccatactgcatcgggtgtacggaaagttccttggcctgcgcgcttacatccgcaaacagtgcaaccacatctttcttcgctttatatacgaattcgaacatttcaatggggttgccgaactcctcgaaatattaggctctataataaacggattcgcattgccactgaagaccgagcataagcaatttctcgttagggtgttgattccactgcattctgtgaaatctctgtccgtctttcatgcacagcttgcttactgcgtggtccagttcctggagaaggatgccactctaacagagcatgtgatcagggggctgctgaagtattggccaaagacctgtactcagaaggaggtcatgtttctaggagagatggaagaaatactggacgtgatagaaccctcacagtttgtaaaaattcaagagccactctttaaacaggtggctcgctgcgtctcatccccccactttcaggtcgcagagcgcgccctttatttttggaacaatgagtatatactaagcctcatcgaggacaattgccacacggtgctgcctgccgtctttggaacattgtatcaagtgtcaaaagaacattggaatcagacaattgtatcattgatctataacgttctgaagaccttcatggagatgaacggaaagctctttgacgagttgactgcctcatacaaactggaaaagcaacaggaacaacaaaaggcccaagagagacaagagctgtggcagggtctggaagagttacgactgagacgcttacagggtacgcagggcgctaaagaggctccactgcagaggttgacgccgcaggtcgccgccagtggaggccaatcttag

SEQ ID NO: 163169 - DNA, 1494 bp, Artificial Sequence
  derived and/or modified sequence
atggaaacaaagctccccccagccagcactcctacgtctccatctagccccggtctatcaccagtgccgccaccagacaaagttgatggctttagtcgtcgctcgctacggagggctaggccgcgtcgaagccatagcagtagccaattcagataccagtctaatcaacaggaactaacacccctgccactcctcaaagacgtccccgcatctgaattacacgaactgctttctcgcaagctggcccagtgcggggtgatgttcgactttttggactgcgtggcagatcttaaaggaaaagaggtaaaaagggccgcactgaacgaactggtggagtgtgtgggctcaacaagaggcgtgctcattgaaccggtctacccggatataatccgcatgatttctgtcaatatttttcgtaccctgccgccatccgagaaccccgagttcgatccagaggaagacgaaccgaatctggagccaagttggcctcacctgcaactggtgtacgaattcttcctccgatttctggaatcccctgactttcagccatcagtcgccaaacggtacgttgaccagaagttcgtcctgatgctgttggaactgttcgactccgaagatcctcgcgagcgcgagtatctgaagacaatcctccaccgtgtgtatgggaagttcctcggcctgagagcctacatcagaaagcagtgtaaccatatctttctccgctttatctacgaattcgagcacttcaatggcgtagccgagcttttggaaatactgggaagtatcattaacgggttcgcactgccactgaagacagaacacaagcagtttctggtgcgcgttttgattcccctccactctgtgaaatccttatccgtttttcacgctcagctggcctattgcgtggtgcaattcttggagaaagatgcaaccctgaccgagcatgtaatcagaggcttgttgaagtattggcccaaaacttgcacgcagaaagaagtgatgtttctgggcgagatggaggaaatcctggatgtcatcgagcctagccaattcgtgaaaatccaggaaccattattcaagcaggttgcgcgatgtgtctctagtccccactttcaggtcgcggagcgggcactgtatttctggaacaacgagtacatcctgagcctcattgaggataattgtcatactgtactgcctgcagttttcgggacgctgtaccaggtcagtaaggaacattggaatcaaactattgtttctctcatatacaacgtactgaagactttcatggagatgaacggcaaactattcgacgaattgactgcctcatacaagttagaaaagcagcaggaacagcagaaagcccaagagaggcaggaactgtggcagggtctcgaggaactgagacttaggcgattgcaagggacccagggggcaaaggaggctccgttacaacgcttgacaccccaggtggcagctagtggcggacagtcctag

SEQ ID NO: 163170 - DNA, 1107 bp, Artificial Sequence
  derived and/or modified sequence
tcagttcaatctcaccctgccccacctaggccgagagagaatcctagagggagcgagtccttgccgtgtcgccttaccgctatggagactaagcttccgcctgcatctactcccacctcaccatcctcccccggtttaagccctgtgccaccccctgataaggtggatggtttctcccgtcgctcacttcggcgagctagacctcgcagatctcatagcagcagtcagtttcggtatcagtctaaccagcaggaactgacccccttacccctgctgaaggacgtcccagcatcggagcttcatgaactgctgagtcggaagcttgcccaatgcggtgtgatgtttgattttctggactgcgtggcagacctcaagggaaaggaagtcaaacgtgcagctcttaacgagctggttgagtgtgtggggagcaccagaggggtgctgatagaaccggtctacccagatattataaggatgatttccgttaacatcttccggacccttcccccatccgagaatcctgaattcgatccagaggaggatgagcctaacctggagccgtcctggccacatcttcagctcgtgtacgagttcttcctccgatttctggaatcacctgatttccaacctagcgtcgccaagcggtacgtggaccagaagtttgtgctgatgttgctggagctattcgatagcgaggatcccagagagagagagtatttaaaaaccatcttacaccgcgtgtatggtaagttcttggggctgagggcatacatacggaagcagtgtaaccatattttccttaggtttatttatgagttcgagcatttcaatggcgtggccgaattgctcgaaatactgggttccatcattaacggcttcgccctgcctcttaaaacagagcacaaacccggttcaagaccagatccaccggcactctgccaagtcgctgtctgcctgccatgccctgctggcattctctgtggcgcagtgcccggagaaggttgtcatagtgatagagcccgagatccgggagccgcacagatcctcgccaagaacctgcatcccgaaggtggcgatgtgagcgggggtgatggccgtgactcctag

SEQ ID NO: 163171 - DNA, 582 bp, Artificial Sequence
  derived and/or modified sequence
atggaaactaagctgcctcccgcatctacacccacctcgccttcatcccctggactgtctccagtgcctcctcctgacaaggtggatgggttttctaggcggagtttaagaagggcacgtcctcggagatcccactcttcctctcagttcaggtaccaatcaaaccaacaagagctcacaccgcttcctctcctcaaggacgtgcctgcctctgaactgcacgagcttctgtcacgaaagttggctcagtgcggcgttatgttcgactttctcgactgcgttgcagatttgaaagggaaggaggtgaagcgcgcagctctgaacgagctcgtggagtgcgtgggatctacacgtggtgtgttgatcgagcccgtctatcctgacataatacggatgattagcgtcaacatcttccggacattacccccttccgaaaacccagagtttgaccctgaggaggacgagccaaacctcgagccatcgtggccccatcttcagttggtgtacgagttctttctgcgcttcttagagtcacctgatttccagccttccgtagctaaacggtatgtagaccagaagtag

SEQ ID NO: 163172 - DNA, 1494 bp, Artificial Sequence
  derived and/or modified sequence
atggagaccaagctcccgccagcctcaactcccacatctccttcaagccccggtctgtccccagttcctcccccagataaggtggacggcttttccagaaggtccctcaggagagcccgaccccgtaggtcccactcgagtagccagttccggtatcagagcaatcaacaggagttgacccccctgccactgctcaaggacgttccagcctccgagctgcacgagctgctgtctcgtaagttggcacagtgcggggtcatgttcgacttcctggattgtgtggctgacctgaaagggaaagaagtgaagcgcgctgccctgaacgaacttgtggagtgtgtcgggtcaacccgcggagtgctgattgagcccgtctacccggacatcattaggatgataagcgttaatatctttcgcacactgccccctagtgaaaatcctgaattcgatccagaggaggatgaacctaacttggaaccatcatggccccatttgcaactggtctacgagttcttcttgaggtttctggagagccctgatttccagcccagcgttgccaagcgatatgtggaccagaagtttgtgttaatgctgctggaattgttcgactccgaagaccccagggagcgcgaataccttaaaaccattctgcatcgcgtttacggtaagttcttgggccttagagcctatatccgcaaacagtgtaatcatatcttccttcgcttcatttatgagttcgagcacttcaatggtgtagctgaactgcttgaaattctcggctcaataatcaacggatttgccctccccctgaagaccgaacataagcagttcctggtgagggtgttgataccactgcatagcgtaaagtccctgtctgtgttccatgcccaactggcctattgtgtggtgcagttccttgagaaggatgctactcttactgagcatgtgatacggggactgttgaagtattggcctaagacctgtacgcagaaagaagtgatgtttctgggtgagatggaggaaatcctggacgtaatcgagccatcacagttcgtgaagatccaggagccactttttaaacaggtcgcacggtgtgtgtcgtccccccatttccaggtggccgaaagggctctgtatttctggaataacgagtatattttatctctaatcgaggataactgtcataccgtcctgcccgcagtatttggcaccctctatcaggtatctaaggagcactggaaccagaccatagtgtccttaatctacaacgtactgaagacattcatggagatgaacgggaaacttttcgatgaactcactgcaagctataaacttgagaagcagcaggagcagcagaaagcccaggagcggcaggagctatggcagggactcgaggagctgcgattgcgacgcttgcagggcactcaaggggctaaagaagcgcctctgcagagactcacacctcaggttgccgcttcgggaggccagtcctag

SEQ ID NO: 163173 - DNA, 2745 bp, Artificial Sequence
  derived and/or modified sequence
ggtggggggaggtgacttgatgtcatcctgagcagctgggcggcgggtgccggtgcgcacggagccgagccggggctcccgttgcgctgcaccgcgttgggtcggagtcccaggacttcagcggagatccgcgcgctgcgacggccggtgcagagcccgccgagcgcccagtcccggcccggggctgagttgggggcatgctctagccgcccccccggagcccgggagagaacccaggagcgccgccgcccagccccagcgccccgagcggaaccgctgcgaaggggccctgaacggccgtcgccctccctacgggcagcccccgggggttggcgaccgaagtctaggttttcgagaaagccagggtgggaaccctaactggactcttcgggacccccaggaaggatctgaggcctgagccatcctcctttctaccctgtctgccccccaggactgggcagttgcaggaggccctgggggggggcccaggactgtggttgtgccccccccccaaaggccggacaggatgggaccaagttagtctgtccagtctcacccagcacctcccaggcccagagagaacccccggggctctgaaagcttgccctgccgcctgaccgccatggagacgaagctgccccctgcaagcacccccactagcccctcctcccccgggctgtcgcctgtgcccccacccgacaaggtggacggcttctcccgccgttccctccgcagagcccggccccgccgctcccacagctcctctcagttccgctatcagagcaaccagcaagagctcacaccgctgcccctgctcaaagatgtgccggcttccgagctgcacgagctgctgagccggaagctggcccagtgtggggtgatgtttgacttcttggactgtgtggccgacctcaaggggaaggaggtgaagcgggcagccctcaacgagctggtggagtgtgtggggagcacccggggtgtcctcatcgagcccgtctacccagacatcatccgcatgatctcagtgaatatcttccggactctgccgcccagtgagaaccctgaatttgaccctgaagaggatgagcccaatcttgagccttcgtggccacacctgcagctggtatatgagtttttcctgcgtttcttggagagcccagacttccagccctccgtggccaagagatatgtggatcaaaagtttgtcctgatgctcctggagctatttgatagtgaggatccccgggagcgtgagtacctcaagaccatcctgcaccgggtctatggcaagttcctgggtctccgggcctacatccgcaaacagtgcaaccacatcttcctccggttcatctatgaattcgagcacttcaatggtgtggctgagctgctggagatcctaggaagcatcatcaatggctttgcgctgcccctgaagacggagcacaagcagttcctggttcgcgtcctgatccccctgcactctgtcaagtcgctgtctgtcttccatgcccagctggcatactgtgtggtgcagttcctggagaaggatgccactctgacagagcacgtgatccgggggctgctcaaatactggccaaaaacctgcacccagaaggaggtgatgtttctgggggagatggaagagattcttgatgtcatcgagccctcccagtttgtgaagatccaggagcccctttttaagcaggtggctcgctgtgtttccagcccccatttccaggttgcagagcgggctctgtatttctggaacaatgagtatatcctaagcctcattgaggacaactgccacactgtgctgcctgctgtgtttgggaccctctaccaagtctccaaggagcactggaaccaaaccatcgtatcactgatctacaatgtgctcaagaccttcatggagatgaatgggaagctgtttgatgagctcacagcctcctacaagctggaaaagcagcaggagcagcagaaggcccaggagcgtcaggagttatggcaaggtctggaggagctgcggctacgccggctacaggggacccagggggccaaggaggcccccctccagcggcttacaccccaggtggccgccagtgggggtcagagctagacagcacctcagaaggggaaaagctaaacccagagctgtcagtccctctatcccttctcctgtccaggggcccagagagaaacacacctacccctggccttgccagagtggcttctgaggactccctgcccagcccagctttcactggggggagacgaggagaggcaatggtggtcttggcaacagaatgctcagcccctcgtggcaggacttgacaagggcaagcttgaccaggaagctgccatcagggatcttcccctgccccgcaaagctaggctccagctgcaggcgggctcccaccctctgctcctggccttgggcaagggcactcagcgcctcgcctgcccctgccttggccaatgcgaggtccttccttatccccaccatggggtccatggtctatttattctcgcccagctcaccctctacacagacactgtcctgggtgcacactcctcccttccctcgctgtgtacttccttgtcccctttttatttattgggcagggggagggggagggcacaggcaagaagagattcacagtgtcctggggtaagggggggttcacagtaatcatggtctactcctctttccgtggctgggggtagacttaataaagagagaaattc

SEQ ID NO: 163174 - DNA, 2740 bp, Artificial Sequence
  derived and/or modified sequence
ggtggggggaggtgacttgatgtcatcctgagcagctgggcggcgggtgccggtgcgcacggagccgagccggggctcccgttgcgctgcaccgcgttgggtcggagtcccaggacttcagcggagatccgcgcgctgcgacggccggtgcagagcccgccgagcgcccagtcccggcccggggctgagttgggggcatgctctagccgcccccccggagcccgggagagaacccaggagcgccgccgcccagccccagcgccccgagcggaaccgctgcgaaggggccctgaacggccgtcgccctccctacgggcagcccccgggggttggcgaccgaagtctaggttttcgagaaagccagggtgggaaccctaactggactcttcgggacccccaggaaggatctgaggcctgagccatcctcctttctaccctgtctgccccccaggactgggcagttgcaggaggccctgggggggggcccaggactgtggttgtgccccccccccaaaggccggacaggatgggaccaagttagtctgtccagtctcacccagcacctcccaggcccagagagaacccccggggctctgaaagcttgccctgccgcctgaccgccatggagacgaagctgccccctgcaagcacccccactagcccctcctcccccgggctgtcgcctgtgcccccacccgacaaggtggacggcttctcccgccgttccctccgcagagcccggccccgccgctcccacagctcctctcagttccgctatcagagcaaccagcaagagctcacaccgctgcccctgctcaaagatgtgccggcttccgagctgcacgagctgctgagccggaagctggcccagtgtggggtgatgtttgacttcttggactgtgtggccgacctcaaggggaaggaggtgaagcgggcagccctcaacgagctggtggagtgtgtggggagcacccggggtgtcctcatcgagcccgtctacccagacatcatccgcatgatctcagtgaatatcttccggactctgccgcccagtgagaaccctgaatttgaccctgaagaggatgagcccaatcttgagccttcgtggccacacctgcagctggtatatgagtttttcctgcgtttcttggagagcccagacttccagccctccgtggccaagagatatgtggatcaaaagtttgtcctgatgctcctggagctatttgatagtgaggatccccgggagcgtgagtacctcaagaccatcctgcaccgggtctatggcaagttcctgggtctccgggcctacatccgcaaacagtgcaaccacatcttcctccggttcatctatgaattcgagcacttcaatggtgtggctgagctgctggagatcctaggaagcatcatcaatggctttgcgctgcccctgaagacggagcacaagcctggttcgcgtcctgatccccctgcactctgtcaagtcgctgtctgtcttccatgcccagctggcatactgtgtggtgcagttcctggagaaggatgccactctgacagagcacgtgatccgggggctgctcaaatactggccaaaaacctgcacccagaaggaggtgatgtttctgggggagatggaagagattcttgatgtcatcgagccctcccagtttgtgaagatccaggagcccctttttaagcaggtggctcgctgtgtttccagcccccatttccaggttgcagagcgggctctgtatttctggaacaatgagtatatcctaagcctcattgaggacaactgccacactgtgctgcctgctgtgtttgggaccctctaccaagtctccaaggagcactggaaccaaaccatcgtatcactgatctacaatgtgctcaagaccttcatggagatgaatgggaagctgtttgatgagctcacagcctcctacaagctggaaaagcagcaggagcagcagaaggcccaggagcgtcaggagttatggcaaggtctggaggagctgcggctacgccggctacaggggacccagggggccaaggaggcccccctccagcggcttacaccccaggtggccgccagtgggggtcagagctagacagcacctcagaaggggaaaagctaaacccagagctgtcagtccctctatcccttctcctgtccaggggcccagagagaaacacacctacccctggccttgccagagtggcttctgaggactccctgcccagcccagctttcactggggggagacgaggagaggcaatggtggtcttggcaacagaatgctcagcccctcgtggcaggacttgacaagggcaagcttgaccaggaagctgccatcagggatcttcccctgccccgcaaagctaggctccagctgcaggcgggctcccaccctctgctcctggccttgggcaagggcactcagcgcctcgcctgcccctgccttggccaatgcgaggtccttccttatccccaccatggggtccatggtctatttattctcgcccagctcaccctctacacagacactgtcctgggtgcacactcctcccttccctcgctgtgtacttccttgtcccctttttatttattgggcagggggagggggagggcacaggcaagaagagattcacagtgtcctggggtaagggggggttcacagtaatcatggtctactcctctttccgtggctgggggtagacttaataaagagagaaattc

SEQ ID NO: 163175 - DNA, 887 bp, Artificial Sequence
  derived and/or modified sequence
ctcagtgcgcgatcttaagcgcgcatctgtggaaacaattaaagccagggtgggaaccctaactggactcttcgggacccccaggaaggatctgaggcctgagccatcctcctttctaccctgtctgccccccaggactgggcagttgcaggaggccctgggggggggcccaggactgtggttgtgccccccccccaaaggccggacaggatgggaccaagttagtctgtccagtctcacccagcacctcccaggcccagagagaacccccggggctctgaaagcttgccctgccgcctgaccgccatggagacgaagctgccccctgcaagcacccccactagcccctcctcccccgggctgtcgcctgtgcccccacccgacaaggtggacggcttctcccgccgttccctccgcagagcccggccccgccgctcccacagctcctctcagttccgctatcagagcaaccagcaagagctcacaccgctgcccctgctcaaagatgtgccggcttccgagctgcacgagctgctgagccggaagctggcccagtgtggggtgatgtttgacttcttggactgtgtggccgacctcaaggggaaggaggtgaagcgggcagccctcaacgagctggtggagtgtgtggggagcacccggggtgtcctcatcgagcccgtctacccagacatcatccgcatgatctcagtgaatatcttccggactctgccgcccagtgagaaccctgaatttgaccctgaagaggatgagcccaatcttgagccttcgtggccacacctgcagctggtatatgagtttttcctgcgtttcttggagagcccagacttccagccctccgtggccaagagatatgtggatcaaaagtt

SEQ ID NO: 163176 - DNA, 2721 bp, Artificial Sequence
  derived and/or modified sequence
cgcacggagccgagccggggctcccgttgcgctgcaccgcgttgggtcggagtcccaggacttcagcggagatccgcgcgctgcgacggccggtgcagagcccgccgagcgcccagtcccggcccggggctgagttgggggcatgctctagccgcccccccggagcccgggagagaacccaggagcgccgccgcccagccccagcgccccgagcggaaccgctgcgaaggggccctgaacggccgtcgccctccctacgggcagcccccgggggttggcgaccgaagtctaggttttcgagaaatctttctgcctgacttcgttttcaaaagagccagggtgggaaccctaactggactcttcgggacccccaggaaggatctgaggcctgagccatcctcctttctaccctgtctgccccccaggactgggcagttgcaggaggccctgggggggggcccaggactgtggttgtgccccccccccaaaggccggacaggatgggaccaagttagtctgtccagtctcacccagcacctcccaggcccagagagaacccccggggctctgaaagcttgccctgccgcctgaccgccatggagacgaagctgccccctgcaagcacccccactagcccctcctcccccgggctgtcgcctgtgcccccacccgacaaggtggacggcttctcccgccgttccctccgcagagcccggccccgccgctcccacagctcctctcagttccgctatcagagcaaccagcaagagctcacaccgctgcccctgctcaaagatgtgccggcttccgagctgcacgagctgctgagccggaagctggcccagtgtggggtgatgtttgacttcttggactgtgtggccgacctcaaggggaaggaggtgaagcgggcagccctcaacgagctggtggagtgtgtggggagcacccggggtgtcctcatcgagcccgtctacccagacatcatccgcatgatctcagtgaatatcttccggactctgccgcccagtgagaaccctgaatttgaccctgaagaggatgagcccaatcttgagccttcgtggccacacctgcagctggtatatgagtttttcctgcgtttcttggagagcccagacttccagccctccgtggccaagagatatgtggatcaaaagtttgtcctgatgctcctggagctatttgatagtgaggatccccgggagcgtgagtacctcaagaccatcctgcaccgggtctatggcaagttcctgggtctccgggcctacatccgcaaacagtgcaaccacatcttcctccggttcatctatgaattcgagcacttcaatggtgtggctgagctgctggagatcctaggaagcatcatcaatggctttgcgctgcccctgaagacggagcacaagcagttcctggttcgcgtcctgatccccctgcactctgtcaagtcgctgtctgtcttccatgcccagctggcatactgtgtggtgcagttcctggagaaggatgccactctgacagagcacgtgatccgggggctgctcaaatactggccaaaaacctgcacccagaaggaggtgatgtttctgggggagatggaagagattcttgatgtcatcgagccctcccagtttgtgaagatccaggagcccctttttaagcaggtggctcgctgtgtttccagcccccatttccaggttgcagagcgggctctgtatttctggaacaatgagtatatcctaagcctcattgaggacaactgccacactgtgctgcctgctgtgtttgggaccctctaccaagtctccaaggagcactggaaccaaaccatcgtatcactgatctacaatgtgctcaagaccttcatggagatgaatgggaagctgtttgatgagctcacagcctcctacaagctggaaaagcagcaggagcagcagaaggcccaggagcgtcaggagttatggcaaggtctggaggagctgcggctacgccggctacaggggacccagggggccaaggaggcccccctccagcggcttacaccccaggtggccgccagtgggggtcagagctagacagcacctcagaaggggaaaagctaaacccagagctgtcagtccctctatcccttctcctgtccaggggcccagagagaaacacacctacccctggccttgccagagtggcttctgaggactccctgcccagcccagctttcactggggggagacgaggagaggcaatggtggtcttggcaacagaatgctcagcccctcgtggcaggacttgacaagggcaagcttgaccaggaagctgccatcagggatcttcccctgccccgcaaagctaggctccagctgcaggcgggctcccaccctctgctcctggccttgggcaagggcactcagcgcctcgcctgcccctgccttggccaatgcgaggtccttccttatccccaccatggggtccatggtctatttattctcgcccagctcaccctctacacagacactgtcctgggtgcacactcctcccttccctcgctgtgtacttccttgtcccctttttatttattgggcagggggagggggagggcacaggcaagaagagattcacagtgtcctggggtaagggggggttcacagtaatcatggtctactcctctttccgtggctgggggtagacttaataaagagagaaattcaa

SEQ ID NO: 163177 - DNA, 1494 bp, Artificial Sequence
  derived and/or modified sequence
atggaaactaagctgcctcctgcctccactccgacatctccttcatctcctgggctatcaccagtgcctccccccgataaagtagacggatttagcagaagaagtctcaggcgcgccaggcctagaagatcacacagctcgagccagttcagataccagtcaaatcaacaggagttgactcccttgccactgttaaaagacgtaccagcctcagagttacacgagctgctcagtcggaagctcgctcagtgtggggtcatgttcgattttctcgattgtgtcgcggacctgaaaggcaaagaggtcaaacgggcagctttgaatgagctcgtcgagtgcgtgggatcaacaaggggcgtgctcattgagcctgtttacccagacatcatacgaatgatctctgtcaatattttccgcacgttgccaccttctgaaaatccagaattcgatcctgaagaggatgagcctaaccttgaaccctcctggccccacctccagcttgtttacgagttcttcctccgctttcttgaatcccctgactttcaaccctcggtagccaaacggtacgtagaccaaaagttcgtgctcatgctcctggagttgtttgacagcgaagacccaagagagcgagagtacttgaaaaccatcctgcaccgggtgtatggcaaatttctgggactcagggcatatatccgaaaacagtgtaaccacatattcctgagatttatttatgagtttgaacactttaatggagtagcagaactgctggagatacttgggagcatcataaatggtttcgcactgcctttgaagaccgagcacaaacaattcctggttcgtgtgctgatccccctgcactccgtgaaatcccttagtgtcttccacgcacagttggcttattgcgtcgtgcaattcttagagaaagatgctacactcaccgaacatgttatccgaggtttgttgaagtattggcctaaaacatgcacacagaaggaagttatgttcctgggtgagatggaggagatcctggatgtcatcgagccgtcccaatttgtcaaaattcaggagccattattcaagcaggttgcccggtgcgtgtccagtccacactttcaagtcgccgagcgagctctgtacttttggaataacgaatatatactatcgctgatagaggacaactgtcacaccgtgcttccggccgtattcggcacactctaccaagtcagcaaagagcattggaaccagacaatcgtcagtttaatttataatgtgcttaaaacctttatggagatgaacggtaaactgtttgatgagctgaccgcaagctacaaacttgagaagcaacaagagcagcagaaggcacaggagcggcaggaactgtggcaaggcctggaggaactgagactccggcgtctccaaggtacccaaggtgccaaagaggcccccctacaaaggttgaccccacaagtggccgcttccggcgggcaaagctag

SEQ ID NO: 163178 - DNA, 1494 bp, Artificial Sequence
  derived and/or modified sequence
atggagactaaactcccacccgcatccacccccacttctccgagctcccccgggctcagccctgtaccgccaccagataaagttgatgggttttccagaagatctctgcgacgggcacggccccgaagatcgcactcttcatcccaattccggtatcaatcaaaccaacaagaacttactcccttacctctccttaaagacgttccagcctcggagctgcacgaactcctttctcgcaagctggcccaatgtggcgttatgttcgactttttggactgcgtcgccgatctgaaagggaaagaggttaagcgggccgcgctgaatgaattggtggaatgcgtgggctcaactcggggagtgctgatcgagccagtttacccagatataatacgaatgatttctgtgaacatctttagaactctgccaccatctgaaaaccccgagtttgatccggaagaagatgaacctaatctcgaaccctcttggcctcatctgcaattggtctatgaattcttcttgagattcctggaaagtcccgattttcaacctagtgtcgcgaaaaggtacgtcgatcagaagtttgtcttaatgctgctcgaactgtttgactcagaagaccccagagagcgtgaatatcttaagactatactccaccgcgtctacggtaaatttctcggtcttagagcgtatattcgaaagcagtgtaatcatatattccttcgtttcatatacgagtttgaacacttcaacggtgtagcagagctcctggagatacttggatctataattaatggcttcgcactgcccctgaaaactgaacataaacaatttctggtcagagtgcttatccctttgcattccgtgaaatccctatccgtgttccacgcccagttggcttattgtgtggtgcagtttctggaaaaagacgccacactcactgagcacgtgatccgaggtctgctgaagtattggcccaaaacctgtacccaaaaggaagtgatgttcctgggagaaatggaggaaattctcgacgtgatagaaccgtcccaatttgtgaaaatacaggagcccctttttaaacaagtcgcacgctgcgtgagttctccacacttccaagtggctgaaagagcactgtacttttggaataatgaatatatactttctctcatcgaagacaattgccatacagttctcccagccgtgtttggaacactctaccaagtttcaaaagagcactggaaccaaaccatagtgtcattgatctacaatgtgttgaagacctttatggagatgaacggcaaactgtttgatgaactcactgcctcgtataaacttgaaaaacagcaggaacagcaaaaggctcaggaacgacaggaattgtggcaaggtttggaggagctacgtcttaggaggctgcagggcactcagggagcaaaagaggctcccctccagaggcttacaccgcaagtagccgctagtggcgggcagtcctag

SEQ ID NO: 163179 - DNA, 1494 bp, Artificial Sequence
  derived and/or modified sequence
atggagaccaagctgccccccgccagcacccccaccagccccagcagccccggcctgagccccgtgcccccccccgacaaggtggacggcttcagcagaagaagcctgagaagagccagacccagaagaagccacagcagcagccagttcagataccagagcaaccagcaggagctgacccccctgcccctgctgaaggacgtgcccgccagcgagctgcacgagctgctgagcagaaagctggcccagtgcggcgtgatgttcgacttcctggactgcgtggccgacctgaagggcaaggaggtgaagagagccgccctgaacgagctggtggagtgcgtgggcagcaccagaggcgtgctgatcgagcccgtgtaccccgacatcatcagaatgatcagcgtgaacatcttcagaaccctgccccccagcgagaaccccgagttcgaccccgaggaggacgagcccaacctggagcccagctggccccacctgcagctggtgtacgagttcttcctgagattcctggagagccccgacttccagcccagcgtggccaagagatacgtggaccagaagttcgtgctgatgctgctggagctgttcgacagcgaggaccccagagagagagagtacctgaagaccatcctgcacagagtgtacggcaagttcctgggcctgagagcctacatcagaaagcagtgcaaccacatcttcctgagattcatctacgagttcgagcacttcaacggcgtggccgagctgctggagatcctgggcagcatcatcaacggcttcgccctgcccctgaagaccgagcacaagcagttcctggtgagagtgctgatccccctgcacagcgtgaagagcctgagcgtgttccacgcccagctggcctactgcgtggtgcagttcctggagaaggacgccaccctgaccgagcacgtgatcagaggcctgctgaagtactggcccaagacctgcacccagaaggaggtgatgttcctgggcgagatggaggagatcctggacgtgatcgagcccagccagttcgtgaagatccaggagcccctgttcaagcaggtggccagatgcgtgagcagcccccacttccaggtggccgagagagccctgtacttctggaacaacgagtacatcctgagcctgatcgaggacaactgccacaccgtgctgcccgccgtgttcggcaccctgtaccaggtgagcaaggagcactggaaccagaccatcgtgagcctgatctacaacgtgctgaagaccttcatggagatgaacggcaagctgttcgacgagctgaccgccagctacaagctggagaagcagcaggagcagcagaaggcccaggagagacaggagctgtggcagggcctggaggagctgagactgagaagactgcagggcacccagggcgccaaggaggcccccctgcagagactgaccccccaggtggccgccagcggcggccagagctag

SEQ ID NO: 163180 - DNA, 1107 bp, Artificial Sequence
  derived and/or modified sequence
agcgtgcagagccaccccgccccccccagacccagagagaaccccagaggcagcgagagcctgccctgcagactgaccgccatggagaccaagctgccccccgccagcacccccaccagccccagcagccccggcctgagccccgtgcccccccccgacaaggtggacggcttcagcagaagaagcctgagaagagccagacccagaagaagccacagcagcagccagttcagataccagagcaaccagcaggagctgacccccctgcccctgctgaaggacgtgcccgccagcgagctgcacgagctgctgagcagaaagctggcccagtgcggcgtgatgttcgacttcctggactgcgtggccgacctgaagggcaaggaggtgaagagagccgccctgaacgagctggtggagtgcgtgggcagcaccagaggcgtgctgatcgagcccgtgtaccccgacatcatcagaatgatcagcgtgaacatcttcagaaccctgccccccagcgagaaccccgagttcgaccccgaggaggacgagcccaacctggagcccagctggccccacctgcagctggtgtacgagttcttcctgagattcctggagagccccgacttccagcccagcgtggccaagagatacgtggaccagaagttcgtgctgatgctgctggagctgttcgacagcgaggaccccagagagagagagtacctgaagaccatcctgcacagagtgtacggcaagttcctgggcctgagagcctacatcagaaagcagtgcaaccacatcttcctgagattcatctacgagttcgagcacttcaacggcgtggccgagctgctggagatcctgggcagcatcatcaacggcttcgccctgcccctgaagaccgagcacaagcccggcagcagacccgacccccccgccctgtgccaggtggccgtgtgcctgccctgccccgccggcatcctgtgcggcgccgtgcccggcgagggctgccacagcgacagagccagagaccccggcgccgcccagatcctggccaagaacctgcaccccgagggcggcgacgtgagcggcggcgacggcagagacagctag

SEQ ID NO: 163181 - DNA, 582 bp, Artificial Sequence
  derived and/or modified sequence
atggagaccaagctgccccccgccagcacccccaccagccccagcagccccggcctgagccccgtgcccccccccgacaaggtggacggcttcagcagaagaagcctgagaagagccagacccagaagaagccacagcagcagccagttcagataccagagcaaccagcaggagctgacccccctgcccctgctgaaggacgtgcccgccagcgagctgcacgagctgctgagcagaaagctggcccagtgcggcgtgatgttcgacttcctggactgcgtggccgacctgaagggcaaggaggtgaagagagccgccctgaacgagctggtggagtgcgtgggcagcaccagaggcgtgctgatcgagcccgtgtaccccgacatcatcagaatgatcagcgtgaacatcttcagaaccctgccccccagcgagaaccccgagttcgaccccgaggaggacgagcccaacctggagcccagctggccccacctgcagctggtgtacgagttcttcctgagattcctggagagccccgacttccagcccagcgtggccaagagatacgtggaccagaagtag

SEQ ID NO: 163182 - protein, 504 aa, Artificial Sequence
  derived and/or modified sequence
  misc_feature (1)..(1): Xaa can be any naturally occurring amino acid
XKKERRQSSSRFNLSKNRELQKLPALKDSPTQEREELFIQKLRQCCVLFDFVSDPLSDLKFKEVKRAGLNEMVEYITHSRDVVTEAIYPEAVTMFSVNLFRTLPPSSNPTGAEFDPEEDEPTLEAAWPHLQLVYEFFLRFLESPDFQPNIAKKYIDQKFVLALLDLFDSEDPRERDFLKTILHRIYGKFLGLRAYIRRQINHIFYRFIYETEHHNGIAELLEILGSIINGFALPLKEEHKMFLIRVLLPLHKVKSLSVYHPQVIVGLLKFWPKTHSPKEVMFLNELEEILDVIEPSEFSKVMEPLFRQLAKCVSSPHFQVAERALYYWNNEYIMSLISDNAARVLPIMFPALYRNSKSHWNKTIHGLIYNALKLFMEMNQKLFDDCTQQYKAEKQKGRFRMKEREEMWQKIEELARLNPQYPMFRAPPPLPPVYSMETETPTAEDIQLLKRTVETEAVQMLKDIKKEKVLLRRKSELPQDVYTIKALEAHKRAEEFLTASQEAL

SEQ ID NO: 163183 - protein, 602 aa, Artificial Sequence
  derived and/or modified sequence
MPYKLKKEKEPPKVAKCTAKPSSSGKDGGGENTEEAQPQPQPQPQPQAQSQPPSSNKRPSNSTPPPTQLSKIKYSGGPQIVKKERRQSSSRFNLSKNRELQKLPALKDSPTQEREELFIQKLRQCCVLFDFVSDPLSDLKFKEVKRAGLNEMVEYITHSRDVVTEAIYPEAVTMFSVNLFRTLPPSSNPTGAEFDPEEDEPTLEAAWPHLQLVYEFFLRFLESPDFQPNIAKKYIDQKFVLALLDLFDSEDPRERDFLKTILHRIYGKFLGLRAYIRRQINHIFYRFIYETEHHNGIAELLEILGSIINGFALPLKEEHKMFLIRVLLPLHKVKSLSVYHPQLAYCVVQFLEKESSLTEPVIVGLLKFWPKTHSPKEVMFLNELEEILDVIEPSEFSKVMEPLFRQLAKCVSSPHFQVAERALYYWNNEYIMSLISDNAARVLPIMFPALYRNSKSHWNKTIHGLIYNALKLFMEMNQKLFDDCTQQYKAEKQKGRFRMKEREEMWQKIEELARLNPQYPMFRAPPPLPPVYSMETETPTAEDIQLLKRTVETEAVQMLKDIKKEKVLLRRKSELPQDVYTIKALEAHKRAEEFLTASQEAL

SEQ ID NO: 163184 - protein, 584 aa, Artificial Sequence
  derived and/or modified sequence
MPYKLKKEKEPPKVAKCTAKPSSSGKDGGGENTEEAQPQPQPQPQPQAQSQPPSSNKRPSNSTPPPTQLSKIKYSGGPQIVKKERRQSSSRFNLSKNRELQKLPALKDSPTQEREELFIQKLRQCCVLFDFVSDPLSDLKFKEVKRAGLNEMVEYITHSRDVVTEAIYPEAVTMFSVNLFRTLPPSSNPTGAEFDPEEDEPTLEAAWPHLQLVYEFFLRFLESPDFQPNIAKKYIDQKFVLALLDLFDSEDPRERDFLKTILHRIYGKFLGLRAYIRRQINHIFYRFIYETEHHNGIAELLEILGSIINGFALPLKEEHKMFLIRVLLPLHKVKSLSVYHPQVIVGLLKFWPKTHSPKEVMFLNELEEILDVIEPSEFSKVMEPLFRQLAKCVSSPHFQVAERALYYWNNEYIMSLISDNAARVLPIMFPALYRNSKSHWNKTIHGLIYNALKLFMEMNQKLFDDCTQQYKAEKQKGRFRMKEREEMWQKIEELARLNPQYPMFRAPPPLPPVYSMETETPTAEDIQLLKRTVETEAVQMLKDIKKEKVLLRRKSELPQDVYTIKALEAHKRAEEFLTASQEAL

SEQ ID NO: 163185 - DNA, 1515 bp, Artificial Sequence
  derived and/or modified sequence
taaaaaaaggaaagacgacagtcgtcttcccgatttaacctgtcaaagaaccgagaactgcagaaactgccagctctgaaagatagtcctacacaagagcgggaggagctctttatacagaaactgcgtcagtgctgtgtgcttttcgacttcgttagcgaccctctgagcgatctgaagtttaaggaggtgaaaagggccgggctcaatgaaatggttgagtacataactcacagcagggacgtggtcacagaggccatttacccggaggccgttaccatgttttccgtgaacctgttccgaactcttccaccatccagtaaccccactggagcagaattcgatcccgaagaggacgagccaaccctggaggctgcctggccccaccttcaacttgtatacgaattttttcttcggttcctggagtcgcctgacttccaaccaaatatcgccaagaagtatattgatcagaagttcgtgctggctttactggacctcttcgacagtgaagaccctcgcgagcgggatttcttgaaaacaatcctgcataggatctacggcaagttcctcgggcttagggcctatattcgacgccagatcaatcacatattctatcgctttatatatgagacagagcaccacaatggaattgcggagctgctggagatcctggggagtataatcaatggctttgctctgcccctgaaggaagaacataagatgtttctcattcgagtgctccttcctctgcacaaagtcaagagtctctcagtctatcatccgcaggtgattgtgggtctccttaaattctggcctaaaacacactcccccaaagaggttatgttccttaacgagctcgaagaaatcctggacgtgattgagccttccgaattttcaaaggtgatggagcctctgtttcgacagctggcaaagtgcgtgtcaagcccgcactttcaggttgccgagagggcactgtactactggaacaatgaatatattatgagcttaatctcagataacgccgcaagggtgctgccaataatgtttccggccctctaccggaactccaagagccactggaataagaccatccacggtctcatttacaacgctcttaagctgtttatggagatgaatcagaaattgtttgatgactgcacccagcaatataaagctgagaagcaaaaaggaaggtttcggatgaaagaaagggaagagatgtggcagaaaatcgaggaactggcaaggctcaatcctcaataccccatgttccgcgcgccaccccctctccccccggtgtacagcatggagacagagacccccactgcagaggacattcagttattgaagcggacggtagaaaccgaagcagtgcaaatgctgaaagacatcaaaaaggagaaggtgttgttacggcgcaagtctgagctgcctcaggatgtgtatacaattaaggccctggaggcccataaacgcgccgaagaatttctgacagcctcccaagaagcactgtag

SEQ ID NO: 163186 - DNA, 1809 bp, Artificial Sequence
  derived and/or modified sequence
atgccttacaagctcaaaaaggagaaagagcctcctaaagtggcaaaatgtaccgccaagccttccagctcagggaaggatggcggcggcgaaaataccgaagaggcccaaccgcagcctcagcctcagccccagccgcaggcacagagccagccgcccagctccaataaacgtcccagtaactcaacaccgccaccaactcagctgtctaagatcaaatacagcggggggccgcaaattgtgaagaaggagcgtcggcaatcttcatcgcggttcaatctgtccaagaacagagaactgcagaagttgccagccctgaaggactccccaacacaggaaagggaagagctatttatccagaagcttcgacagtgctgcgtgctttttgactttgtgtctgatcccctgtctgatttgaagtttaaggaggtgaaacgggcaggactgaatgagatggtagagtacataactcatagcagagatgtcgtcacagaagctatttatccggaggctgtgaccatgttttcagtgaatctgtttcggaccctgcccccatcctccaatcccactggtgctgagttcgatcccgaagaggacgagccaacactggaagccgcgtggccccatctccagcttgtttacgaattttttcttcggtttctcgagagccccgattttcagccaaacatagccaagaagtacatcgatcaaaagttcgtgttggccctgctggacctgtttgacagcgaggatccgcgggagcgagattttctgaaaactatcctccaccgaatttatgggaaattcttgggactgagggcttatatccgccgccagattaaccacatcttttatcgctttatttacgaaaccgaacatcataatggcatcgcagagcttttagaaatcctgggcagtataattaatggtttcgctctacccttaaaagaggaacacaagatgttcctgatcagagtgcttctgccgctacataaggtgaaatccctgtctgtataccacccacaattagcttactgtgttgtgcaatttctggaaaaagaaagctctctaaccgaaccagtgattgtgggacttctgaaattttggcctaaaacccattcacccaaagaagtgatgtttctcaatgaactggaggaaattctggatgtcatagagccgtcagagttctctaaagtaatggagccgcttttcagacaacttgctaagtgcgtgtctagccctcacttccaggttgcagaacgcgctctgtactattggaacaatgaatacataatgagccttatttcagacaatgctgctagagtcttaccaatcatgttccccgctctctacaggaacagcaaatctcactggaataagacaattcacgggctgatatacaacgctttaaagttatttatggaaatgaaccagaagctgtttgacgattgtacccagcagtataaggccgagaagcaaaagggcaggttccgcatgaaagagagagaagagatgtggcaaaagattgaagagcttgcccgacttaacccccagtatcccatgtttcgcgccccgcctcccctgcccccagtgtattcaatggaaacagagacaccgaccgccgaggatatacagctgctgaaacgcacagtagaaacagaagccgtccagatgttaaaagatatcaagaaagagaaggtcctgttacgcaggaaaagtgagcttccccaagacgtgtataccatcaaagctttagaagctcataagcgcgccgaagagttcttaacagcctcacaagaagcgttatag

SEQ ID NO: 163187 - DNA, 1755 bp, Artificial Sequence
  derived and/or modified sequence
atgccgtataagctaaaaaaggagaaggagcctcctaaagtagctaagtgtaccgccaagccctcttcctccggcaaggacgggggaggggagaacactgaggaggcccagccccaacctcaaccccagcctcagcctcaggcacagagccagccaccatcatcaaataagagaccgtcaaactcaacacctcctccaactcagctcagtaagataaaatactctgggggccctcagatcgttaaaaaagaaaggcgccaatcctccagccggttcaatttaagtaaaaacagagaactgcagaagctaccggccttgaaagactctcctacccaggaacgtgaagaactgttcatccagaagcttcgccagtgttgcgttctgttcgacttcgtttctgatcccctgtctgatctcaaattcaaagaggttaagcgcgccgggctcaatgaaatggttgagtacatcactcactcgagggatgttgtaaccgaagccatttatcctgaagccgtgacaatgtttagcgtgaacctattccgaaccctgccaccttcgtcaaatcccaccggggcggaatttgatcccgaggaggacgaacctacccttgaagcagcttggcctcacctacagttggtctatgaattttttctgcgcttcctcgagagtcccgatttccagccgaatattgcaaagaaatacatagaccaaaaatttgtcctggctctgctggacctgtttgatagtgaggacccgagagaaagagattttttgaagacaatcctgcacaggatctacggcaaatttctgggccttagagcatacatcaggaggcagatcaaccacatcttctatcgcttcatttacgagactgagcatcacaatggtattgccgagctcctggagatcctcggtagcataattaatgggttcgctctaccgttgaaggaagagcataagatgttcctaattcgagtgttgctcccactacacaaagttaaatctctgtcggtctaccacccgcaggtgatcgtcggtctccttaagttttggcccaaaactcattcaccaaaggaagtgatgtttttgaatgagctagaagagatactggatgtaatcgaaccttccgagttcagcaaggtcatggaacctttattccgccaactcgctaagtgtgtatcgtcccctcatttccaggtagctgagcgcgccctctactactggaacaatgagtacatcatgtctctgattagcgataatgccgcccgcgttctcccgatcatgttccccgcattatatcgaaactctaagtcgcattggaataagacaatccacgggcttatctacaatgctctgaaactctttatggagatgaatcaaaagctatttgatgactgcacacagcagtataaagccgaaaaacaaaaaggcaggttcagaatgaaggaacgagaggaaatgtggcagaagatagaagagcttgctcgccttaatccacagtacccaatgtttagggctcccccgccactacctcccgtctactccatggagaccgaaacgcctactgccgaggacatccagttgctgaagagaactgtggagacggaagccgtgcagatgctgaaagacataaaaaaggagaaggtgctgctcagaagaaagtctgaattgcctcaggatgtatacacgattaaggcgctagaggcccataaaagggctgaggagttcctgactgcctcccaagaggcattgtag

SEQ ID NO: 163188 - DNA, 1515 bp, Artificial Sequence
  derived and/or modified sequence
tgaaagaaggagcggcggcagagcagcagccgcttcaacctgagcaagaaccgggagctgcagaagctgcctgccctgaaggacagccccacccaggagcgggaggagctgttcatccagaagctgcggcagtgctgcgtgctgtttgattttgtgtctgaccccctgagtgacctgaagttcaaggaggtgaagagagctggcctgaatgagatggtggagtacatcacccacagcagagatgtggtgacagaggccatctacccagaggccgtgaccatgttttctgtgaacctcttccgcaccctgccccccagcagcaaccccaccggggctgagtttgatcctgaggaggatgagcccaccctggaggccgcctggccccacctgcagctggtgtatgagttcttcctgcgcttcctggagagcccagacttccagcccaacatcgccaagaagtacatcgaccagaagtttgtgctggccctgctggacctgtttgattctgaggacccccgggagcgggacttcctgaagaccatcctgcaccgcatctacggcaagttcctgggcctgcgggcctacatccggcggcagatcaaccacatcttctaccgcttcatctatgaaacagagcaccacaatggaattgctgagctgctggagatcctgggcagcatcatcaatggatttgccctgcccctgaaggaggagcacaagatgttcctgatccgggtgctgctgcccctgcacaaggtgaagagcctgtctgtgtaccacccccaggtgattgtgggcctgctgaagttctggcccaagacccacagccccaaggaggtgatgttcctgaatgagctggaggagatcctggatgtgattgagcccagcgagttcagcaaggtgatggagcccctcttccggcagctggccaagtgtgtgagcagcccccacttccaggtggccgagcgggccctgtactactggaacaatgagtacatcatgagcctcatcagtgacaatgctgcccgggtgctgcccatcatgtttcctgccctgtacagaaacagcaagagccactggaacaagaccatccacggcctcatctacaatgccctgaagctgttcatggagatgaaccagaagctgtttgatgactgcacccagcagtacaaggccgagaagcagaagggccgcttcaggatgaaggagcgggaggagatgtggcagaagattgaggagctggcccggctgaacccccagtaccccatgttccgggcccccccacccctgccccctgtgtacagcatggagacagagacccccacagctgaggacatccagctgctgaagaggacagtggagacagaagctgtgcagatgctgaaggacatcaagaaggagaaggtgctgctgcggaggaagtctgagctgccccaggatgtgtacaccatcaaggccctggaggcccacaagagagctgaggagttcctgacagccagccaggaggccctgtag

SEQ ID NO: 163189 - DNA, 1809 bp, Artificial Sequence
  derived and/or modified sequence
atgccctacaagctgaagaaggagaaggagccccccaaggtggccaagtgcacagccaagcccagcagcagcggcaaggatggcggcggagaaaatacagaggaggcccagccccagccccagccccagccccagccccaggcccagagccagccccccagcagcaacaagaggcccagcaacagcaccccaccacccacccagctgagcaagatcaagtacagcggcggcccccagatcgtgaagaaggagcggcggcagagcagcagccgcttcaacctgagcaagaaccgggagctgcagaagctgcctgccctgaaggacagccccacccaggagcgggaggagctgttcatccagaagctgcggcagtgctgcgtgctgtttgattttgtgtctgaccccctgagtgacctgaagttcaaggaggtgaagagagctggcctgaatgagatggtggagtacatcacccacagcagagatgtggtgacagaggccatctacccagaggccgtgaccatgttttctgtgaacctcttccgcaccctgccccccagcagcaaccccaccggggctgagtttgatcctgaggaggatgagcccaccctggaggccgcctggccccacctgcagctggtgtatgagttcttcctgcgcttcctggagagcccagacttccagcccaacatcgccaagaagtacatcgaccagaagtttgtgctggccctgctggacctgtttgattctgaggacccccgggagcgggacttcctgaagaccatcctgcaccgcatctacggcaagttcctgggcctgcgggcctacatccggcggcagatcaaccacatcttctaccgcttcatctatgaaacagagcaccacaatggaattgctgagctgctggagatcctgggcagcatcatcaatggatttgccctgcccctgaaggaggagcacaagatgttcctgatccgggtgctgctgcccctgcacaaggtgaagagcctgtctgtgtaccacccccagctggcctactgtgtggtgcagttcctggagaaggagagcagcctgacagagcccgtcatcgtgggcctgctgaagttctggcccaagacccacagccccaaggaggtgatgttcctgaatgagctggaggagatcctggatgtgattgagcccagcgagttcagcaaggtgatggagcccctcttccggcagctggccaagtgtgtgagcagcccccacttccaggtggccgagcgggccctgtactactggaacaatgagtacatcatgagcctcatcagtgacaatgctgcccgggtgctgcccatcatgtttcctgccctgtacagaaacagcaagagccactggaacaagaccatccacggcctcatctacaatgccctgaagctgttcatggagatgaaccagaagctgtttgatgactgcacccagcagtacaaggccgagaagcagaagggccgcttcaggatgaaggagcgggaggagatgtggcagaagattgaggagctggcccggctgaacccccagtaccccatgttccgggcccccccacccctgccccctgtgtacagcatggagacagagacccccacagctgaggacatccagctgctgaagaggacagtggagacagaagctgtgcagatgctgaaggacatcaagaaggagaaggtgctgctgcggaggaagtctgagctgccccaggatgtgtacaccatcaaggccctggaggcccacaagagagctgaggagttcctgacagccagccaggaggccctgtag

SEQ ID NO: 163190 - DNA, 1755 bp, Artificial Sequence
  derived and/or modified sequence
atgccctacaagctgaagaaggagaaggagccccccaaggtggccaagtgcacagccaagcccagcagcagcggcaaggatggcggcggagaaaatacagaggaggcccagccccagccccagccccagccccagccccaggcccagagccagccccccagcagcaacaagaggcccagcaacagcaccccaccacccacccagctgagcaagatcaagtacagcggcggcccccagatcgtgaagaaggagcggcggcagagcagcagccgcttcaacctgagcaagaaccgggagctgcagaagctgcctgccctgaaggacagccccacccaggagcgggaggagctgttcatccagaagctgcggcagtgctgcgtgctgtttgattttgtgtctgaccccctgagtgacctgaagttcaaggaggtgaagagagctggcctgaatgagatggtggagtacatcacccacagcagagatgtggtgacagaggccatctacccagaggccgtgaccatgttttctgtgaacctcttccgcaccctgccccccagcagcaaccccaccggggctgagtttgatcctgaggaggatgagcccaccctggaggccgcctggccccacctgcagctggtgtatgagttcttcctgcgcttcctggagagcccagacttccagcccaacatcgccaagaagtacatcgaccagaagtttgtgctggccctgctggacctgtttgattctgaggacccccgggagcgggacttcctgaagaccatcctgcaccgcatctacggcaagttcctgggcctgcgggcctacatccggcggcagatcaaccacatcttctaccgcttcatctatgaaacagagcaccacaatggaattgctgagctgctggagatcctgggcagcatcatcaatggatttgccctgcccctgaaggaggagcacaagatgttcctgatccgggtgctgctgcccctgcacaaggtgaagagcctgtctgtgtaccacccccaggtgattgtgggcctgctgaagttctggcccaagacccacagccccaaggaggtgatgttcctgaatgagctggaggagatcctggatgtgattgagcccagcgagttcagcaaggtgatggagcccctcttccggcagctggccaagtgtgtgagcagcccccacttccaggtggccgagcgggccctgtactactggaacaatgagtacatcatgagcctcatcagtgacaatgctgcccgggtgctgcccatcatgtttcctgccctgtacagaaacagcaagagccactggaacaagaccatccacggcctcatctacaatgccctgaagctgttcatggagatgaaccagaagctgtttgatgactgcacccagcagtacaaggccgagaagcagaagggccgcttcaggatgaaggagcgggaggagatgtggcagaagattgaggagctggcccggctgaacccccagtaccccatgttccgggcccccccacccctgccccctgtgtacagcatggagacagagacccccacagctgaggacatccagctgctgaagaggacagtggagacagaagctgtgcagatgctgaaggacatcaagaaggagaaggtgctgctgcggaggaagtctgagctgccccaggatgtgtacaccatcaaggccctggaggcccacaagagagctgaggagttcctgacagccagccaggaggccctgtag

SEQ ID NO: 163191 - DNA, 1515 bp, Artificial Sequence
  derived and/or modified sequence
tgaaagaaggagcggcggcagagcagcagccggttcaacctgagcaagaaccgggaattgcagaaactccctgcattaaaggattcacctacgcaggaaagagaggagctttttatacagaagctgcgacagtgttgcgtgctatttgacttcgtttccgatccactgtctgacttaaagtttaaggaagtcaagagagcaggcctgaacgagatggtggagtacattacccacagccgcgacgtggtgactgaggcaatttaccccgaggccgtgaccatgttctctgtgaatctcttcagaacattgcccccttcatcgaaccctacgggagcggagttcgatccagaagaggatgaaccaaccctcgaagctgcgtggcctcaccttcagctggtatatgagtttttcctccgattcctggagagccctgattttcagccaaacatcgcaaagaagtacattgaccagaagtttgtgctggcactactggatctgtttgacagcgaggatccccgggaaagggattttcttaaaacaatcttacaccggatatatggtaagttcctcggcctgagggcttatatcagacggcaaatcaaccatatcttctaccgcttcatttacgaaactgagcaccacaacggcattgctgagcttctggagatcctaggatcaattatcaacggttttgccttgcctcttaaggaggagcacaagatgtttctgattcgcgttctgctacctctccataaggtcaagtcactgagcgtctaccacccacaagtgattgtcggcctcttgaaattctggccaaagacgcacagtcccaaagaggtcatgtttctcaacgaactggaggagatccttgacgtcattgagccctcagaattcagtaaggtgatggaacccctcttcaggcaactggctaaatgcgtatcgagtccccacttccaggttgcagaaagagctctgtattactggaataatgaatatatcatgtcactgatctcagacaatgcagccagggtgttgccaattatgtttccagctctgtaccggaactccaagagccattggaataagacaattcacgggttaatctataacgccttgaagctgtttatggaaatgaaccagaagctttttgacgattgtacacaacagtacaaggctgagaagcagaaaggacgatttagaatgaaagagagagaagagatgtggcagaagatcgaagaactggctcgcctaaaccctcagtatccaatgtttcgggccccgccacccctaccaccagtgtactctatggagaccgaaacacccacggctgaggatatccagttgctcaaaaggacggtagagaccgaggctgtgcagatgctcaaggacatcaaaaaagagaaagtgctcctgagaagaaaaagcgagctcccccaggatgtgtatacaattaaggctctggaagctcacaagcgggctgaagagttcctgaccgcatcccaagaggcactctag

SEQ ID NO: 163192 - DNA, 1809 bp, Artificial Sequence
  derived and/or modified sequence
atgccctacaagctgaagaaggagaaggagccccccaaggtggccaaatgcaccgccaaacctagcagcagcggtaaggatggaggtggcgaaaatacagaagaggcccaaccccagcctcagccccagccacagcctcaggcccaatctcagcctcctagtagcaataaaagacctagcaacagtaccccaccgcctacccagttgtccaagatcaagtacagtggcggtccacaaattgtcaagaaagaaagaagacagtcttcttcaaggttcaatctttccaagaaccgggagctgcagaaactgcccgctctaaaggacagtcctacacaggagcgcgaggaactctttatccagaagctaagacaatgctgcgtcttattcgacttcgtgtcggacccgcttagcgatttgaagttcaaagaagtcaagagggccggcttaaacgagatggttgagtatatcacacactcgcgggacgtagtgaccgaggccatctaccccgaagcggtaaccatgttctctgtgaacctttttcgcacccttccaccaagctcaaatcccactggagctgagttcgatcccgaagaggatgagcctaccctggaggcggcctggccacaccttcagttggtctatgagttcttcctacgattcctggagtccccagatttccagcctaacatcgccaagaagtatatagaccaaaagtttgtattggctctgcttgatctcttcgactctgaggatccgagagaaagggatttcttgaagactatccttcaccggatatatggcaagttcttgggcctgcgggcctacatccggcgccagatcaaccatatattctatcggttcatttatgaaaccgagcatcacaacggaattgcagagcttctcgaaatcttggggagcatcatcaacggcttcgcccttccgctcaaggaggaacacaagatgttcctgatccgtgttcttctgccactgcataaagtgaaaagcctgagcgtgtatcaccctcagctggcttattgtgtggtacagttccttgaaaaggaatcatccctgacagagcccgtgatcgtggggttgcttaagttctggccaaagacacatagccctaaggaggttatgttcctgaatgagctcgaggagattctggatgtgatcgagccatctgaattcagtaaggttatggagcctctgtttcggcagctggccaagtgcgtctcatcaccccattttcaggtagctgaacgtgcgctctattattggaataacgagtacatcatgtcattaatctccgacaatgctgcacgtgtgctgccaatcatgttccctgcgctgtatcgcaactccaagagccattggaacaagacaatacacgggctaatttacaatgcattaaaactgttcatggagatgaatcagaagctgtttgatgattgtacgcagcagtacaaagcagagaagcaaaagggacgtttccgaatgaaggaaagggaagaaatgtggcagaagattgaggaactagcgcgtctgaacccccaataccctatgtttcgcgcccctccccctctacccccagtctacagcatggaaacggagaccccaacggccgaggatatccagctgctgaaacggaccgtggagaccgaagccgtgcagatgctcaaagacataaaaaaggagaaggtgctcctgaggagaaagtctgaactgccacaggacgtctacactattaaagcccttgaagcacacaagagggccgaggaatttttgacagcatcccaagaggctttatag

SEQ ID NO: 163193 - DNA, 1755 bp, Artificial Sequence
  derived and/or modified sequence
atgccctacaagctgaagaaggagaaggagccccccaaggtggccaagtgcactgctaagccatcatcttccggaaaggacggtggcggagaaaatacagaagaagctcaacctcaaccccagcctcaaccgcagccgcaggcacaaagccagccgccaagctcgaacaaaaggccctccaattcaacacccccgccgacacagctgagcaaaatcaagtacagcggtgggccccagattgtcaaaaaggagcggcgccaaagttcttcccgtttcaacctgtcaaagaacagagaattgcagaaactccctgctctgaaggactcccccactcaagagcgcgaagagttattcattcagaagctccggcagtgttgcgtactgtttgacttcgtatccgaccccctgtctgaccttaagttcaaagaggtaaaaagagctgggttgaacgaaatggtggaatacatcactcatagccgtgatgttgtgacagaggccatttacccagaggctgtcacaatgtttagcgtaaatctctttcgaaccctgcctccgtcatccaacccaacaggggccgagtttgaccctgaggaggacgagcccaccctcgaagccgcctggccccacctccaactagtctacgagtttttcctgagatttctcgagtcccccgattttcagccaaatatcgcaaaaaaatatatcgaccaaaaattcgtgttggccctgttagacctttttgattctgaggaccctcgcgagcgcgattttctcaaaactatcctgcaccggatatatggtaagttcctgggacttagggcatacatcagacgacaaataaaccatatcttctataggtttatatacgagacagaacaccacaatggcatagctgaactcctagaaattttgggctccatcataaatggctttgcacttccacttaaggaggagcataaaatgtttcttatccgggtgctgctgcccctgcacaaagtcaagtcgctgtccgtatatcacccacaagtgattgtcggtttgctgaaattttggccaaagacccactcacccaaagaagttatgttcctgaatgagcttgaagaaattctggacgtgatcgaaccttccgaattcagcaaggtcatggaaccgcttttccgccagctggcaaaatgtgtttcatctccacacttccaggtggctgagagggcattgtactactggaataacgagtacatcatgtcccttattagcgacaatgccgctagagtcttgcccatcatgttcccagctctctatagaaattcaaaatcgcattggaataagaccatccatggcctgatatataacgcacttaaactcttcatggaaatgaaccagaaactattcgacgattgtacccagcaatataaagccgagaagcagaaaggccggtttcgcatgaaggagcgcgaggaaatgtggcaaaagatcgaagagcttgctcggttaaatccccagtatcctatgtttcgagcccctcccccgctgcctcctgtctactccatggaaacggaaacgccaacagctgaagatattcagctgctcaagcggacggtcgaaactgaggccgtacagatgcttaaggatattaagaaagagaaggttctactgcgaaggaagtcagaactgccccaggacgtctatactattaaagcactggaagctcataagcgtgctgaagagttcttaacagcatcacaggaagccctgtag

SEQ ID NO: 163194 - DNA, 1515 bp, Artificial Sequence
  derived and/or modified sequence
tagaagaaggaacgtaggcaaagtagtagccgcttcaatcttagtaaaaatagagagctccagaagttgcctgctctgaaagatagtcctactcaagaacgtgaggagctgtttatacagaaattacgccagtgctgcgtgctgttcgactttgtgtcagacccccttagcgatttgaaattcaaagaagttaagagggccggtctcaacgagatggtggagtatattacacactctagggacgtcgtgaccgaggcgatctacccagaggctgtaaccatgttttctgtgaacctgtttcgcacacttccccctagctctaatcccactggagctgaatttgatccagaagaagacgagcctactctcgaggcagcctggccacatcttcagctggtctacgaattcttcttaagatttctcgagagccctgattttcaaccaaacattgctaaaaagtacatcgatcagaaattcgtcctggccttgctggatctctttgattccgaagaccctcgggaaagggacttccttaagaccattttgcatcgaatatatggaaaatttctggggctcagggcctatataaggcggcagatcaaccacatcttttatagattcatatatgaaacggagcaccataatggtatagcagaactcttggaaatactggggagcattattaacgggtttgcactgccacttaaggaggagcataagatgtttctcatccgggtcctgctccccttgcacaaggtgaagtcattgagcgtctaccacccccaggtgatcgtcgggctgctcaaattctggcccaaaactcactccccgaaggaagtgatgttcctaaatgaactggaagagatcctggacgttattgagccctccgagttctccaaggtgatggaaccgctgttcaggcagttggccaaatgcgtttcctctcctcactttcaagttgccgaaagggctctctattattggaataacgaatatattatgagccttatatcagataatgctgctcgtgtgttgcctattatgttccctgctctttaccgcaatagcaagagtcactggaataaaactattcatggacttatctataacgctctcaaactgttcatggagatgaatcagaaactcttcgacgactgcactcagcagtataaagccgagaaacagaaagggaggttcaggatgaaagaaagagaagagatgtggcagaaaatcgaggagctagccagactcaaccctcagtatccaatgttccgggctcctcctccactgccccctgtctactccatggagaccgaaactcccactgctgaagacatacaactgttgaagaggacagtcgagacggaggctgtgcagatgctcaaggatataaagaaggagaaggtactgttgcgtcggaaatccgagctgcctcaagacgtgtacacaatcaaggcactcgaggcccataagcgggctgaagagtttctaacagcttctcaggaagccctgtag

SEQ ID NO: 163195 - DNA, 1809 bp, Artificial Sequence
  derived and/or modified sequence
atgccttataagctgaaaaaagagaaggagccaccaaaggtcgcaaaatgcaccgccaaacctagctcatcgggcaaagacggtggaggagagaacactgaagaagcccagccccagccacagcctcagcctcagccacaggcacagtcccagccaccatcctccaataagagaccaagcaactcaacccctccgcctacccaactgagcaaaataaagtactctggtggccctcagatcgtaaagaaagagagacgccagtccagcagcagatttaacctgagcaaaaatagggaactgcagaaactccctgctctgaaagacagccccacccaagagcgagaagagctcttcatccagaaattacgacaatgctgcgtgctgttcgatttcgtgtctgatccactgtctgacttgaaattcaaagaggtaaaacgggcaggcctaaacgaaatggtcgagtatatcacacacagccgcgatgtcgtcactgaagctatctacccagaagccgttactatgtttagtgtcaatcttttccgaactttacccccatcatctaaccccactggagctgaatttgatccagaggaagatgagcctacgctggaggctgcctggccacacctgcagctggtttatgagttcttcctgcgctttctggagtcacctgatttccagccaaatattgctaaaaagtacatagaccagaagttcgtgttggcactcctggacttgtttgattccgaagacccacgtgagagagacttcttgaaaacgattctgcaccgtatctatggcaaattcctagggcttcgcgcatacatccggaggcagatcaatcacatcttctataggttcatctatgaaacagaacaccataacggcatcgccgagctgcttgagatattaggcagcattattaacggattcgcgctccccctaaaggaagaacacaagatgtttttgataagggtgctgttgcctcttcataaggtcaagtcactgtcagtataccatccacagctcgcttattgtgtggttcagtttcttgagaaggaatcatccctaacagagcctgttatcgtggggctgttgaagttctggcccaagacccattctccgaaagaggtaatgtttttgaacgagttggaggagatcctggacgtgattgaaccctcggagttctctaaggtcatggagcccctgtttcgacagcttgccaagtgcgttagcagtccccattttcaggtcgcggagcgagccctctattactggaacaatgagtatattatgtctctgatcagtgacaatgccgctagggtgctcccaatcatgtttcccgctctctacagaaactccaagtcccactggaacaagaccatccacgggctcatatacaacgccctgaaactgtttatggagatgaaccagaagcttttcgacgattgtactcaacagtacaaagctgagaagcagaagggtcgatttaggatgaaagaacgtgaagaaatgtggcagaagattgaggaactggctcggctgaacccacagtatccaatgtttcgcgctcccccaccactgccacctgtgtatagcatggaaacggagacccccacagcagaagacattcagctgctgaagagaaccgttgaaaccgaggctgtgcagatgcttaaggatatcaaaaaggagaaagttttgctgcgaagaaaatcagaacttccccaagacgtgtatacaatcaaagcgctcgaggcacacaaacgtgctgaagaattcctgaccgcctcgcaagaggctctgtag

SEQ ID NO: 163196 - DNA, 1755 bp, Artificial Sequence
  derived and/or modified sequence
atgccatacaaattaaaaaaagagaaggaaccacccaaagtggcgaagtgcacggccaagccgtcgtcaagtggtaaggacggaggcggagagaatacagaagaggcgcagccccagccccaacctcaacctcaaccgcaagctcagagtcagccaccttcaagtaataagagacctagcaatagcacgcccccaccaacacagctgtctaagatcaagtactctggcggacctcaaattgtcaaaaaggaacgccgtcagagcagcagccgcttcaacctgagcaagaatagagagctccagaaactgcctgccctgaaagattcccctactcaggagcgggaggaactgtttatacaaaagctcaggcaatgctgcgtcttgtttgatttcgtgagcgaccccctctctgacctgaagtttaaggaggtgaagagggctggtcttaacgaaatggttgaatatattacccactcacgggatgttgtcaccgaagctatctatcccgaagcggtgacgatgttctccgttaacctattcagaactctgcctccctcgagtaatcctaccggtgcggagtttgacccagaggaagacgagcccacactcgaggcagcttggccccacctgcagcttgtctacgaattctttctgagattcctcgagtccccagacttccagcctaatatcgccaagaaatatattgaccagaaatttgtcctcgcccttctggatctgtttgattccgaagatcctagagagcgcgactttctgaaaacgatcctgcaccgcatctacgggaagtttttgggactgagagcatacattcgcaggcaaattaaccatatcttctacagattcatctacgaaacagagcatcataatggcatcgctgaactgctcgaaatcctaggttccatcatcaatggctttgcactccctcttaaagaagagcataagatgttcctaatccgggtcctcctgcctttgcacaaggtcaagtctttatctgtgtatcaccctcaggtgattgtgggcctgcttaagttttggcctaaaacgcatagccccaaagaggttatgtttttgaacgagctggaggagatactagacgtgatagagccgtctgagttcagtaaagtgatggagcccctgtttcggcagttagctaagtgcgtgtccagtccacacttccaagtggccgagagagcattgtactattggaacaatgagtatataatgtccctgatctcggataatgcagcaagggtgttgcccatcatgtttcctgccctttacaggaactcaaaatctcattggaacaagacgattcacggcctgatatataacgccctcaagctctttatggaaatgaaccagaagctcttcgatgactgcacccagcagtacaaagcagaaaagcagaaaggtcgcttcagaatgaaggagcgggaggaaatgtggcagaagatcgaagagctggcaagattgaatcctcagtatcccatgttccgagctccaccgccattgcctcccgtttatagcatggagacagaaacacccaccgctgaagacattcaactcttgaaacgaaccgtggaaacagaagcggtgcaaatgctgaaagatattaaaaaggagaaagtgctccttcgcagaaaaagcgagctgcctcaggatgtttacacaataaaggcactggaagcccacaagcgcgcagaagaatttctgaccgccagccaggaggctctctag

SEQ ID NO: 163197 - DNA, 2567 bp, Artificial Sequence
  derived and/or modified sequence
caagaaggagcgacggcaaagctcctcccgcttcaacctcagcaagaatcgggagctgcagaagcttcctgccctgaaagattcgccaacccaggagcgggaggagctgtttatccagaagctacgccagtgctgtgtcctctttgacttcgtgtcagacccactcagtgacctcaaattcaaggaggtgaagcgggcaggactcaacgagatggtggagtacatcacccatagccgtgatgttgtcactgaggccatttaccctgaggctgtcaccatgttttcagtgaacctcttccggacgctgccaccttcatcgaatcccacaggggctgagtttgacccagaggaagatgagcccaccctggaagctgcttggccacatctccagctcgtgtatgagttcttcttacgtttccttgagtctcctgatttccagccaaacatagccaagaagtacatcgaccagaagtttgtacttgctctcctagacctatttgacagtgaggatcctcgagagcgggacttcctcaagaccattttgcatcgcatctatggcaagtttttggggctccgggcttatatccgtaggcagatcaaccacatcttctacaggttcatctacgagacggagcatcacaacgggattgctgagctcctggagatcctgggcagcatcatcaatggctttgccctgccccttaaagaagagcacaagatgttcctcatccgtgtcctacttccccttcacaaggtcaagtccctgagtgtctaccaccctcaggtaattgtgggacttctcaagttttggcccaagacccacagccccaaggaggtgatgttcttgaatgagctggaggagattctggacgtcattgaaccttctgagttcagcaaagtgatggaacccctcttccgccagctggccaagtgtgtctctagcccccatttccaggtggcagagcgtgctctctattactggaacaatgagtacatcatgagcctgataagtgacaatgctgcccgagtcctccccatcatgttccctgcactctacaggaactccaagagccactggaacaagacaatccatggactgatctataatgccctgaagttgtttatggaaatgaatcagaagctgtttgatgactgcacacaacaatacaaggcagagaagcagaagggccggttccgaatgaaggaaagggaagagatgtggcaaaaaatcgaggagctggcccggcttaatccccagtatcccatgttccgagcccctccaccactgccccctgtgtactcgatggagacagagacccccacagctgaggacatccagcttctgaagaggactgtggagactgaggctgttcagatgctaaaagacatcaagaaggagaaagtgctgctgcggaggaagtcggagctgccccaggacgtgtacaccatcaaggcactggaggcgcacaagcgggcggaagagttcctaactgccagccaggaggctctctgacccctcacgttcctaccacagggccacagcccacacagccctgggacactgccctggccctccatactctgctccctactggctgtcttgggggaaggcagcgcctctctagctactcaagggagggggatgtgggcacttgaagcagggacacccacagaatggtccctcttctccccaaaaggtgttcatgcctccctgtggctagtacaggctgagcactaagatgcttagtgctcagacaacctggggatgcctgtcccctacctgctcctcacccacagctacctgaggctgctctgagaagtacacacaggaatacatacgctcctctattcttcccttcatcctcatttgaacgccaggtatctcccctcctctctctcccctgcagaggcatgtagggaacagcaggagattattctcaccaaagttatgtcaagccccattggtcccagagtagctgaagggaagccaacccccctgcagcacaaataggccccccagtcccagccgtgtgctggcagatagggttgtattatttcttcttaccccatgcctgaccaagggaggtcaaaaggagaaaagtataggctgtggacaataactgatgaatatagggcccagatggaccaagtggggccggggagggatgaataaacaccctaccccgtgccctgtctttggtgagcagcagccctggggtcacagacatggaagggaccaccctggggctgactgcttttctgtgctgttggttcccaaaactagaaagaaggaagcagggagcggtgccccaagcatggctcctgccaacacctatttatttccttgtttgtgctatgctgggcaggccttctcttgtcccttataggtaccttggaggggccaggggctgaggaaggccggacccaggttccaggggcgcaggcagtgcggcttttggctgtgtacatagggtgctttattctccacagagtgatacatgctaaggtgggttgggcttggaccgatgtccccatatgtacagaactgaataaagtgggtctctgag

SEQ ID NO: 163198 - DNA, 3044 bp, Artificial Sequence
  derived and/or modified sequence
ggcgcctggttgtcaggcagttttgtaggagttcgggccaattggaggcgcaggcaccgctcgacccgggcgcagcgcgcaggcggtggcgaagagacgccgagcgggccgagtgcggccgagcaaagccggagccggagcggggccgcaggagacgggccgggtccggacgggccgagatgccctataaactgaaaaaggagaaggagccccccaaggttgccaaatgcacagccaagcctagcagctcgggcaaggatggtggaggcgagaacactgaggaggcccagccgcagccccagccccagccccagccccaagcccagtctcagccaccgtcatccaacaagcgtcccagcaatagcacgccgccccccacgcagctcagcaaaatcaagtactcaggggggccccagattgtcaagaaggagcgacggcaaagctcctcccgcttcaacctcagcaagaatcgggagctgcagaagcttcctgccctgaaagattcgccaacccaggagcgggaggagctgtttatccagaagctacgccagtgctgtgtcctctttgacttcgtgtcagacccactcagtgacctcaaattcaaggaggtgaagcgggcaggactcaacgagatggtggagtacatcacccatagccgtgatgttgtcactgaggccatttaccctgaggctgtcaccatgttttcagtgaacctcttccggacgctgccaccttcatcgaatcccacaggggctgagtttgacccagaggaagatgagcccaccctggaagctgcttggccacatctccagctcgtgtatgagttcttcttacgtttccttgagtctcctgatttccagccaaacatagccaagaagtacatcgaccagaagtttgtacttgctctcctagacctatttgacagtgaggatcctcgagagcgggacttcctcaagaccattttgcatcgcatctatggcaagtttttggggctccgggcttatatccgtaggcagatcaaccacatcttctacaggttcatctacgagacggagcatcacaacgggattgctgagctcctggagatcctgggcagcatcatcaatggctttgccctgccccttaaagaagagcacaagatgttcctcatccgtgtcctacttccccttcacaaggtcaagtccctgagtgtctaccaccctcagctggcatactgtgtggtacaattcctggagaaggagagcagtctgactgagccggtaattgtgggacttctcaagttttggcccaagacccacagccccaaggaggtgatgttcttgaatgagctggaggagattctggacgtcattgaaccttctgagttcagcaaagtgatggaacccctcttccgccagctggccaagtgtgtctctagcccccatttccaggtggcagagcgtgctctctattactggaacaatgagtacatcatgagcctgataagtgacaatgctgcccgagtcctccccatcatgttccctgcactctacaggaactccaagagccactggaacaagacaatccatggactgatctataatgccctgaagttgtttatggaaatgaatcagaagctgtttgatgactgcacacaacaatacaaggcagagaagcagaagggccggttccgaatgaaggaaagggaagagatgtggcaaaaaatcgaggagctggcccggcttaatccccagtatcccatgttccgagcccctccaccactgccccctgtgtactcgatggagacagagacccccacagctgaggacatccagcttctgaagaggactgtggagactgaggctgttcagatgctaaaagacatcaagaaggagaaagtgctgctgcggaggaagtcggagctgccccaggacgtgtacaccatcaaggcactggaggcgcacaagcgggcggaagagttcctaactgccagccaggaggctctctgacccctcacgttcctaccacagggccacagcccacacagccctgggacactgccctggccctccatactctgctccctactggctgtcttgggggaaggcagcgcctctctagctactcaagggagggggatgtgggcacttgaagcagggacacccacagaatggtccctcttctccccaaaaggtgttcatgcctccctgtggctagtacaggctgagcactaagatgcttagtgctcagacaacctggggatgcctgtcccctacctgctcctcacccacagctacctgaggctgctctgagaagtacacacaggaatacatacgctcctctattcttcccttcatcctcatttgaacgccaggtatctcccctcctctctctcccctgcagaggcatgtagggaacagcaggagattattctcaccaaagttatgtcaagccccattggtcccagagtagctgaagggaagccaacccccctgcagcacaaataggccccccagtcccagccgtgtgctggcagatagggttgtattatttcttcttaccccatgcctgaccaagggaggtcaaaaggagaaaagtataggctgtggacaataactgatgaatatagggcccagatggaccaagtggggccggggagggatgaataaacaccctaccccgtgccctgtctttggtgagcagcagccctggggtcacagacatggaagggaccaccctggggctgactgcttttctgtgctgttggttcccaaaactagaaagaaggaagcagggagcggtgccccaagcatggctcctgccaacacctatttatttccttgtttgtgctatgctgggcaggccttctcttgtcccttataggtaccttggaggggccaggggctgaggaaggccggacccaggttccaggggcgcaggcagtgcggcttttggctgtgtacatagggtgctttattctccacagagtgatacatgctaaggtgggttgggcttggaccgatgtccccatatgtacagaactgaataaagtgggtctctgagaa

SEQ ID NO: 163199 - DNA, 2893 bp, Artificial Sequence
  derived and/or modified sequence
gagacgccgagcgggccgagtgcggccgagcaaagccggagccggagcggggccgcaggagacgggccgggtccggacgggccgagatgccctataaactgaaaaaggagaaggagccccccaaggttgccaaatgcacagccaagcctagcagctcgggcaaggatggtggaggcgagaacactgaggaggcccagccgcagccccagccccagccccagccccaagcccagtctcagccaccgtcatccaacaagcgtcccagcaatagcacgccgccccccacgcagctcagcaaaatcaagtactcaggggggccccagattgtcaagaaggagcgacggcaaagctcctcccgcttcaacctcagcaagaatcgggagctgcagaagcttcctgccctgaaagattcgccaacccaggagcgggaggagctgtttatccagaagctacgccagtgctgtgtcctctttgacttcgtgtcagacccactcagtgacctcaaattcaaggaggtgaagcgggcaggactcaacgagatggtggagtacatcacccatagccgtgatgttgtcactgaggccatttaccctgaggctgtcaccatgttttcagtgaacctcttccggacgctgccaccttcatcgaatcccacaggggctgagtttgacccagaggaagatgagcccaccctggaagctgcttggccacatctccagctcgtgtatgagttcttcttacgtttccttgagtctcctgatttccagccaaacatagccaagaagtacatcgaccagaagtttgtacttgctctcctagacctatttgacagtgaggatcctcgagagcgggacttcctcaagaccattttgcatcgcatctatggcaagtttttggggctccgggcttatatccgtaggcagatcaaccacatcttctacaggttcatctacgagacggagcatcacaacgggattgctgagctcctggagatcctgggcagcatcatcaatggctttgccctgccccttaaagaagagcacaagatgttcctcatccgtgtcctacttccccttcacaaggtcaagtccctgagtgtctaccaccctcaggtaattgtgggacttctcaagttttggcccaagacccacagccccaaggaggtgatgttcttgaatgagctggaggagattctggacgtcattgaaccttctgagttcagcaaagtgatggaacccctcttccgccagctggccaagtgtgtctctagcccccatttccaggtggcagagcgtgctctctattactggaacaatgagtacatcatgagcctgataagtgacaatgctgcccgagtcctccccatcatgttccctgcactctacaggaactccaagagccactggaacaagacaatccatggactgatctataatgccctgaagttgtttatggaaatgaatcagaagctgtttgatgactgcacacaacaatacaaggcagagaagcagaagggccggttccgaatgaaggaaagggaagagatgtggcaaaaaatcgaggagctggcccggcttaatccccagtatcccatgttccgagcccctccaccactgccccctgtgtactcgatggagacagagacccccacagctgaggacatccagcttctgaagaggactgtggagactgaggctgttcagatgctaaaagacatcaagaaggagaaagtgctgctgcggaggaagtcggagctgccccaggacgtgtacaccatcaaggcactggaggcgcacaagcgggcggaagagttcctaactgccagccaggaggctctctgacccctcacgttcctaccacagggccacagcccacacagccctgggacactgccctggccctccatactctgctccctactggctgtcttgggggaaggcagcgcctctctagctactcaagggagggggatgtgggcacttgaagcagggacacccacagaatggtccctcttctccccaaaaggtgttcatgcctccctgtggctagtacaggctgagcactaagatgcttagtgctcagacaacctggggatgcctgtcccctacctgctcctcacccacagctacctgaggctgctctgagaagtacacacaggaatacatacgctcctctattcttcccttcatcctcatttgaacgccaggtatctcccctcctctctctcccctgcagaggcatgtagggaacagcaggagattattctcaccaaagttatgtcaagccccattggtcccagagtagctgaagggaagccaacccccctgcagcacaaataggccccccagtcccagccgtgtgctggcagatagggttgtattatttcttcttaccccatgcctgaccaagggaggtcaaaaggagaaaagtataggctgtggacaataactgatgaatatagggcccagatggaccaagtggggccggggagggatgaataaacaccctaccccgtgccctgtctttggtgagcagcagccctggggtcacagacatggaagggaccaccctggggctgactgcttttctgtgctgttggttcccaaaactagaaagaaggaagcagggagcggtgccccaagcatggctcctgccaacacctatttatttccttgtttgtgctatgctgggcaggccttctcttgtcccttataggtaccttggaggggccaggggctgaggaaggccggacccaggttccaggggcgcaggcagtgcggcttttggctgtgtacatagggtgctttattctccacagagtgatacatgctaaggtgggttgggcttggaccgatgtccccatatgtacagaactgaataaagtgggtctctg

SEQ ID NO: 163200 - DNA, 1515 bp, Artificial Sequence
  derived and/or modified sequence
tgaaagaaggagagaagacagagcagcagcagattcaacctgagcaagaacagagagctgcagaagctgcccgccctgaaggacagccccacccaggagagagaggagctgttcatccagaagctgagacagtgctgcgtgctgttcgacttcgtgagcgaccccctgagcgacctgaagttcaaggaggtgaagagagccggcctgaacgagatggtggagtacatcacccacagcagagacgtggtgaccgaggccatctaccccgaggccgtgaccatgttcagcgtgaacctgttcagaaccctgccccccagcagcaaccccaccggcgccgagttcgaccccgaggaggacgagcccaccctggaggccgcctggccccacctgcagctggtgtacgagttcttcctgagattcctggagagccccgacttccagcccaacatcgccaagaagtacatcgaccagaagttcgtgctggccctgctggacctgttcgacagcgaggaccccagagagagagacttcctgaagaccatcctgcacagaatctacggcaagttcctgggcctgagagcctacatcagaagacagatcaaccacatcttctacagattcatctacgagaccgagcaccacaacggcatcgccgagctgctggagatcctgggcagcatcatcaacggcttcgccctgcccctgaaggaggagcacaagatgttcctgatcagagtgctgctgcccctgcacaaggtgaagagcctgagcgtgtaccacccccaggtgatcgtgggcctgctgaagttctggcccaagacccacagccccaaggaggtgatgttcctgaacgagctggaggagatcctggacgtgatcgagcccagcgagttcagcaaggtgatggagcccctgttcagacagctggccaagtgcgtgagcagcccccacttccaggtggccgagagagccctgtactactggaacaacgagtacatcatgagcctgatcagcgacaacgccgccagagtgctgcccatcatgttccccgccctgtacagaaacagcaagagccactggaacaagaccatccacggcctgatctacaacgccctgaagctgttcatggagatgaaccagaagctgttcgacgactgcacccagcagtacaaggccgagaagcagaagggcagattcagaatgaaggagagagaggagatgtggcagaagatcgaggagctggccagactgaacccccagtaccccatgttcagagcccccccccccctgccccccgtgtacagcatggagaccgagacccccaccgccgaggacatccagctgctgaagagaaccgtggagaccgaggccgtgcagatgctgaaggacatcaagaaggagaaggtgctgctgagaagaaagagcgagctgccccaggacgtgtacaccatcaaggccctggaggcccacaagagagccgaggagttcctgaccgccagccaggaggccctgtag

SEQ ID NO: 163201 - DNA, 1809 bp, Artificial Sequence
  derived and/or modified sequence
atgccctacaagctgaagaaggagaaggagccccccaaggtggccaagtgcaccgccaagcccagcagcagcggcaaggacggcggcggcgagaacaccgaggaggcccagccccagccccagccccagccccagccccaggcccagagccagccccccagcagcaacaagagacccagcaacagcacccccccccccacccagctgagcaagatcaagtacagcggcggcccccagatcgtgaagaaggagagaagacagagcagcagcagattcaacctgagcaagaacagagagctgcagaagctgcccgccctgaaggacagccccacccaggagagagaggagctgttcatccagaagctgagacagtgctgcgtgctgttcgacttcgtgagcgaccccctgagcgacctgaagttcaaggaggtgaagagagccggcctgaacgagatggtggagtacatcacccacagcagagacgtggtgaccgaggccatctaccccgaggccgtgaccatgttcagcgtgaacctgttcagaaccctgccccccagcagcaaccccaccggcgccgagttcgaccccgaggaggacgagcccaccctggaggccgcctggccccacctgcagctggtgtacgagttcttcctgagattcctggagagccccgacttccagcccaacatcgccaagaagtacatcgaccagaagttcgtgctggccctgctggacctgttcgacagcgaggaccccagagagagagacttcctgaagaccatcctgcacagaatctacggcaagttcctgggcctgagagcctacatcagaagacagatcaaccacatcttctacagattcatctacgagaccgagcaccacaacggcatcgccgagctgctggagatcctgggcagcatcatcaacggcttcgccctgcccctgaaggaggagcacaagatgttcctgatcagagtgctgctgcccctgcacaaggtgaagagcctgagcgtgtaccacccccagctggcctactgcgtggtgcagttcctggagaaggagagcagcctgaccgagcccgtgatcgtgggcctgctgaagttctggcccaagacccacagccccaaggaggtgatgttcctgaacgagctggaggagatcctggacgtgatcgagcccagcgagttcagcaaggtgatggagcccctgttcagacagctggccaagtgcgtgagcagcccccacttccaggtggccgagagagccctgtactactggaacaacgagtacatcatgagcctgatcagcgacaacgccgccagagtgctgcccatcatgttccccgccctgtacagaaacagcaagagccactggaacaagaccatccacggcctgatctacaacgccctgaagctgttcatggagatgaaccagaagctgttcgacgactgcacccagcagtacaaggccgagaagcagaagggcagattcagaatgaaggagagagaggagatgtggcagaagatcgaggagctggccagactgaacccccagtaccccatgttcagagcccccccccccctgccccccgtgtacagcatggagaccgagacccccaccgccgaggacatccagctgctgaagagaaccgtggagaccgaggccgtgcagatgctgaaggacatcaagaaggagaaggtgctgctgagaagaaagagcgagctgccccaggacgtgtacaccatcaaggccctggaggcccacaagagagccgaggagttcctgaccgccagccaggaggccctgtag

SEQ ID NO: 163202 - DNA, 1755 bp, Artificial Sequence
  derived and/or modified sequence
atgccctacaagctgaagaaggagaaggagccccccaaggtggccaagtgcaccgccaagcccagcagcagcggcaaggacggcggcggcgagaacaccgaggaggcccagccccagccccagccccagccccagccccaggcccagagccagccccccagcagcaacaagagacccagcaacagcacccccccccccacccagctgagcaagatcaagtacagcggcggcccccagatcgtgaagaaggagagaagacagagcagcagcagattcaacctgagcaagaacagagagctgcagaagctgcccgccctgaaggacagccccacccaggagagagaggagctgttcatccagaagctgagacagtgctgcgtgctgttcgacttcgtgagcgaccccctgagcgacctgaagttcaaggaggtgaagagagccggcctgaacgagatggtggagtacatcacccacagcagagacgtggtgaccgaggccatctaccccgaggccgtgaccatgttcagcgtgaacctgttcagaaccctgccccccagcagcaaccccaccggcgccgagttcgaccccgaggaggacgagcccaccctggaggccgcctggccccacctgcagctggtgtacgagttcttcctgagattcctggagagccccgacttccagcccaacatcgccaagaagtacatcgaccagaagttcgtgctggccctgctggacctgttcgacagcgaggaccccagagagagagacttcctgaagaccatcctgcacagaatctacggcaagttcctgggcctgagagcctacatcagaagacagatcaaccacatcttctacagattcatctacgagaccgagcaccacaacggcatcgccgagctgctggagatcctgggcagcatcatcaacggcttcgccctgcccctgaaggaggagcacaagatgttcctgatcagagtgctgctgcccctgcacaaggtgaagagcctgagcgtgtaccacccccaggtgatcgtgggcctgctgaagttctggcccaagacccacagccccaaggaggtgatgttcctgaacgagctggaggagatcctggacgtgatcgagcccagcgagttcagcaaggtgatggagcccctgttcagacagctggccaagtgcgtgagcagcccccacttccaggtggccgagagagccctgtactactggaacaacgagtacatcatgagcctgatcagcgacaacgccgccagagtgctgcccatcatgttccccgccctgtacagaaacagcaagagccactggaacaagaccatccacggcctgatctacaacgccctgaagctgttcatggagatgaaccagaagctgttcgacgactgcacccagcagtacaaggccgagaagcagaagggcagattcagaatgaaggagagagaggagatgtggcagaagatcgaggagctggccagactgaacccccagtaccccatgttcagagcccccccccccctgccccccgtgtacagcatggagaccgagacccccaccgccgaggacatccagctgctgaagagaaccgtggagaccgaggccgtgcagatgctgaaggacatcaagaaggagaaggtgctgctgagaagaaagagcgagctgccccaggacgtgtacaccatcaaggccctggaggcccacaagagagccgaggagttcctgaccgccagccaggaggccctgtag

SEQ ID NO: 163203 - protein, 467 aa, Artificial Sequence
  derived and/or modified sequence
MSSAPTTPPSVDKVDGFSRKSVRKARQKRSQSSSQFRSQGKPIELTPLPLLKDVPSSEQPELFLKKLQQCCVIFDFMDTLSDLKMKEYKRSTLNELVDYITISRGCLTEQTYPEVVRMVSCNIFRTLPPSDSNEFDPEEDEPTLEASWPHLQLVYEFFIRFLESQEFQPSIAKKYIDQKFVLQLLELFDSEDPRERDYLKTVLHRIYGKFLGLRAFIRKQINNIFLRFVYETEHFNGVAELLEILGSIINGFALPLKAEHKQFLVKVLIPLHTVRSLSLFHAQLAYCIVQFLEKDPSLTEPVIRGLMKFWPKTCSQKEVMFLGELEEILDVIEPSQFVKIQEPLFKQIAKCVSSPHFQVAERALYYWNNEYIMSLIEENSNVILPIMFSSLYRISKEHWNPAIVALVYNVLKAFMEMNSTMFDELTATYKSDRQREKKKEKEREELWKKLEDLELKRGLRRDGIIPT

SEQ ID NO: 163204 - protein, 391 aa, Artificial Sequence
  derived and/or modified sequence
MDTLSDLKMKEYKRSTLNELVDYITISRGCLTEQTYPEVVRMVSCNIFRTLPPSDSNEFDPEEDEPTLEASWPHLQLVYEFFIRFLESQEFQPSIAKKYIDQKFVLQLLELFDSEDPRERDYLKTVLHRIYGKFLGLRAFIRKQINNIFLRFVYETEHFNGVAELLEILGSIINGFALPLKAEHKQFLVKVLIPLHTVRSLSLFHAQLAYCIVQFLEKDPSLTEPVIRGLMKFWPKTCSQKEVMFLGELEEILDVIEPSQFVKIQEPLFKQIAKCVSSPHFQVAERALYYWNNEYIMSLIEENSNVILPIMFSSLYRISKEHWNPAIVALVYNVLKAFMEMNSTMFDELTATYKSDRQREKKKEKEREELWKKLEDLELKRGLRRDGIIPT

SEQ ID NO: 163205 - DNA, 1404 bp, Artificial Sequence
  derived and/or modified sequence
atgtccagcgcccccaccaccccgccctcagttgacaaggtggatggcttctctcggaaaagcgtccgcaaggcacggcaaaagaggagccagtcctctagccagtttcgaagccaggggaaacccattgaactgacacccctgccacttctcaaggacgttccttccagcgagcagcccgagctttttctgaaaaagctccagcaatgctgtgtaatctttgacttcatggatacgctgtcagatctgaagatgaaggagtataagagaagcaccttgaacgaactagtggattatattactatctctcgcggatgtctcactgaacagacttacccggaagtcgtcaggatggttagttgcaatatattccgcacattgcctccgtccgacagcaatgaatttgaccccgaggaggacgagccaaccctggaggccagctggccacacctccaactggtatacgagttcttcattcgcttcctggagagtcaagaatttcaaccttctatcgccaagaagtacattgaccaaaagtttgtgctgcagcttctggaactctttgatagtgaggacccacgagagcgcgactacctgaaaactgttctgcatagaatctacggaaaattcctaggtctgcgagcattcattcggaaacagatcaacaacatcttcctgcggttcgtgtacgagactgaacatttcaacggggtggcagagctcctggagatcctcggaagcatcatcaatgggttcgctctgcccctgaaggcagagcataagcagttcctggtaaaggtgcttattccactccacacagtacgttcactgtccctgttccacgcccagttggcctactgcatagttcaatttctggaaaaagacccgtccctcacggagcctgtgatcagaggtttaatgaaattctggcctaagacttgtagtcagaaagaagtcatgttccttggcgagctagaggagattctggatgttattgaaccatctcagtttgtgaagatccaggagcctctattcaaacaaatagcgaaatgtgtttcatccccacacttccaggttgccgaacgggcactctattattggaacaacgagtatatcatgagcctcattgaagaaaactcaaatgtgatcttgcccattatgttcagcagcctgtacagaatatctaaggagcattggaatccagcaattgtggcgctggtatacaatgtcctcaaggcttttatggagatgaattccactatgttcgacgaactaacggctacttataagtcagatcgccagagggagaaaaaaaaggagaaagagcgggaggaattatggaagaagttggaagatctagagctaaaacgggggctgcgtagagacggtatcatccctacctag

SEQ ID NO: 163206 - DNA, 1404 bp, Artificial Sequence
  derived and/or modified sequence
atgagcagcgcccccaccaccccacccagcgtggacaaggtggatggcttcagcaggaagtctgtgaggaaggcccggcagaagaggagccagagcagcagccagttccgcagccagggcaagcccatcgagctgacccccctgcccctgctgaaggatgtgcccagcagcgagcagcctgagctgttcctgaagaagctgcagcagtgctgcgtcatctttgacttcatggacaccctgagtgacctgaagatgaaggagtacaagaggagcaccctgaatgagctggtggactacatcaccatcagccggggctgcctgacagagcagacctacccagaggtggtgaggatggtgtcctgcaacatcttccgcaccctgccccccagcgacagcaatgaatttgatcctgaagaagatgagcccaccctggaggcctcctggccccacctgcagctggtgtatgagttcttcatccgcttcctggagagccaggagttccagcccagcatcgccaagaagtacatcgaccagaagtttgtgctgcagctgctggagctgtttgacagcgaggacccccgggagcgggactacctgaagacagtgctgcaccgcatctacggcaagttcctgggcctgcgggccttcatcaggaagcagatcaacaacatcttcctgcgctttgtgtatgaaacagagcacttcaacggggtggccgagctgctggagatcctgggcagcatcatcaatggatttgccctgcccctgaaggccgagcacaagcagttcctggtgaaggtgctgatccccctgcacacagtgcgcagcctgagcctcttccacgcccagctggcctactgcatcgtgcagttcctggagaaggaccccagcctgacagagcctgtgatccggggcctgatgaagttctggcccaagacctgcagccagaaggaggtgatgttcctgggggagctggaggagatcctggatgtgattgagcccagccagtttgtgaagatccaggagcccctcttcaagcagatcgccaagtgtgtgagcagcccccacttccaggtggccgagcgggccctgtactactggaacaatgagtacatcatgagcctcatcgaggagaacagcaatgtcatcctgcccatcatgttcagcagcctgtaccgcatcagcaaggagcactggaacccagccatcgtggccctggtgtacaacgtgctgaaggccttcatggagatgaacagcaccatgtttgatgagctgacagccacctacaagagtgaccggcagcgggagaagaagaaggagaaggagcgggaggagctgtggaagaagctggaggacctggagctgaagaggggcctgcggagagatggcatcatccccacctag

SEQ ID NO: 163207 - DNA, 1404 bp, Artificial Sequence
  derived and/or modified sequence
atgagcagcgcccccaccaccccccccagcgtggacaaggtggacggattctctaggaagtctgttagaaaagcccgccagaaaagaagccagtcttcatcacaattccggagccaaggtaaaccaatcgagcttacccccttaccgcttctgaaggacgtcccaagttctgagcagcctgaactgttcctaaagaagctccaacaatgctgtgtcatcttcgatttcatggacacgctctccgacctgaaaatgaaagagtacaagagatctaccctgaatgagttagtggactacattaccatcagccgcggctgcttgacagagcaaacatatccagaggtcgtccgtatggtatcatgcaatatctttcggactctacccccgagcgacagtaacgagtttgaccctgaagaggacgagccaaccctcgaggcctcatggccacacctgcagctggtctacgaattcttcatacggtttctggaaagccaggagttccaaccttccattgccaagaaatatatcgatcagaagttcgtccttcagctcttagagctgtttgattctgaggacccacgggagcgagattatctcaagacagtgctgcacagaatttatgggaagtttcttggcctcagggccttcataagaaaacaaattaataacatttttctcaggtttgtgtatgaaaccgagcactttaatggagtagctgagttacttgaaatcctgggatccatcattaatggctttgctctgcctcttaaggcggaacataaacagtttctggttaaagtgctcatcccacttcatactgtgcgttcactttcactgtttcatgctcagctggcgtactgtatcgtgcaattcctcgagaaggatccttcactgacagagccagtcatcaggggccttatgaagttctggccaaagacttgctcgcagaaagaggttatgttcttgggagagcttgaagagattctagacgtgatcgaaccctcacagttcgtaaagatccaggagccattgtttaaacagatcgccaaatgtgtctcatcccctcacttccaagtggcggagcgagctctgtactactggaacaacgagtacatcatgtctttgattgaggaaaactctaatgtgatccttcccatcatgttctcctctctctatagaatatcaaaagaacactggaatccagccatagtggcactagtgtataatgtcctgaaagccttcatggagatgaactctacaatgttcgacgaactgaccgccacctacaagtctgaccggcaacgtgagaaaaaaaaagagaaagaaagagaagaactctggaagaaactggaggacctggaactgaaaaggggcctgcgccgtgacggaatcattcctacttag

SEQ ID NO: 163208 - DNA, 1404 bp, Artificial Sequence
  derived and/or modified sequence
atgtcatcggcaccaacgaccccaccgtcggtggataaagtggatgggttctcccgaaagagcgtccgcaaggccagacagaaacggtctcaatcctcctcccaattccgcagccagggcaagcccatcgagctcactcctcttcctctcttaaaagacgttccatccagcgagcaacctgaactgtttctaaagaaactgcaacagtgttgtgttatttttgattttatggacactctgagcgacctgaaaatgaaggaatacaagaggtctacccttaacgagcttgtggattatataacaattagcagggggtgtctgacagagcaaacgtaccctgaggtcgtccggatggttagttgtaatatctttcggacactgccaccatccgatagcaatgaatttgatcctgaggaagatgaacctaccctggaagcatcttggcctcacctccaactggtctatgagtttttcatccggtttctggagtcgcaagagtttcaaccatctattgccaagaagtacattgatcagaaatttgtcctccagctgctggaactctttgattccgaggatccaagagaacgtgactatctcaagacggtgttgcatcgtatttatgggaagttcctcggcctgagggcctttattagaaaacagattaataacatctttctgcgcttcgtgtacgagactgaacattttaatggcgtggctgaacttctagaaatcctgggtagtatcataaatggattcgctctaccactcaaggcagaacataagcaattcctggtcaaggttctgatccctttgcatacggtacggagcctctcactgttccatgcccagctagcatattgcatcgtgcagttcctggaaaaggatcccagcctcaccgagcccgtgatccgcggtctgatgaagttttggcccaagacttgttcacaaaaggaggtgatgtttctgggagagctggaagagatattagatgtcattgagccttcacaattcgtgaagattcaggagccactattcaagcagatagcgaaatgcgtcagttccccccacttccaggtcgccgaacgcgctctttattactggaacaacgagtacatcatgtcccttatcgaagagaacagtaatgttatcctgcctatcatgtttagtagcctctaccgcatttctaaagagcattggaatcctgcaatagttgcacttgtctataacgtattaaaagcattcatggaaatgaatagcacgatgttcgacgaacttaccgcaacctacaagagcgatcggcaaagagagaaaaagaaggagaaggaacgcgaggagttgtggaaaaagctggaagaccttgagctgaagaggggacttcgtcgagatggcataattcccacctag

SEQ ID NO: 163209 - DNA, 6659 bp, Artificial Sequence
  derived and/or modified sequence
ggccagaaggttcggttgcgcgtgtgccatggactcagccgcccggtgatattgacaataggagagagaaaggggcattgactgggacccaccgcgggtagcgaaaggtggctctggcagcggcggctccagctcctgcggctcctcctccttattctgtccccttctcttgctgccgctgcagatccagtcttcctccctcccttccccccctccccacgtcgtcgccgccgccgccgggtccggggcaacgagctgaggcgccgcccgccaggaatgtgagcgaggagccaccggcggagccgcaacggggtcggtgccgatttgatgggacgggcccgcgggggaggatcgtgaggccgccgccgccaccggaacgctgaggttcgggtccggccgtgaggcctagaggctccgccgccgcggaaccggagggaccccgtaccggacagccgtcgccccaggctccccgcagctgcccggacctccccctgcacgtcccggtcccgccgcccgcccccgctgcggccacctcgcccgtctcccgcccctccaagccacagatcatctttggattcttccccagaagcttcaagtagggatatgtcctcagcaccaactactcctccatcagtggataaagtagacggattttctcggaagtccgtcagaaaagccagacagaagaggtcgcaaagttcctcacagtttaggtctcaaggcaagcctattgagttaacacctctgccgctgctaaaagacgttccatcctcagagcagcctgaactgttcctaaagaaacttcagcagtgctgtgtcatttttgacttcatggacacgctatctgatcttaaaatgaaagaatacaagcgctccactcttaatgaactggtggactacattacaataagcagaggctgtttgacagagcagacttaccctgaagtagttagaatggtatcttgcaatatattcagaactctccctcctagtgacagcaatgaatttgatccagaagaagatgaacctacccttgaggcatcgtggccacacttacagcttgtatatgaatttttcatacgatttttggaaagccaagaattccaacccagcattgccaaaaaatatatagatcagaaatttgtattacagcttctggagctatttgacagcgaagaccctcgggaacgggactacttaaaaacagtcttacacagaatttatggcaagtttcttggtcttagagcatttatccgaaaacagattaacaatatttttctaaggtttgtttatgaaacagaacacttcaatggtgtagctgaactgctggaaatattaggaagtattatcaatggctttgctttacctcttaaggcagaacacaaacagtttctggtgaaagtattgatccctttacacactgtcaggagcttatcactcttccatgcacagctggcatattgtatagtacagtttctggagaaagatccttcactcacagaaccagttattagggggttaatgaaattttggcctaaaacatgtagtcaaaaagaggtcatgttccttggggaactggaagaaatattggatgtgattgaaccttcacaatttgttaaaatccaagaacctttgtttaaacaaatcgccaagtgtgtatctagcccccattttcaggtggcagaaagagcactctattattggaataatgaatacatcatgagtttgatagaagaaaactctaacgtcatccttcccatcatgttttccagcctttataggatttcaaaagaacattggaatccggctattgtggcgttggtgtacaatgtgttgaaggcatttatggaaatgaacagcaccatgtttgacgagctgacagccacatacaagtcagatcgtcagcgtgagaaaaagaaagaaaaggagcgtgaagaattgtggaaaaaattggaggatctggagttaaagagaggtcttagacgtgatggaataattccaacttaacaaaaacaatgacaacaacattactaacctgtggagtcacacgtttatgtagtagaagatggagcaacagttttctgtattgtgcaactttacagtagatttcacctttgtttcattattacagcagcactgtatatacctgtctctaagtaaaggaaaaaacaaaataaggacttcaatccaaagtttggacagtagatggacttctcagaactttgcaaacataatcattgttctcaccctcttttaaaaaaaaaaatcggtcttcaaagatctgttgatgaaattgctatgttaaaattccattatcgggagttccttatttatcactagcagagagtatgatacaattttcaaatgtgaacaatcttaaatttagcttgtctttctgctaagctgttaaatgtatttatagtaaaggaagaaaaaaagactgtcatttccttataagtttgtgtaacatcctcctctggataacttgactgtaatttaacatctttttcttttgcacatcttcctgagttgaatgtccacgtggaatggggtcatgaattataaaagtccctgataaaagttttgtttactggggtgaacatctttccagtaaccaggtagtcctggtactcctttagttttaaaattaggagttaagagagaagaggtgataaacatagtagggaagggaatatcggattcatgcatcagtttatggtgaatccaaatcaatgtcttgaatcctttgaaaacaggcactgggacatcacaggcttcagtacctgaccagtattagttgcatatatcattgaacacacataccagagatgttttagaaatgtgagaaaaacatccttttggaccatttgaaataagaaagacaaacactaaacaatacaaccatgaaattgatcaccgggattgcaaatctaattgggaaaagagttgagcaaacagcttggactgtttggagttgttgccttactttttaatatgtatttataaagtattccagcaaaagaggatgtagcctctgggaaaaaacaaacatgttacagtgttttttgtagattctcgttctatatctcatcacagcgccagccctgtttttagccggaaaggattcaggataaacattattatgcattctgaattggatgcatattcctaactactgtatttgttaccaaaagtggttctacaaatgctactgaaaaaaatctggaaattcctaatgtcctgagtattaataataaagtttaaaaatgcttttatatcaaaggtgcatcgtgaccaaattgtttaagaaaaaaaaacaaaaaaaacaaaatctagggctgtattttatatatatatatatatatatatatatatatatatcttattggctctctgctttgtatttaaatgaagaatcttacatcttgggtaggtaaactgctgataaaatttgtgtacagtatgtacttacctaatgcagttgcattattacgtactgaaagatatgtgtttggaggtttatttccaggatgcatttgcttgttttggtcatggcagcagtgagttggtaatcctaaaccatcacttccagcagtattcatggtatagagctgatctgtgttcatatgttgaattgtgatagtagcaaacatgaacatatgaactattgttgctcttaatagaaatacaatataaatatgggcttgtatattttcttccttacatttaaatataaagtagaatacgcagttttattattttcaagaaaaagaaagagaagctgctgacctttctcccccataaagtttttcaggatgatcaggtcacagtgtgtacgtaagagtcagctaattatggatattgtcatctcggtaactttgtaaaaaaacaaacaaaactggcattgttaattccaaaaagaaaaaaaaaagcagtaaaaaaaaaaagtcatatgcaacaccagacgcaacatggtttaatggaattaatagtttttttttttttttttttaaagaacattgatggggattcactgtaaagttggcagaggctgccaaagacgaaacaactgactttaaaaatgctggaacaatgtgataaaaaataaatttgtaacaaatcttctcctttttagcccttgtcattttagccctttagtttcaactctgcattatatttagtttatatagtgtaaacttttgtttgccattaattcatctttttaggtagaagacattaaaatcacaggtttatgaagaatctctgctcattggaatgaaatgcagtcatttgaaatgagaaaggccaggatccttttttgtaccttaccctgtcttcaagagtaaaggtgaacacttacagctctcctccttgatgtcaattttgtatgttgatcattccaaactgagaagaataaagccacattttagacatatttatagaatcaattaaagctatatgtctaaaattcgtagggcaacttctgagaagaaacaccgtctttttcttttttaatggaaagtgacaatgtgacattagtcatgttgtgtgcggtgacgcagagtaactgaggtaatctgactgttgcactatgtgacatatttcaggacgtacttgctgcatttgcagcagccctctctctctgtcccttcccacaattctgctgttgctgcaacttgagttaattgtgacaaatgcatctttgtgttatattttgtttgcttcataatttccagaactatatataaatatattttttaaatagcaaatattgtagttagtgagtgatgatcactccaaccttatccttaccatattggtttcagggataggattaagagtgtctttggaagagaaaaatacacacaaccctgtggtttagaatgacgctgaggccttaggctgtgggcctagaacaactatgtgagtgaattcacccatctcatactttgaatcaagcatgcattcctgtttctcattgtgaagtatccccagttgttttccttcagtgttgagtttttgtccttttaaattttattatattttgctctccctaacatttgactgttttttataaaagaaaagaaaaaaaaagaaataaataataccctcgatgccactggatactcacaagcagggttatgctccttcatcttgggcttgtttgcctaaatgaaagggtttaatttattttgtacctcctatgcgtgggatagtccagggtgcagagccaggacttgcttgtaattgcacctgctatacttaaatgtatagccctaggctcaatcacactatggaaagaaacaaaaaaagtatatttagagctttaaaagcttttttatttttttgtggggatgagggtgggatgggaaagggatgtatggatgttattggcatttttaagtgtttagagttttttggggtttggggtggttttttttccttgttttccttttttccttttaattggatgcactgacctggcccaggaaatgaagagattctcttttgatgctattaccaatgttatcataaagtgacagtcacctgtaacaaaaaggtggcaccagacatgatcactgatgttttatttgcacatcaatatttttatttttgtattctggctcagctgcttctctgagtggagttaaggaatgagccacaaagatttttgtagtaggtatattggcattgcattttatattcctctatatttaattttgaaaacctaaaagaaggattgtgcatcttgagagaaagttgagcaaattgtgatctagcggaatgttaatttgtgctgcttcttgtgcacgatagcagcagtagtatctctcttggaaataaacatcccatattatgatgtctatgaatataggtttccttttcttccttccctccctccttcccccacctttctcttttttttttctctctcagcttctcttttcctccttccctcttcccttcctctttctttactttttttgaaatcacttattgtaaataagttgtaatccaaacctcatgtatcaatggggaattttcaaatataaatattaccaatgcattttctggttgttgtctgatttttgattgaagtataatgagaatgacatgtctgttgcttttggtttgaggacttcgctttagcttcataaatcttttggtattttagtatttcattgttttagcaggagagggcagcaaaagttcattttccctgttagtaatgctgtggttcatgatcggttttaaatttagctgtgtgtgtgtttttttaaacagcatctctttgtgagtagaggtaaaaatgaaacatttttgatatgaaaagttgcatatgaaaattatagactggttcaaccagacagtgaagacttctgatccacatcaaacttaaaatgccacaaaacaatcttccacctctggctaaaacatgctacttccttttcaaacaccacaaaatacaagctgagtcttaaacacttggaatttaaaatgtttttctttggaaatgatttgctttcttcaaagtggtaacagaaacaaaaatgaaggtgctccccaaaaagaaatgtaaccttcccctttcacagatgtgtgagaggttctgtactgtgggtgcatcataataaagaagcagtgaagagttttcaggt

SEQ ID NO: 163210 - DNA, 1471 bp, Artificial Sequence
  derived and/or modified sequence
agcatttgtgtgcatagtggctccaaagaggtgtgtgaggtgtgcgaggagggaagagcacacacttgacgttccatcctcagagcagcctgaactgttcctaaagaaacttcagcagtgctgtgtcatttttgacttcatggacacgctatctgatcttaaaatgaaagaatacaagcgctccactcttaatgaactggtggactacattacaataagcagaggctgtttgacagagcagacttaccctgaagtagttagaatggtatcttgcaatatattcagaactctccctcctagtgacagcaatgaatttgatccagaagaagatgaacctacccttgaggcatcgtggccacacttacagcttgtatatgaatttttcatacgatttttggaaagccaagaattccaacccagcattgccaaaaaatatatagatcagaaatttgtattacagcttctggagctatttgacagcgaagaccctcgggaacgggactacttaaaaacagtcttacacagaatttatggcaagtttcttggtcttagagcatttatccgaaaacagattaacaatatttttctaaggtttgtttatgaaacagaacacttcaatggtgtagctgaactgctggaaatattaggaagtattatcaatggctttgctttacctcttaaggcagaacacaaacagtttctggtgaaagtattgatccctttacacactgtcaggagcttatcactcttccatgcacagctggcatattgtatagtacagtttctggagaaagatccttcactcacagaaccagttattagggggttaatgaaattttggcctaaaacatgtagtcaaaaagaggtcatgttccttggggaactggaagaaatattggatgtgattgaaccttcacaatttgttaaaatccaagaacctttgtttaaacaaatcgccaagtgtgtatctagcccccattttcaggtggcagaaagagcactctattattggaataatgaatacatcatgagtttgatagaagaaaactctaacgtcatccttcccatcatgttttccagcctttataggatttcaaaagaacattggaatccggctattgtggcgttggtgtacaatgtgttgaaggcatttatggaaatgaacagcaccatgtttgacgagctgacagccacatacaagtcagatcgtcagcgtgagaaaaagaaagaaaaggagcgtgaagaattgtggaaaaaattggaggatctggagttaaagagaggtcttagacgtgatggaataattccaacttaacaaaaacaatgacaacaacattactaacctgtggagtcacacgtttatgtagtagaagatggagcaacagttttctgtattgtgcaactttacagtagatttcacctttgtttcattattacagcagcactgtatatacctgtctctaagtaaagg

SEQ ID NO: 163211 - DNA, 1404 bp, Artificial Sequence
  derived and/or modified sequence
atgagcagcgcccccaccaccccccccagcgtggacaaggtggacggcttcagcagaaagagcgtgagaaaggccagacagaagagaagccagagcagcagccagttcagaagccagggcaagcccatcgagctgacccccctgcccctgctgaaggacgtgcccagcagcgagcagcccgagctgttcctgaagaagctgcagcagtgctgcgtgatcttcgacttcatggacaccctgagcgacctgaagatgaaggagtacaagagaagcaccctgaacgagctggtggactacatcaccatcagcagaggctgcctgaccgagcagacctaccccgaggtggtgagaatggtgagctgcaacatcttcagaaccctgccccccagcgacagcaacgagttcgaccccgaggaggacgagcccaccctggaggccagctggccccacctgcagctggtgtacgagttcttcatcagattcctggagagccaggagttccagcccagcatcgccaagaagtacatcgaccagaagttcgtgctgcagctgctggagctgttcgacagcgaggaccccagagagagagactacctgaagaccgtgctgcacagaatctacggcaagttcctgggcctgagagccttcatcagaaagcagatcaacaacatcttcctgagattcgtgtacgagaccgagcacttcaacggcgtggccgagctgctggagatcctgggcagcatcatcaacggcttcgccctgcccctgaaggccgagcacaagcagttcctggtgaaggtgctgatccccctgcacaccgtgagaagcctgagcctgttccacgcccagctggcctactgcatcgtgcagttcctggagaaggaccccagcctgaccgagcccgtgatcagaggcctgatgaagttctggcccaagacctgcagccagaaggaggtgatgttcctgggcgagctggaggagatcctggacgtgatcgagcccagccagttcgtgaagatccaggagcccctgttcaagcagatcgccaagtgcgtgagcagcccccacttccaggtggccgagagagccctgtactactggaacaacgagtacatcatgagcctgatcgaggagaacagcaacgtgatcctgcccatcatgttcagcagcctgtacagaatcagcaaggagcactggaaccccgccatcgtggccctggtgtacaacgtgctgaaggccttcatggagatgaacagcaccatgttcgacgagctgaccgccacctacaagagcgacagacagagagagaagaagaaggagaaggagagagaggagctgtggaagaagctggaggacctggagctgaagagaggcctgagaagagacggcatcatccccacctag

SEQ ID NO: 163212 - protein, 499 aa, Artificial Sequence
  derived and/or modified sequence
MAMAEGERTECAEPPRDEPPADGALKRAEELKTQANDYFKAKDYENAIKFYSQAIELNPSNAIYYGNRSLAYLRTECYGYALGDATRAIELDKKYIKGYYRRAASNMALGKFRAALRDYETVVKVKPHDKDAKMKYQECNKIVKQKAFERAIAGDEHKRSVVDSLDIESMTIEDEYSGPKLEDGKVTISFMKELMQWYKDQKKLHRKCAYQILVQVKEVLSKLSTLVETTLKETEKITVCGDTHGQFYDLLNIFELNGLPSETNPYIFNGDFVDRGSFSVEVILTLFGFKLLYPDHFHLLRGNHETDNMNQIYGFEGEVKAKYTAQMYELFSEVFEWLPLAQCINGKVLIMHGGLFSEDGVTLDDIRKIERNRQPPDSGPMCDLLWSDPQPQNGRSISKRGVSCQFGPDVTKAFLEENNLDYIIRSHEVKAEGYEVAHGGRCVTVFSAPNYCDQMGNKASYIHLQGSDLRPQFHQFTAVPHPNVKPMAYANTLLQLGMM

SEQ ID NO: 163213 - protein, 486 aa, Artificial Sequence
  derived and/or modified sequence
MAMAEGERTECAEPPRDEPPADGALKRAEELKTQANDYFKAKDYENAIKFYSQAIELNPSNAIYYGYALGDATRAIELDKKYIKGYYRRAASNMALGKFRAALRDYETVVKVKPHDKDAKMKYQECNKIVKQKAFERAIAGDEHKRSVVDSLDIESMTIEDEYSGPKLEDGKVTISFMKELMQWYKDQKKLHRKCAYQILVQVKEVLSKLSTLVETTLKETEKITVCGDTHGQFYDLLNIFELNGLPSETNPYIFNGDFVDRGSFSVEVILTLFGFKLLYPDHFHLLRGNHETDNMNQIYGFEGEVKAKYTAQMYELFSEVFEWLPLAQCINGKVLIMHGGLFSEDGVTLDDIRKIERNRQPPDSGPMCDLLWSDPQPQNGRSISKRGVSCQFGPDVTKAFLEENNLDYIIRSHEVKAEGYEVAHGGRCVTVFSAPNYCDQMGNKASYIHLQGSDLRPQFHQFTAVPHPNVKPMAYANTLLQLGMM

SEQ ID NO: 163214 - protein, 485 aa, Artificial Sequence
  derived and/or modified sequence
  misc_feature (1)..(1): Xaa can be any naturally occurring amino acid
XMAEGERTECAEPPRDEPPADGALKRAEELKTQANDYFKAKDYENAIKFYSQAIELNPSNAIYYGNRSLAYLRTECYGYALGDATRAIELDKKYIKGYYRRAASNMALGKFRAALRDYETVVKVKPHDKDAKMKYQECNKIVKQKAFERAIAGDEHKRSVVDSLDIESMTIEDEYSGPKLEDGKVTISFMKELMQWYKDQKKLHRKCAYQILVQVKEVLSKLSTLVETTLKETEKITVCGDTHGQFYDLLNIFELNGLPSETNPYIFNGDFVDRGSFSVEVILTLFGFKLLYPDHFHLLRGNHETDNMNQIYGFEGEVKAKYTAQMYELFSEVFEWLPLAQCINGKVLIMHGGLFSEDGVTLDDIRKIERNRQPPDSGPMCDLLWSDPQPQNGRSISKRGVSCQFGPDVTKAFLEENNLDYIIRSHEVKAEGYEVAHGGRCVTVFSAPNYCDQMGNKASYIHLQGSDLRPQFHQFTAVGRPSSGS

SEQ ID NO: 163215 - DNA, 1500 bp, Artificial Sequence
  derived and/or modified sequence
atggcaatggctgagggggagcgcaccgaatgcgctgagcccccacgggatgaacctcccgctgacggcgcattgaaaagggccgaagagttgaagacccaggcaaatgactactttaaggctaaagactacgagaatgccatcaaattctactcgcaggcgattgaattgaatccttccaacgcaatatactatgggaatagatcacttgcttacctaagaaccgagtgctacggttatgccttgggcgacgctaccagggcaatagagctggacaaaaaatacataaaaggatactacagacgtgccgcttcaaatatggctctcggcaaattccgcgccgcgcttagggactacgagacagtagttaaagtgaagccgcacgataaagacgctaaaatgaaatatcaagaatgcaataagatcgttaagcagaaagcattcgagagagcgattgctggagacgagcacaaacggtctgtggtggacagcttggacattgagagcatgacaatcgaggatgagtattcagggccaaagttagaagatggaaaagtcactatcagcttcatgaaagagttaatgcagtggtacaaggaccagaagaaattgcacaggaaatgtgcctatcagattctcgtacaggtgaaggaagtattgagcaaactgtcaactctggtggagaccaccctgaaggagactgaaaagattacggtctgcggtgatacccacggccagttctatgatcttctgaatatcttcgagctcaacgggttaccctcagagactaatccttacatctttaacggcgattttgtagatcgggggagcttttcagttgaggtgatcttgaccctgtttggattcaaacttttatatcctgaccactttcacctactccggggcaatcatgaaactgacaatatgaatcaaatctatgggtttgaaggtgaagtgaaggccaagtacactgcccagatgtatgagctgttttcagaagtatttgaatggctgcccctggctcagtgtatcaacgggaaggttctgatcatgcatggaggattattctcagaggatggtgtaaccctggacgatattcgtaagatcgaaaggaatcgtcaaccgcctgattccgggccaatgtgcgacctattgtggagcgacccacagccgcagaacggacggtctatcagtaaaaggggtgtgagttgtcagttcgggcccgacgtgaccaaggccttcctagaggagaacaatctggactatattataaggagccatgaggtcaaggcagagggctatgaggtagctcacggtggccggtgcgtgacagtgtttagcgcaccgaattattgtgatcagatggggaataaggcttcctacatccatttgcaaggcagcgaccttagacctcaatttcaccagttcaccgctgtccctcaccccaacgtgaagcctatggcttatgctaatacactgctgcagctagggatgatgtag

SEQ ID NO: 163216 - DNA, 1461 bp, Artificial Sequence
  derived and/or modified sequence
atggcgatggcagaaggagagagaaccgagtgcgctgaaccgccacgggacgaaccccctgccgatggggctctgaagcgggcagaggagcttaagacgcaggcgaacgactacttcaaggctaaagattatgagaacgcaattaaattttatagccaggccattgagctgaatccctctaacgcaatctactacggatacgctctcggcgacgcgacacgtgccatcgaactggataaaaagtacattaagggctattatagaagagctgcgtcgaacatggctcttggaaagttcagggcggcactccgtgactatgaaaccgtggtgaaggtgaagccccacgacaaagatgcaaaaatgaaatatcaagagtgcaacaagatcgtgaagcagaaagctttcgaaagagctattgcaggtgacgaacacaaaaggagcgttgtggactcccttgacatcgaatcgatgacaatcgaggatgaatattccggacctaagctggaggacggtaaagttacgatttcgttcatgaaagaacttatgcagtggtacaaggaccagaagaagctccaccgcaagtgcgcctaccagatcttggttcaggttaaagaggtgctctctaagctttcaactctggtcgaaactacacttaaagagacagaaaaaatcactgtgtgcggggacacacacgggcagttctacgatctgcttaatatctttgagctcaacggcttaccttctgaaacaaacccatacatcttcaatggggactttgtagaccggggttccttttccgtggaagttattctgactctcttcggatttaagcttctctacccagatcatttccaccttctcagaggcaatcatgaaaccgataatatgaaccagatctatggttttgagggtgaggttaaggcgaagtataccgctcagatgtatgagctcttttccgaagtttttgaatggctacccctagcacagtgtatcaatggaaaagttctgattatgcatggaggcctcttcagcgaggatggagttactctggacgacatccggaaaattgaaagaaaccgtcagccccctgattcgggaccaatgtgcgatctgctgtggtcggaccctcagccgcagaatggtaggagcatttctaaacgtggcgtgagctgccagtttgggcccgacgtgacaaaggcatttttagaggagaacaacctggactacataattcgcagccacgaggtgaaagccgagggttacgaggtggctcacggcggccgatgtgtgaccgtgttctcggccccaaattattgtgatcagatggggaataaggcaagttacatacatcttcaaggctcggatcttagacctcagtttcatcagtttacagctgtcccacatcctaacgtgaaacccatggcttacgccaacaccctgcttcagttgggcatgatgtag

SEQ ID NO: 163217 - DNA, 1458 bp, Artificial Sequence
  derived and/or modified sequence
tgaatggcagagggagagcgcacagagtgtgccgagcccccgagagacgagccaccagccgacggagctcttaaacgcgccgaggaactgaagacccaggcaaatgactattttaaagccaaagactacgaaaacgccataaagttttattcgcaggccatcgaattgaatccatccaacgctatttactacgggaatcggtccctggcatacctgcgtactgagtgctacgggtatgcgcttggagacgctaccagagccattgagctggacaagaaatatattaaagggtattaccgacgggctgcttcaaacatggctctgggaaaatttcgggccgccttgagagactacgaaactgtagtgaaagtgaagccacacgacaaagacgcaaaaatgaaatatcaggagtgtaataaaatcgtgaagcaaaaggcgtttgagcgtgctatagctggcgatgagcataaaagaagtgtggttgatagcctggatatcgagtccatgactatcgaggacgaatacagcgggccgaagcttgaagatggcaaggtgaccatcagcttcatgaaggagctgatgcaatggtataaggatcagaagaagttgcaccgcaaatgtgcctaccaaatcctggttcaagtaaaggaggttttgtccaaactgagtacccttgtcgaaacaactctgaaggaaacggagaagatcacagtatgtggagatactcacgggcagttctacgacctgctgaacatctttgaacttaatggtctgccatcagagacgaacccttatatcttcaacggggactttgtagaccgtggctcttttagcgtcgaggtcattctcactttgtttggcttcaaattgctgtatcccgatcacttccatttgctgaggggtaaccacgagaccgacaatatgaaccaaatctacggcttcgagggagaagtgaaggccaagtataccgcccagatgtatgaactcttttcagaggttttcgagtggctccctctcgcgcagtgtattaatgggaaagtgctgattatgcacggggggctgtttagcgaagacggcgtgacattggatgatattcgcaagatagaacgcaatcgccagcccccagattccgggcccatgtgcgacctgctctggagtgatcctcaacctcaaaatggccggtccatctctaaaaggggggtctcctgtcagtttggcccagacgtgaccaaagcattcctggaagaaaataacctcgactatatcattaggtctcacgaggtaaaagcggaaggttacgaagtggcccacgggggtcgctgcgtgactgtcttttctgctccaaactattgcgatcagatggggaacaaggcatcttacatccatctgcagggatcagacctgagaccacaattccatcaattcacagcagttgggcggcctagctccggttcttag

SEQ ID NO: 163218 - DNA, 1500 bp, Artificial Sequence
  derived and/or modified sequence
atggccatggccgagggggagaggacagaatgtgccgagcccccaagagatgagcccccagcagatggagccctgaagagagctgaggagctgaagacccaggccaatgactacttcaaggccaaggactatgaaaatgccatcaagttctacagccaggccatcgagctgaaccccagcaatgccatctactacggcaacagaagcctggcctacctgaggacagagtgctacggctacgccctgggagatgccacccgggccatcgagctggacaagaagtacatcaagggctactacagaagagctgccagcaacatggccctgggcaagttccgggccgccctgcgggactatgaaacagtggtgaaggtgaagccccatgacaaggatgccaagatgaagtaccaggagtgcaacaagatcgtgaagcagaaggcctttgagcgggccatcgctggagatgagcacaagaggtctgtggtggacagcctggacattgaatccatgaccattgaagatgagtacagcggccccaagctggaggatggcaaggtgaccatctccttcatgaaggagctgatgcagtggtacaaggaccagaagaagctgcacaggaaatgtgcctaccagatcctggtgcaggtgaaggaggtgctgagcaagctgagcaccctggtggagaccaccctgaaggagacagagaagatcaccgtgtgtggggacacccacggccagttctatgacctgctgaacatctttgagctgaatggcctgcccagcgagaccaacccctacatcttcaatggagactttgtggaccggggcagcttctctgtggaggtgatcctgaccctgtttggcttcaagctgctgtacccagaccacttccacctgctgcggggcaaccacgagacagacaacatgaaccagatctacggctttgaaggagaggtgaaggccaagtacacagcccagatgtatgagctgttcagcgaggtgtttgagtggctgcccctggcccagtgcatcaatggcaaggtgctgatcatgcacggcggcctcttctctgaagatggagtgaccctggatgacatcaggaagattgaaagaaaccggcagcccccagacagcggccccatgtgtgacctgctgtggagcgacccccagccccagaatggccgcagcatcagcaagaggggcgtgtcctgccagtttggaccagatgtgaccaaggccttcctggaggagaacaacctggactacatcatccgcagccatgaggtgaaggccgagggctatgaggtggcccacggcggccgctgtgtgaccgtcttcagcgcccccaactactgtgaccagatgggcaacaaggccagctacatccacctgcagggcagtgacctgcggccccagttccaccagttcaccgctgtgccccaccccaacgtgaagcccatggcctatgccaacaccctgctgcagctgggcatgatgtag

SEQ ID NO: 163219 - DNA, 1461 bp, Artificial Sequence
  derived and/or modified sequence
atggccatggccgagggggagaggacagaatgtgccgagcccccaagagatgagcccccagcagatggagccctgaagagagctgaggagctgaagacccaggccaatgactacttcaaggccaaggactatgaaaatgccatcaagttctacagccaggccatcgagctgaaccccagcaatgccatctactacggctacgccctgggagatgccacccgggccatcgagctggacaagaagtacatcaagggctactaccgccgggccgccagcaacatggccctgggcaagttccgggccgccctgcgggactatgagaccgtggtgaaggtgaagccccatgacaaggatgccaagatgaagtaccaggagtgcaacaagatcgtgaagcagaaggcctttgagcgggccatcgctggagatgagcacaagaggtctgtggtggacagcctggacatcgagagcatgaccattgaagatgagtacagcggccccaagctggaggatggcaaggtgaccatctccttcatgaaggagctgatgcagtggtacaaggaccagaagaagctgcacaggaaatgtgcctaccagatcctggtgcaggtgaaggaggtgctgagcaagctgagcaccctggtggagaccaccctgaaggagacagagaagatcaccgtgtgtggggacacccacggccagttctatgacctgctgaacatctttgagctgaatggcctgcccagcgagaccaacccctacatcttcaacggggactttgtggaccggggcagcttctctgtggaggtgatcctgaccctgtttggcttcaagctgctgtacccagaccacttccacctgctgcggggcaaccatgaaacagacaacatgaaccagatctacggctttgaaggagaggtgaaggccaagtacacagcccagatgtatgagctgttcagcgaggtgtttgagtggctgcccctggcccagtgcatcaacgggaaggtgctgatcatgcatggaggcctcttctctgaagatggagtgaccctggatgacatcaggaagattgaaagaaaccggcagcccccagattctggccccatgtgtgacctgctgtggagcgacccccagccccagaatggccgcagcatcagcaagaggggcgtgtcctgccagtttggaccagatgtgaccaaggccttcctggaggagaacaacctggactacatcatccgcagccatgaggtgaaggccgagggctatgaggtggcccatggaggccgctgtgtgacagtgttcagcgcccccaactactgtgaccagatgggcaacaaggccagctacatccacctgcagggcagtgacctgcggccccagttccaccagttcaccgctgtgccccaccccaacgtgaagcccatggcctatgccaacaccctgctgcagctgggcatgatgtag

SEQ ID NO: 163220 - DNA, 1458 bp, Artificial Sequence
  derived and/or modified sequence
tgaatggccgagggggagaggacagaatgtgccgagcccccaagagatgagcccccagcagatggagccctgaagagagctgaggagctgaagacccaggccaatgactacttcaaggccaaggactatgaaaatgccatcaagttctacagccaggccatcgagctgaaccccagcaatgccatctactacggcaacagaagcctggcctacctgaggacagaatgttatggctacgccctgggagatgccacccgggccatcgagctggacaagaagtacatcaagggctactaccgccgggccgccagcaacatggccctgggcaagttccgggccgccctgcgggactatgagaccgtggtgaaggtgaagccccatgacaaggatgccaagatgaagtaccaggagtgcaacaagatcgtgaagcagaaggcctttgagcgggccatcgctggagatgagcacaagaggtctgtggtggacagcctggacatcgagagcatgaccattgaagatgagtacagcggccccaagctggaggatggcaaggtgaccatctccttcatgaaggagctgatgcagtggtacaaggaccagaagaagctgcacaggaaatgtgcctaccagatcctggtgcaggtgaaggaggtgctgagcaagctgagcaccctggtggagaccaccctgaaggagacagagaagatcaccgtgtgtggggacacccacggccagttctatgacctgctgaacatctttgagctgaatggcctgcccagcgagaccaacccctacatcttcaacggggactttgtggaccggggcagcttctctgtggaggtgatcctgaccctgtttggcttcaagctgctgtacccagaccacttccacctgctgcggggcaaccatgaaacagacaacatgaaccagatctacggctttgaaggagaggtgaaggccaagtacacagcccagatgtatgagctgttcagcgaggtgtttgagtggctgcccctggcccagtgcatcaacgggaaggtgctgatcatgcatggaggcctcttctctgaagatggagtgaccctggatgacatcaggaagattgaaagaaaccggcagcccccagattctggccccatgtgtgacctgctgtggagcgacccccagccccagaatggccgcagcatcagcaagaggggcgtgtcctgccagtttggaccagatgtgaccaaggccttcctggaggagaacaacctggactacatcatccgcagccatgaggtgaaggccgagggctatgaggtggcccatggaggccgctgtgtgacagtgttcagcgcccccaactactgtgaccagatgggcaacaaggccagctacatccacctgcagggcagtgacctgcggccccagttccaccagttcaccgctgtgggccggcccagcagcggcagctag

SEQ ID NO: 163221 - DNA, 1500 bp, Artificial Sequence
  derived and/or modified sequence
atggccatggccgagggcgagcggaccgagtgcgccgagcccccccgggacgagccccccgccgacggggctctgaaacgtgccgaagagctgaaaacccaggcaaacgactacttcaaagctaaggattacgaaaacgccatcaaattttattcccaggcaatagagctcaatccatctaacgccatctattacggcaacaggtcattagcttacctgcgcacggagtgttatggttatgcactcggagacgccacccgggccattgagctagacaaaaaatacattaagggctactaccggcgagccgcatcaaatatggcactcgggaaattccgggcagctctcagggattatgaaacggtcgtgaaggttaaaccgcatgataaggacgcaaagatgaaatatcaggagtgtaacaaaatcgtgaagcagaaggcattcgaacgagccattgcaggggacgagcataaaaggtccgtggtggactcactcgatattgagtcaatgaccattgaggacgagtatagcgggcctaagctagaggacggcaaggtaacaatctccttcatgaaagagctgatgcaatggtacaaagaccagaagaagctgcaccgtaaatgtgcatatcagattctagtccaggtcaaagaggtgctcagtaagctgtctaccctggtggagacaactttgaaggagacagaaaagatcacagtgtgcggggatacgcacggacagttctacgacctgctgaacattttcgagctgaatggtctgccaagtgagactaatccgtacattttcaacggggattttgtggataggggcagcttcagcgttgaagtaattctcacactttttggattcaagctcttgtatccggaccacttccatctactgcgcggtaatcatgagaccgacaacatgaaccagatttacgggtttgaaggtgaagtcaaggccaaatatacagcccagatgtatgagcttttttcggaagtctttgagtggctgcccctggcccagtgtataaatggcaaagtactgattatgcacggcggcttatttagtgaagacggggtaacactagacgacatccgcaaaatcgagaggaatcgccagcctcctgacagcggacccatgtgtgatctgctgtggtcagatcctcagccacaaaatggcagaagcatcagcaaaagaggggtgagttgtcagttcggtcccgacgtaacaaaggcattcctcgaggagaataatctggattatatcatcaggtctcatgaggtgaaggccgagggctatgaggtagcacatgggggcagatgtgtcactgtcttttcagcccccaactactgtgatcagatgggtaataaggcttcctacattcatctacagggaagtgatttaagaccacagtttcaccagtttacggcggtgcctcacccaaacgtaaaaccaatggcctatgcaaataccctgcttcagctgggcatgatgtag

SEQ ID NO: 163222 - DNA, 1461 bp, Artificial Sequence
  derived and/or modified sequence
atggccatggccgagggcgagcggaccgagtgcgccgagccccccagagacgaaccgcctgctgatggggccctgaaaagagccgaagagctgaaaacacaggcaaacgattacttcaaggctaaggactatgaaaacgcgatcaaattctatagccaggctattgaactgaatccgagcaacgctatatactatgggtacgcactgggagatgcaacacgggcaatcgagctagataagaagtatatcaaggggtattaccgacgggcagcatcaaacatggccctggggaagtttcgcgccgccctcagagattacgagacagtggttaaggttaaaccccacgataaggatgccaaaatgaaataccaagagtgcaataagattgtgaagcagaaggcattcgaaagggccattgccggcgatgagcataagcgaagcgtcgttgacagcctggatatcgagtccatgacgatcgaggacgagtactcagggcccaagctggaagatggaaaagtaaccattagcttcatgaaggaactgatgcagtggtataaggaccaaaaaaaactccaccggaaatgcgcctatcagattctggtgcaagttaaagaggtgctgtccaaattatcaactctggtcgaaacaacattgaaagaaacagaaaaaattactgtgtgcggcgacacccatggccagttctatgatctgttgaatatctttgagctgaatggcctgccctcggaaactaacccatatattttcaacggcgacttcgtcgacaggggatcattctctgtcgaagtgatcctcactctgttcgggttcaaactgctgtaccccgaccactttcatctgctcagagggaatcatgagaccgataacatgaaccagatctacggatttgagggagaagtcaaggccaaatacactgctcagatgtatgaacttttctccgaggtgtttgagtggcttccactggcccagtgtatcaatggtaaagtattgatcatgcatggaggcctgtttagcgaagacggcgtaacactggatgatattaggaagattgaaagaaatcgccagccacctgatagcggcccgatgtgcgacctattatggagcgatcctcagccacagaacggacgatctatctcaaagcggggggtctcctgccaatttggtcccgatgtcacgaaagcttttctggaagagaataatttggactatatcatacggagtcatgaagtcaaggctgaggggtacgaggtggcacacggtgggcggtgtgtaaccgtatttagtgcgcccaactattgtgatcagatgggaaacaaagcaagttacatccatctgcagggctcagacctgcgccctcagtttcatcagtttacagcagtcccacacccaaatgtcaagcccatggcctacgccaacactctcctacagctcgggatgatgtag

SEQ ID NO: 163223 - DNA, 1458 bp, Artificial Sequence
  derived and/or modified sequence
tgaatggccgagggcgagcggaccgagtgcgccgagcccccccgggatgaaccacctgctgacggggcattgaagagggccgaggaactcaaaacacaagcgaatgactactttaaagccaaagactatgagaatgctataaagttttacagccaggccattgaactaaatcctagtaacgctatctactacggaaacagatccctggcctacctccgcacagaatgttatggctatgccctgggggacgcgacaagggccatcgaactggacaagaagtacatcaaaggttactacaggagagcagccagcaatatggctctgggcaagtttcgcgcagcactgcgtgattatgaaacggtcgtgaaagtaaaacctcatgacaaggatgcaaagatgaagtatcaggagtgcaacaagatcgtgaagcagaaggcttttgaaagagcaatcgcaggcgatgaacacaaacgctctgtggtggactcactggatatagagtctatgaccattgaggatgaatactccgggcccaagctggaggatggcaaagtgaccatcagcttcatgaaagaactgatgcagtggtacaaagaccagaagaaactgcatcgcaagtgtgcataccaaattctggttcaggtgaaggaagtgttgtctaagctaagtactctcgtggagactaccctcaaagaaacagaaaagattaccgtgtgtggtgatacgcacgggcagttctatgacctgcttaacatctttgagttgaacgggctgccttccgagactaacccatacatttttaacggagattttgtcgatcgcggtagcttctccgtggaggtgattttaacactgttcggattcaagctgctctatcctgatcactttcatttgttgcggggaaatcatgaaaccgacaatatgaatcaaatctatggatttgaaggtgaagtgaaagccaagtatacagcacagatgtacgaactctttagcgaagtgttcgagtggctgcccctggctcagtgtattaatggcaaggtcctcatcatgcacggcggcctcttttcagaggacggagtgacactggatgatatccgtaagatcgagcggaatagacaaccaccagactctggcccgatgtgcgaccttctgtggtccgaccctcagccacagaacggaagatccattagcaaacggggggtaagctgtcaatttggcccagatgtcacaaaggcatttctggaggaaaataaccttgactacataatccgcagccatgaggtgaaggcggagggctacgaggtcgctcatggggggcgatgcgttactgtgtttagcgctccaaattactgtgatcagatggggaataaggcgagctatatccacctccaggggagcgacctccggccacagtttcaccagtttacagcagttggacgcccttcaagcggatcttag

SEQ ID NO: 163224 - DNA, 1500 bp, Artificial Sequence
  derived and/or modified sequence
atggccatggccgagggagagagaaccgagtgtgctgaaccccctcgcgatgagccaccggcagacggcgctctcaagcgggcagaggagctgaaaactcaggcaaatgactatttcaaagctaaagactacgaaaacgccattaagttctatagccaggcaattgagttgaacccttcgaacgcaatatattatggcaacaggtcccttgcttacttacggaccgagtgttatggttatgcactaggggatgccacacgggctatcgagctggataagaagtacataaagggctattaccgacgagcggcttcaaatatggcactgggtaagttccgcgctgccctgcgggattacgagacggttgtgaaggtcaagccccacgacaaagacgctaaaatgaagtaccaggagtgcaacaagatagtcaaacagaaggcctttgaacgtgcaatcgctggtgatgagcataagcgtagtgtggtggactcattagacattgaatctatgaccatcgaagatgagtattcaggacctaagcttgaagacgggaaggtgacaatcagcttcatgaaggaactgatgcagtggtacaaagaccaaaagaagctgcacagaaagtgtgcataccagattctggtgcaggtaaaggaggttttatctaagctgtcaacattggtggaaaccaccctgaaagagacagaaaaaatcacagtctgtggcgacacccacggccaattttacgacctcctcaacatcttcgagctcaacggccttccctctgagacaaacccctacatcttcaacggcgattttgtcgaccgcggatctttctctgtcgaagtgatcctgacattgtttgggttcaagctgttataccctgatcacttccacctgctgagaggtaaccacgagacagacaacatgaaccagatctacggctttgagggtgaagtcaaggccaaatacaccgctcaaatgtacgaacttttctcagaagtgtttgagtggctgcccctggcccagtgtatcaacggcaaggtcctcattatgcacggaggcctgttttctgaggatggtgtgactcttgatgacattaggaaaattgagcgtaaccgccagccccctgactctggcccaatgtgtgaccttctgtggagtgacccacagccacagaacggccgatctatctctaagcgcggagtcagttgccaattcggcccagacgttacaaaggcttttctcgaagaaaacaaccttgactatattatcagatcccacgaggtcaaagctgaggggtacgaggtggcccatggtggtcggtgcgtgacagtatttagtgccccaaattactgtgatcaaatgggaaataaagcttcctatatccatttacagggatctgacctgcgaccacagtttcaccagtttacagccgtgcctcacccaaatgtcaagccaatggcatatgcgaataccctcctgcagctgggcatgatgtag

SEQ ID NO: 163225 - DNA, 1461 bp, Artificial Sequence
  derived and/or modified sequence
atggcgatggccgaaggagaacgaacggagtgtgctgagcctccacgagacgaaccccctgccgacggggctcttaagagagcagaagaactgaagacacaagctaacgactattttaaagccaaggattatgagaatgctatcaagttttactcacaagccattgaactcaatccctccaacgcgatctactatggttacgcgctcggggacgcaacaagggcaattgagttggacaagaaatatatcaagggatactacaggcgagcagcaagcaacatggcgttgggcaaattccgggctgctctgagggattacgagacagtggtcaaagtgaaaccccacgataaggacgcaaagatgaagtaccaagagtgcaacaaaatcgtgaagcagaaggcttttgagcgtgcaatcgcaggcgatgaacacaagaggagcgttgttgacagcctggacatagagtctatgacgatcgaagacgaatatagcggacccaaacttgaggatgggaaagtgaccatctctttcatgaaagagttaatgcagtggtataaggaccagaaaaagctgcacagaaagtgcgcctaccagattctggtacaggtcaaggaagttctctcaaaactgtctaccctggtcgaaaccacactcaaggagaccgagaagatcactgtttgtggcgatacccacggtcaattctatgacttgctgaatatttttgagctcaacgggctcccttctgaaaccaacccttatatttttaatggggactttgtagatcggggaagtttttccgtggaggttattcttactctcttcggcttcaaactactgtacccagaccactttcatctccttcgagggaatcacgagactgacaatatgaaccagatatatggctttgaaggagaagtcaaggcgaaatataccgcccagatgtacgagctgttctctgaggtgtttgagtggttgcctctggcccaatgtataaatgggaaggttcttataatgcacggtgggctgttctctgaggatggagtaaccttagatgacatcagaaagatcgaaagaaacaggcagccccctgactctggtccaatgtgcgacctgctgtggtcagatccacagccccagaatggccgttcaatctccaagcggggagtcagctgccagtttgggccagacgtgacaaaggctttcctggaagagaacaatctggattatatcatccgtagccatgaagtaaaggccgagggttacgaggtggcccacgggggacggtgtgtgacagtgtttagtgctcccaattactgcgaccagatggggaataaagcctcgtatattcacctccaggggtcagacttgcggcctcagttccaccagttcactgccgtgccgcatcctaacgtgaaacccatggcttatgctaatacacttcttcaactcggcatgatgtag

SEQ ID NO: 163226 - DNA, 1458 bp, Artificial Sequence
  derived and/or modified sequence
tagatggcagaaggcgagagaaccgaatgcgctgagcccccaagagatgagccacctgccgacggggctctgaaacgcgctgaagaactgaaaactcaggccaacgattacttcaaagcaaaggactatgagaatgcaatcaagttctactcccaggcgatcgaactgaacccatccaatgccatctattacggaaatagatcacttgcttacctgcgtaccgaatgttacggatatgccctcggggatgctactcgcgctatagagctcgacaagaagtacatcaaggggtattatagaagagctgcctccaacatggcgcttggtaagttcagagctgctttacgcgattatgaaaccgttgtgaaggtaaagccacacgataaggatgcaaagatgaaataccaagaatgtaacaagatagtgaagcaaaaagcctttgagcgggcaatagctggagatgaacataagcgctcagtggtcgacagcctggatatagaatctatgaccattgaggatgaatactccggaccaaagctggaggacggtaaggtcaccattagctttatgaaggaactgatgcagtggtacaaagaccagaaaaagctacacaggaagtgcgcctaccagatattggttcaggtgaaggaggtcctgagcaagctgtctaccttggtggagaccacattgaaggagaccgagaagatcacggtctgcggggacacacatggacaattctatgacctacttaatatcttcgagctaaatgggctgcccagcgagaccaacccttacatcttcaatggggattttgtggaccgtggtagcttctccgtggaggttatcctcactctgttcggctttaagcttctctaccctgaccattttcacctcctgcggggaaaccacgagaccgacaatatgaaccagatttacggctttgagggagaggtcaaagccaaatacactgcccaaatgtacgaactgtttagcgaggtttttgaatggttgccactggcccaatgtatcaatggaaaggttctgatcatgcatggaggtctgttcagtgaagatggagtcactctggatgacatccgaaagattgagcggaatagacagccacccgactcaggcccaatgtgcgacctgctgtggtccgatcctcagccccagaatggtcgatctatctcaaagcgcggagtttcttgccaattcggaccagacgttacaaaagcctttttggaggaaaacaatttagactatatcatcaggagccatgaagttaaagccgaggggtacgaggtcgcccacggcggtagatgtgtgactgtgttctcggccccaaactactgcgatcagatgggtaacaaagccagctacattcacttgcagggtagcgatctccgcccacaatttcaccagttcaccgctgttggccgaccctcctcgggttcttag

SEQ ID NO: 163227 - DNA, 2109 bp, Artificial Sequence
  derived and/or modified sequence
acgacacttgtgcggcagcggcggcggccacccggcgctccttcgcgacggttcggccgggtgccgctggcggccgttgccagggtaggggtcgctttgcggcatggcgatggcggagggcgagaggactgagtgtgctgagcccccccgggacgaacccccggctgatggagctctgaagcgggcagaggagctcaagactcaggccaatgactacttcaaagccaaggactacgagaacgccatcaagttctacagccaggccatcgagctgaaccccagcaatgccatctactatggcaaccgcagcctggcctacctgcgcactgagtgctatggctacgcgctgggagacgccacgcgggccattgagctggacaagaagtacatcaagggttattaccgccgggctgccagcaacatggcactgggcaagttccgggccgcgctgcgagactacgagacggtggtcaaggtgaagccccatgacaaggatgccaaaatgaaataccaggagtgcaacaagatcgtgaagcagaaggcctttgagcgggccatcgcgggcgacgagcacaagcgctccgtggtggactcgctggacatcgagagcatgaccattgaggatgagtacagcggacccaagcttgaagacggcaaagtgacaatcagtttcatgaaggagctcatgcagtggtacaaggaccagaagaaactgcaccggaaatgtgcctaccagattctggtacaggtcaaagaggtcctctccaagctgagcacgctcgtggaaaccacactcaaagagacagagaagattacagtatgtggggacacccatggccagttctatgacctcctcaacatattcgagctcaacggtttaccctcggagaccaacccctatatatttaatggtgactttgtggaccgaggctccttctctgtagaagtgatcctcacccttttcggcttcaagctcctgtacccagatcactttcacctccttcgaggcaaccacgagacagacaacatgaaccagatctacggtttcgagggtgaggtgaaggccaagtacacagcccagatgtacgagctctttagcgaggtgttcgagtggctcccgttggcccagtgcatcaacggcaaagtgctgatcatgcacggaggcctgttcagtgaagacggtgtcaccctggatgacatccggaaaattgagcggaatcgacaacccccagattcagggcccatgtgtgacctgctctggtcagatccacagccacagaacgggcgctcgatcagcaagcggggcgtgagctgtcagtttgggcctgacgtcaccaaggccttcttggaagagaacaacctggactatatcatccgcagccacgaagtcaaggccgagggctacgaggtggctcacggaggccgctgtgtcaccgtcttctctgcccccaactactgcgaccagatggggaacaaagcctcctacatccacctccagggctctgacctacggcctcagttccaccagttcacagcagtgcctcatcccaacgtcaagcccatggcctatgccaacacgctgctgcagctaggaatgatgtgaggtgacgggcggggcggcctgcatcccagggcccctccaatcccaccggacccaggccctgggctaggggcagagcaggccccgccccagggcaatgttggacccccttttactttgtaaagtttgtatttattcccctttaggtttgcagagggggtaggggcagagtcaggggctggccagagggtctgctccctggacagagaggaaggaggtggagcagctggggctgggggcacagcctgggcattctgtggggaggccgtcctcggggtggggtggggccgagtggctgccctgcccccctcatttgcatggctcctcccccactcaagcaatagggccccgccataggaagacccccagagagagggtcagcaggggggccccgcctgcgcctcccctcctatagccccatggtggggctaggctggggctcacccccctccccagctattttatgtctgtaattaaatatgttaaaataaagtcattatcggaagtca

SEQ ID NO: 163228 - DNA, 1961 bp, Artificial Sequence
  derived and/or modified sequence
atggcgatggcggagggcgagaggactgagtgtgctgagcccccccgggacgaacccccggctgatggagctctgaagcgggcagaggagctcaagactcaggccaatgactacttcaaagccaaggactacgagaacgccatcaagttctacagccaggccatcgagctgaaccccagcaatgccatctactatggctacgcgctgggagacgccacgcgggccattgagctggacaagaagtacatcaagggttattaccgccgggctgccagcaacatggcactgggcaagttccgggccgcgctgcgagactacgagacggtggtcaaggtgaagccccatgacaaggatgccaaaatgaaataccaggagtgcaacaagatcgtgaagcagaaggcctttgagcgggccatcgcgggcgacgagcacaagcgctccgtggtggactcgctggacatcgagagcatgaccattgaggatgagtacagcggacccaagcttgaagacggcaaagtgacaatcagtttcatgaaggagctcatgcagtggtacaaggaccagaagaaactgcaccggaaatgtgcctaccagattctggtacaggtcaaagaggtcctctccaagctgagcacgctcgtggaaaccacactcaaagagacagagaagattacagtatgtggggacacccatggccagttctatgacctcctcaacatattcgagctcaacggtttaccctcggagaccaacccctatatatttaatggtgactttgtggaccgaggctccttctctgtagaagtgatcctcacccttttcggcttcaagctcctgtacccagatcactttcacctccttcgaggcaaccacgagacagacaacatgaaccagatctacggtttcgagggtgaggtgaaggccaagtacacagcccagatgtacgagctctttagcgaggtgttcgagtggctcccgttggcccagtgcatcaacggcaaagtgctgatcatgcacggaggcctgttcagtgaagacggtgtcaccctggatgacatccggaaaattgagcggaatcgacaacccccagattcagggcccatgtgtgacctgctctggtcagatccacagccacagaacgggcgctcgatcagcaagcggggcgtgagctgtcagtttgggcctgacgtcaccaaggccttcttggaagagaacaacctggactatatcatccgcagccacgaagtcaaggccgagggctacgaggtggctcacggaggccgctgtgtcaccgtcttctctgcccccaactactgcgaccagatggggaacaaagcctcctacatccacctccagggctctgacctacggcctcagttccaccagttcacagcagtgcctcatcccaacgtcaagcccatggcctatgccaacacgctgctgcagctaggaatgatgtgaggtgacgggcggggcggcctgcatcccagggcccctccaatcccaccggacccaggccctgggctaggggcagagcaggccccgccccagggcaatgttggacccccttttactttgtaaagtttgtatttattcccctttaggtttgcagagggggtaggggcagagtcaggggctggccagagggtctgctccctggacagagaggaaggaggtggagcagctggggctgggggcacagcctgggcattctgtggggaggccgtcctcggggtggggtggggccgagtggctgccctgcccccctcatttgcatggctcctcccccactcaagcaatagggccccgccataggaagacccccagagagagggtcagcaggggggccccgcctgcgcctcccctcctatagccccatggtggggctaggctggggctcacccccctccccagctattttatgtctgtaattaaatatgttaaaataaagtcattatcgg

SEQ ID NO: 163229 - DNA, 1886 bp, Artificial Sequence
  derived and/or modified sequence
cgatggcggagggcgagaggactgagtgtgctgagcccccccgggacgaacccccggctgatggagctctgaagcgggcagaggagctcaagactcaggccaatgactacttcaaagccaaggactacgagaacgccatcaagttctacagccaggccatcgagctgaaccccagcaatgccatctactatggcaaccgcagcctggcctacctgcgcactgagtgctatggctacgcgctgggagacgccacgcgggccattgagctggacaagaagtacatcaagggttattaccgccgggctgccagcaacatggcactgggcaagttccgggccgcgctgcgagactacgagacggtggtcaaggtgaagccccatgacaaggatgccaaaatgaaataccaggagtgcaacaagatcgtgaagcagaaggcctttgagcgggccatcgcgggcgacgagcacaagcgctccgtggtggactcgctggacatcgagagcatgaccattgaggatgagtacagcggacccaagcttgaagacggcaaagtgacaatcagtttcatgaaggagctcatgcagtggtacaaggaccagaagaaactgcaccggaaatgtgcctaccagattctggtacaggtcaaagaggtcctctccaagctgagcacgctcgtggaaaccacactcaaagagacagagaagattacagtatgtggggacacccatggccagttctatgacctcctcaacatattcgagctcaacggtttaccctcggagaccaacccctatatatttaatggtgactttgtggaccgaggctccttctctgtagaagtgatcctcacccttttcggcttcaagctcctgtacccagatcactttcacctccttcgaggcaaccacgagacagacaacatgaaccagatctacggtttcgagggtgaggtgaaggccaagtacacagcccagatgtacgagctctttagcgaggtgttcgagtggctcccgttggcccagtgcatcaacggcaaagtgctgatcatgcacggaggcctgttcagtgaagacggtgtcaccctggatgacatccggaaaattgagcggaatcgacaacccccagattcagggcccatgtgtgacctgctctggtcagatccacagccacagaacgggcgctcgatcagcaagcggggcgtgagctgtcagtttgggcctgacgtcaccaaggccttcttggaagagaacaacctggactatatcatccgcagccacgaagtcaaggccgagggctacgaggtggctcacggaggccgctgtgtcaccgtcttctctgcccccaactactgcgaccagatggggaacaaagcctcctacatccacctccagggctctgacctacggcctcagttccaccagttcacagcagtgggtaggcccagcagtggttcttgacatcacacgatgaggcgcgcatctcccgtcatccagggagaccagaggacccttgtctcactcccagttggctcttagtcacagccccgctttgtctttgacatggacgtttgtgatgatcacgttcctcccgctccccgtgtctgaagagtgctccctgactggctgccgtctcctccctgtcgggtctggctgggttctccagagggagtgctgcggaggggacacagcagaggccccatgctcgtgatgtatgttgcagatcattttcccccattctgtccttttttgttaaattgtggtaaaaagcacataacataaactgtaccaccttaaccatttgaaagtatatatcccagactgtcttttatctttagacttcacttgtggtttgttgccacagtacaagtttatttttatgaagccaaa

SEQ ID NO: 163230 - DNA, 1500 bp, Artificial Sequence
  derived and/or modified sequence
atggccatggccgagggcgaaaggacagagtgcgccgagcctcccagggatgaacctcccgcagacggagctctcaagcgcgctgaagagctgaaaactcaagcaaacgactacttcaaggcaaaagactacgagaacgcaatcaagttctacagccaggctattgaactgaaccccagcaatgcaatatactatggaaacagaagcttagcatatctccgcacagaatgctatgggtacgccttgggcgacgcaactcgtgctatcgagctggataaaaaatatatcaagggttactacagacgagctgccagcaacatggctctgggaaaatttcgggctgccttaagggactacgagacagtggtgaaagtgaagccccatgataaagatgccaagatgaagtaccaggagtgcaataaaattgtgaaacagaaggccttcgagcgggcaattgcaggcgatgagcacaaaagatctgtggtggactctctagatatcgaaagcatgacaattgaggacgagtattcagggcctaaactggaggatggcaaagtaactatcagcttcatgaaagagttaatgcagtggtacaaagaccagaaaaagctgcacagaaaatgtgcatatcaaatcctggtacaggtgaaggaggtgctatctaaattgtctactctggttgaaaccactttgaaagagaccgaaaaaattactgtttgtggcgatacccatggacagttttatgatcttcttaatattttcgagctgaatgggctccccagcgagacgaatccctacatttttaatggtgattttgtggaccgcggttccttcagtgtggaagttatcttgacgctcttcggtttcaagctgctttacccagaccattttcatctgctccgcggcaatcatgagaccgataatatgaaccagatctacggtttcgagggcgaggtcaaggccaagtacaccgcccagatgtatgagctgttctctgaagtcttcgagtggctacctctcgctcagtgcattaatggtaaagtcctcatcatgcatggaggactgttttccgaggatggtgtgaccctagacgatattaggaagattgaacgcaatagacaacctcctgactcaggcccgatgtgtgatctgctttggagcgacccccagcctcagaatggaagaagcattagtaagagaggcgttagttgtcaatttgggccagatgtaacaaaagccttcttggaagaaaataacctcgattacatcatcagatcacacgaggttaaggctgaaggctacgaggtggctcacggaggtagatgtgtgactgtgttttccgccccaaactactgcgatcagatgggaaacaaggcatcttacatacaccttcagggctccgatcttaggccgcaattccatcagttcaccgctgttccccaccctaacgtgaaaccaatggcatacgctaataccttgttgcaactgggcatgatgtag

SEQ ID NO: 163231 - DNA, 1500 bp, Artificial Sequence
  derived and/or modified sequence
atggctatggctgaaggggaacgtaccgagtgcgccgagccgcccagagacgaaccccctgctgacggtgcgttaaaacgggctgaggaactaaaaacacaagctaacgactactttaaggcaaaagattacgagaacgccattaaattttacagtcaggctatcgagctgaatccgtccaacgctatttactatgggaacagatcactagcctatctccggacggaatgttacggatatgccctgggagacgccacacgtgcaattgaattggacaaaaaatatatcaaaggatactacagaagagcagctagtaacatggctctgggaaaatttagggccgctcttcgggattacgaaaccgtggtgaaggtcaagccacatgacaaggatgccaagatgaaatatcaggaatgtaataaaatcgttaaacagaaggctttcgaacgcgctatcgcgggggatgaacacaaacgaagcgtggttgattcactagacatcgaatctatgactattgaggatgaatacagcgggcccaagttggaggatgggaaggtcacaataagtttcatgaaagagttgatgcaatggtacaaagaccagaagaaattacacagaaaatgcgcctatcaaatcctagtgcaagtgaaggaagtcttgtcgaaactcagcaccctcgtcgaaactaccctcaaggagaccgagaaaattacagtatgcggggatactcatggacagttttacgatttactgaatattttcgaactcaatggcctcccaagtgagactaacccctacatattcaatggcgacttcgtggacaggggttccttcagtgtagaagtcatccttactctcttcggctttaagctcctgtaccctgaccatttccacctgttgcggggcaatcatgaaaccgataatatgaatcagatttacggatttgagggcgaagttaaggccaagtacacagctcagatgtacgaactcttcagtgaagtgttcgagtggttgcctctcgctcagtgcattaatggtaaagtgcttatcatgcatggaggacttttttccgaggacggtgtcactttagacgacattagaaaaatcgaacgaaatcgacaaccacccgactccggtcccatgtgcgaccttctttggagcgacccccagccccagaacgggcgttctatcagcaaacgcggagtgtcctgccaatttggtccagatgtcacaaaagcatttctggaagaaaataatttagactatatcatccggtcacacgaggtgaaggctgaaggatatgaagtggcacacgggggcagatgcgtaacagtttttagcgcaccaaattactgcgatcaaatgggcaacaaggcaagctacatacacttacaaggcagcgacctgagaccgcagtttcaccaattcactgctgtgccccaccctaatgtaaagccaatggcctacgcaaatacacttctgcagctgggcatgatgtag

SEQ ID NO: 163232 - DNA, 1500 bp, Artificial Sequence
  derived and/or modified sequence
atggccatggccgagggcgagagaaccgagtgcgccgagccccccagagacgagccccccgccgacggcgccctgaagagagccgaggagctgaagacccaggccaacgactacttcaaggccaaggactacgagaacgccatcaagttctacagccaggccatcgagctgaaccccagcaacgccatctactacggcaacagaagcctggcctacctgagaaccgagtgctacggctacgccctgggcgacgccaccagagccatcgagctggacaagaagtacatcaagggctactacagaagagccgccagcaacatggccctgggcaagttcagagccgccctgagagactacgagaccgtggtgaaggtgaagccccacgacaaggacgccaagatgaagtaccaggagtgcaacaagatcgtgaagcagaaggccttcgagagagccatcgccggcgacgagcacaagagaagcgtggtggacagcctggacatcgagagcatgaccatcgaggacgagtacagcggccccaagctggaggacggcaaggtgaccatcagcttcatgaaggagctgatgcagtggtacaaggaccagaagaagctgcacagaaagtgcgcctaccagatcctggtgcaggtgaaggaggtgctgagcaagctgagcaccctggtggagaccaccctgaaggagaccgagaagatcaccgtgtgcggcgacacccacggccagttctacgacctgctgaacatcttcgagctgaacggcctgcccagcgagaccaacccctacatcttcaacggcgacttcgtggacagaggcagcttcagcgtggaggtgatcctgaccctgttcggcttcaagctgctgtaccccgaccacttccacctgctgagaggcaaccacgagaccgacaacatgaaccagatctacggcttcgagggcgaggtgaaggccaagtacaccgcccagatgtacgagctgttcagcgaggtgttcgagtggctgcccctggcccagtgcatcaacggcaaggtgctgatcatgcacggcggcctgttcagcgaggacggcgtgaccctggacgacatcagaaagatcgagagaaacagacagccccccgacagcggccccatgtgcgacctgctgtggagcgacccccagccccagaacggcagaagcatcagcaagagaggcgtgagctgccagttcggccccgacgtgaccaaggccttcctggaggagaacaacctggactacatcatcagaagccacgaggtgaaggccgagggctacgaggtggcccacggcggcagatgcgtgaccgtgttcagcgcccccaactactgcgaccagatgggcaacaaggccagctacatccacctgcagggcagcgacctgagaccccagttccaccagttcaccgccgtgccccaccccaacgtgaagcccatggcctacgccaacaccctgctgcagctgggcatgatgtag

SEQ ID NO: 163233 - DNA, 1461 bp, Artificial Sequence
  derived and/or modified sequence
atggccatggccgagggcgagagaaccgagtgcgccgagccccccagagacgagccccccgccgacggcgccctgaagagagccgaggagctgaagacccaggccaacgactacttcaaggccaaggactacgagaacgccatcaagttctacagccaggccatcgagctgaaccccagcaacgccatctactacggctacgccctgggcgacgccaccagagccatcgagctggacaagaagtacatcaagggctactacagaagagccgccagcaacatggccctgggcaagttcagagccgccctgagagactacgagaccgtggtgaaggtgaagccccacgacaaggacgccaagatgaagtaccaggagtgcaacaagatcgtgaagcagaaggccttcgagagagccatcgccggcgacgagcacaagagaagcgtggtggacagcctggacatcgagagcatgaccatcgaggacgagtacagcggccccaagctggaggacggcaaggtgaccatcagcttcatgaaggagctgatgcagtggtacaaggaccagaagaagctgcacagaaagtgcgcctaccagatcctggtgcaggtgaaggaggtgctgagcaagctgagcaccctggtggagaccaccctgaaggagaccgagaagatcaccgtgtgcggcgacacccacggccagttctacgacctgctgaacatcttcgagctgaacggcctgcccagcgagaccaacccctacatcttcaacggcgacttcgtggacagaggcagcttcagcgtggaggtgatcctgaccctgttcggcttcaagctgctgtaccccgaccacttccacctgctgagaggcaaccacgagaccgacaacatgaaccagatctacggcttcgagggcgaggtgaaggccaagtacaccgcccagatgtacgagctgttcagcgaggtgttcgagtggctgcccctggcccagtgcatcaacggcaaggtgctgatcatgcacggcggcctgttcagcgaggacggcgtgaccctggacgacatcagaaagatcgagagaaacagacagccccccgacagcggccccatgtgcgacctgctgtggagcgacccccagccccagaacggcagaagcatcagcaagagaggcgtgagctgccagttcggccccgacgtgaccaaggccttcctggaggagaacaacctggactacatcatcagaagccacgaggtgaaggccgagggctacgaggtggcccacggcggcagatgcgtgaccgtgttcagcgcccccaactactgcgaccagatgggcaacaaggccagctacatccacctgcagggcagcgacctgagaccccagttccaccagttcaccgccgtgccccaccccaacgtgaagcccatggcctacgccaacaccctgctgcagctgggcatgatgtag

SEQ ID NO: 163234 - DNA, 1458 bp, Artificial Sequence
  derived and/or modified sequence
tgaatggccgagggcgagagaaccgagtgcgccgagccccccagagacgagccccccgccgacggcgccctgaagagagccgaggagctgaagacccaggccaacgactacttcaaggccaaggactacgagaacgccatcaagttctacagccaggccatcgagctgaaccccagcaacgccatctactacggcaacagaagcctggcctacctgagaaccgagtgctacggctacgccctgggcgacgccaccagagccatcgagctggacaagaagtacatcaagggctactacagaagagccgccagcaacatggccctgggcaagttcagagccgccctgagagactacgagaccgtggtgaaggtgaagccccacgacaaggacgccaagatgaagtaccaggagtgcaacaagatcgtgaagcagaaggccttcgagagagccatcgccggcgacgagcacaagagaagcgtggtggacagcctggacatcgagagcatgaccatcgaggacgagtacagcggccccaagctggaggacggcaaggtgaccatcagcttcatgaaggagctgatgcagtggtacaaggaccagaagaagctgcacagaaagtgcgcctaccagatcctggtgcaggtgaaggaggtgctgagcaagctgagcaccctggtggagaccaccctgaaggagaccgagaagatcaccgtgtgcggcgacacccacggccagttctacgacctgctgaacatcttcgagctgaacggcctgcccagcgagaccaacccctacatcttcaacggcgacttcgtggacagaggcagcttcagcgtggaggtgatcctgaccctgttcggcttcaagctgctgtaccccgaccacttccacctgctgagaggcaaccacgagaccgacaacatgaaccagatctacggcttcgagggcgaggtgaaggccaagtacaccgcccagatgtacgagctgttcagcgaggtgttcgagtggctgcccctggcccagtgcatcaacggcaaggtgctgatcatgcacggcggcctgttcagcgaggacggcgtgaccctggacgacatcagaaagatcgagagaaacagacagccccccgacagcggccccatgtgcgacctgctgtggagcgacccccagccccagaacggcagaagcatcagcaagagaggcgtgagctgccagttcggccccgacgtgaccaaggccttcctggaggagaacaacctggactacatcatcagaagccacgaggtgaaggccgagggctacgaggtggcccacggcggcagatgcgtgaccgtgttcagcgcccccaactactgcgaccagatgggcaacaaggccagctacatccacctgcagggcagcgacctgagaccccagttccaccagttcaccgccgtgggcagacccagcagcggcagctag

SEQ ID NO: 163235 - protein, 416 aa, Artificial Sequence
  derived and/or modified sequence
MLLILLSVALLALSSAQNLNEDVSQEESPSLIAGNPQGAPPQGGNKPQGPPSPPGKPQGPPPQGGNQPQGPPPPPGKPQGPPPQGGNKPQGPPPPGKPQGPPPQGDKSRSPRSPPGKPQGPPPQGGNQPQGPPPPPGKPQGPPPQGGNKPQGPPPPGKPQGPPPQGDNKSRSSRSPPGKPQGPPPQGGNQPQGPPPPPGKPQGPPPQGGNKPQGPPPPGKPQGPPPQGDNKSQSARSPPGKPQGPPPQGGNQPQGPPPPPGKPQGPPPQGGNKPQGPPPPGKPQGPPPQGGSKSRSSRSPPGKPQGPPPQGGNQPQGPPPPPGKPQGPPPQGGNKPQGPPPPGKPQGPPPQGGSKSRSARSPPGKPQGPPQQEGNNPQGPPPPAGGNPQQPQAPPAGQPQGPPRPPQGGRPSRPPQ

SEQ ID NO: 163236 - DNA, 930 bp, Artificial Sequence
  derived and/or modified sequence
atgctgctgatactcctgtctgtcgcccttctggccttaagtagtgcgcagagccttaacgaggatgtgtcccaagaggaatcgccgtctgttatttcaggaaagcctgaaggccgcaggcctcagggtggaaatcagccacagagaacaccgcccccgcccggcaaaccggagggcaggcctcctcagggtggtaaccagagccaggggcctccaccacgccccggaaagcctgaaggacctcctccgcaaggcggaaatcagagccagggcccacccccccgccccggcaagccagagggccaaccccctcagggaggaaatcagtcacagggtccgcctcctagaccagggaagcccgagggccctccacctcaaggagggaatcagtcccagggtccccccccccgccccgggaagcctgagggtcctcctcctcagggtgggaatcagtctcaaggaccaccaccaagaccgggcaaaccagagggcccaccaccccaaggtggcaaccaaagccagggtcccccaccccatcctggcaaaccagaggggcctcctccccagggcgggaatcaaagtcaggggccacctccgcgccctggaaagcctgagggcccccctccacaggggggcaatcagtcgcaaggccctcctccgcgcccaggaaaacccgagggaccgccttcgcagggtgggaacaaaccgcagggtccaccaccccaccccggcaaacctcaaggaccaccaccacaggagggtaataagccccaacggccccctccaccagggcgaccacaaggcccgccgccacctggcgggaacccccagcaacccctgccacctccagcaggtaaaccacagggtcccccacctcctccccagggtggcagaccacacaggcccccgcagggccagcccccacaatag

SEQ ID NO: 163237 - DNA, 930 bp, Artificial Sequence
  derived and/or modified sequence
atgctgctgatcctgctgagcgtggccctgctggccctgagcagcgctcagtccctgaacgaagacgttagccaggaggagtcaccatccgtcatatccggaaagcccgaaggacggagacctcaggggggaaaccagccccagcggacccctcccccccccgggaaaccagaggggcgcccccctcagggggggaaccagagccaggggccccctccccgcccaggcaagcccgagggaccccccccccagggcggaaaccagtcccagggacccccccctcggccggggaaacccgagggtcagccgccccaggggggaaaccaatcacaaggcccccccccccggccaggcaagcccgaggggcccccaccccaaggcgggaaccaatctcagggacctcccccgaggccaggcaaacccgaggggccaccccctcagggaggaaatcagagtcaaggacccccgccacgcccggggaaaccggaagggccgcctccccaaggagggaatcagtcacagggaccaccccctcacccgggtaaacccgagggacccccccctcagggagggaatcagtctcagggcccaccccctcgtccgggcaagcctgaaggaccccccccacaggggggaaaccagtctcaaggaccaccaccgcgtcccgggaagccagagggacctcctagtcagggggggaataaaccgcaagggcccccacctcaccccggcaaaccccagggcccgcccccccaggaaggaaataaaccacagcgcccccctcctccaggccgccctcagggtcctccccctccaggaggaaacccacagcagcctcttcccccgccagccggcaagccccagggcccacccccccctccgcaaggcggtaggccccatcgcccccctcaggggcaacctccccagtag

SEQ ID NO: 163238 - DNA, 930 bp, Artificial Sequence
  derived and/or modified sequence
atgctgctgatcctgctgagcgtggccctgctggccctgagcagcgcgcaaagtcttaatgaagacgtgtcccaggaggagtcacccagcgtgatcagtggtaagcccgaaggtagacggcctcagggtggcaatcagccccagaggacaccacctccaccagggaagccagaagggcggcctcctcagggcgggaaccaatcgcaggggccacctccaagacccggaaagcccgaaggcccccctccgcaaggcggaaatcagtctcagggacccccaccacgaccgggcaagccggagggccaacctcctcagggcgggaatcaaagtcaggggccgcctccccggcctgggaaaccggagggtccccctccccagggaggcaaccaatcccagggccctccccccagacctgggaaacccgaggggccccccccacagggcggaaatcaaagccagggccctcctccccaccccggaaaaccagaaggcccccccccccaaggaggcaatcagagccaaggcccacctccgaggccagggaagcctgagggccctcccccccagggtggcaaccaaagccaaggcccacccccacggcccggcaaaccggaggggccaccgccgcaaggaggcaatcaatcccaaggtccacccccaaggcccggcaagccagagggtccaccatcacagggtggcaataaaccacaaggccctccaccccatcccgggaagcctcagggccctcctccacaggaagggaacaagccacagaggccgcccccccctggaaggccgcaaggaccccccccacctgggggaaacccacagcagcctctaccgccacctgcaggcaagccccaggggcctccccctcccccgcagggtgggcggcctcaccgcccacctcagggtcagccaccccagtag

SEQ ID NO: 163239 - DNA, 537 bp, Artificial Sequence
  derived and/or modified sequence
atgttgctgatcctgttatccgtggctctgctcgccctgagctctgctcagaatttaaacgaagacgtgtcacaggaagagagtccttccctcattgctggcaacccacagggacctagtccgcagggaggaaacaagcctcagggaccaccccctcctccaggtaaaccgcagggtccaccgccacaaggcgggaataagccgcagggccccccaccgcctggaaaacctcaagggccaccccctcagggagataagagtagatccccacgctcccctccaggcaaacctcagggcccacctccccagggcggcaagccccaggggcctccagctcaggggggaagtaagtcccagtcggctcggagtccacctggaaagccccaaggcccaccacaacaggaagggaataaccctcaaggtccgcctcctcccgctggcggaaacccccagcaacctcaagcaccaccagccgggcagccacagggtccacccagacccccccagggagggcgacccagcagaccacctcagtag

SEQ ID NO: 163240 - DNA, 597 bp, Artificial Sequence
  derived and/or modified sequence
atgctgctgatcctgctgagcgtggccctgctggccctgagcagcgctcaaaacctgaatgaagacgtgtcacaggaggagagccctagtctcattgccggtaatccacagggtccctccccgcaggggggcaataaaccgcaaggtccccctcctcccccaggcaagccccagggcccgccgcctcaggggggtaacaaaccccaggggcccccccctcctggtaagccccagggtccccctccgcaaggggataaatcccggtccccccgcagtcccccgggcaaaccgcagggcccacctcctcaggggggcaagccccaaggccctcctccacagggcggcaacaagcctcaggggccacctccaccaggtaagcctcaaggccccccagcacagggtggctctaaatcacagagtgctcgctcgccacctggaaaaccgcagggccccccacaacaggagggaaacaaccctcagggccccccccctccggcaggaggaaacccccagcagcctcaggccccccctgctggccaacctcaggggcccccacgcccaccacagggcgggcggcctagtaggccacctcaatag

SEQ ID NO: 163241 - DNA, 1251 bp, Artificial Sequence
  derived and/or modified sequence
atgctgctgatcctgctgagcgtggccctgctggccctgagcagcgcccagaacctgaatgaagacgtgtcgcaggaggagtcgccttccctcatcgccggaaatcctcagggggcaccaccccagggtggtaataagccccagggccctccatcaccaccaggtaaaccccagggacctccgccacaaggcggtaaccagcctcaaggtcctccaccaccccccggcaaaccccaggggccaccaccccaaggcggcaacaaaccacaggggccacccccaccgggcaaacctcagggccctccgccacagggtgataagtctcgcagccctaggtcccctcccggcaaaccgcagggccccccgccgcagggcggaaaccaaccccaaggtccccccccccctccaggcaagccacagggaccgccaccccaaggagggaataaaccccaggggccccccccaccaggtaaacctcaaggccctcccccccaaggcgacaacaaatcaagatcctcgagatcccctcccggaaagccccagggaccacctccgcagggagggaaccagccccaaggtccgccacccccgcctggaaagccgcagggccccccaccacaaggaggcaataagccacaaggacctcctcctcctgggaagcctcagggccctccaccccaaggagacaacaaatcgcagtcggctcgatccccgcctgggaaaccacagggaccaccgccacagggtgggaatcagcctcaagggcctcctccacctcccggcaagccacaaggaccgcctccgcagggcgggaacaaacctcagggcccgcccccaccaggaaagcctcaaggccccccccctcagggtggcagtaagtctcgctctagtcggagccctcccgggaagccccagggcccacccccgcagggagggaatcaaccccaaggcccaccaccacccccaggaaagccccaaggcccgccaccacaaggggggaataaaccccaggggccccctccacccggtaagccacaggggccccctccccagggcggctctaagagcaggtcagcgcggtcaccacccggaaagccccaaggcccccctcagcaggagggaaacaatcctcaagggcccccacccccggccgggggtaatccccagcagccccaggccccccctgccggacaaccccagggaccacctaggccacctcaggggggcagacctagccgccccccccagtag

SEQ ID NO: 163242 - DNA, 597 bp, Artificial Sequence
  derived and/or modified sequence
atgcttctgatcctcctcagtgtggctctgctcgccctgtcttctgcccagaatttgaatgaggacgtgagccaggaagagagcccctccctgatcgctggtaaccctcagggacctagcccacagggcggaaacaaaccacagggaccccctcctcctcctgggaagccacagggaccaccccctcaggggggaaataagcctcagggaccacccccaccaggcaaaccacagggccctccacctcagggagataaatcccgttcaccacggagtccccctgggaaacctcagggccctccacctcagggcggtaagccacaggggccacccccacagggtggtaacaaaccccagggccctcctcctcccggtaaacctcaggggcctccagcgcagggcggaagcaagagtcagtcggctcggagtcccccaggcaaaccacagggaccacctcagcaagagggtaacaacccccaaggcccaccccctcccgctggtgggaatccccagcaaccacaggcaccgccagctggacagccacaaggtccgccaagaccccctcagggtggacgcccatctcgaccgcctcaatag

SEQ ID NO: 163243 - DNA, 537 bp, Artificial Sequence
  derived and/or modified sequence
atgctgctgatcttattgtctgtagccctgttggcgctgagctccgctcagaaccttaatgaggacgtgtctcaagaagagtcaccctcacttattgcgggaaacccccagggcccatccccccagggaggcaataaacctcagggtcccccaccccctccaggcaagccgcagggccctcccccacagggtggaaataagcctcagggcccaccccctccgggaaaaccccagggccctccccctcagggcgacaagtctcgatcacccaggtccccccctggaaagccgcaggggccacctcctcagggcggtaagccacagggtcctcccgcacaaggagggagcaagagtcagagtgcaagaagccctccaggtaagccccagggaccgccacaacaggagggcaacaatcctcagggtccacctccaccagctggagggaatccacagcagcctcaagctccccctgccggacaaccacaggggcctcctcgccctccccagggcggaaggccaagccgccctcctcagtag

SEQ ID NO: 163244 - DNA, 1251 bp, Artificial Sequence
  derived and/or modified sequence
atgttacttattcttctttctgtagcactgcttgcactgagcagtgctcaaaatctgaacgaagacgtgtcccaggaagagagtccttctctcatcgctgggaatccccagggggcacctccccagggtgggaacaagcctcaaggccctcccagtccccctgggaaaccccagggtccacctccccagggcggtaaccagccgcagggccctcctcccccacccggtaagccccaaggaccccctcctcagggcggaaacaagccccaggggcctccacctcccggaaaaccacagggcccaccccctcagggcgataagtctaggagcccccgaagcccaccagggaagccacaggggccaccccctcaaggtggcaaccagccacagggacccccacctcctcccggaaaaccccagggccctccccctcagggaggaaataaaccgcagggcccaccacctcctggcaagccacagggacctccaccacaaggcgataataaatcaagatcttcacgcagtcctccagggaaaccccagggacctccccctcaggggggtaatcagccccaggggccaccgcctccacctggaaagccacagggacctccgccacaaggaggcaacaagccccagggcccaccaccgcctgggaagccacagggcccacctccacagggcgataacaagagtcaatccgcgcgttctccccctggaaagccccagggccctccccctcaaggaggaaaccaaccacagggtcctccccctccgcctggcaagccccaggggcctccccctcagggcggaaataaaccccaaggcccaccacccccaggcaagcctcaaggcccaccccctcaggggggaagcaaatcccgctcttctcggtccccccctggcaagccgcaggggccaccgccacagggcggaaatcagcctcaaggaccaccacctcccccaggaaaaccccagggtcctcctccccaggggggaaataagccgcagggcccaccacccccagggaagccacaaggacctcctccccagggcggttctaagagtcgaagcgctaggtctcctcctgggaaacctcagggcccacctcagcaggaggggaataacccacagggcccaccacctccagccggtggaaacccacagcagccacaggccccaccggctgggcaaccacagggccctccgaggccaccccaagggggaaggccttcgagaccaccacaatag

SEQ ID NO: 163245 - protein, 309 aa, Artificial Sequence
  derived and/or modified sequence
MLLILLSVALLALSSAQSLNEDVSQEESPSVISGKPEGRRPQGGNQPQRTPPPPGKPEGRPPQGGNQSQGPPPRPGKPEGPPPQGGNQSQGPPPRPGKPEGQPPQGGNQSQGPPPRPGKPEGPPPQGGNQSQGPPPRPGKPEGPPPQGGNQSQGPPPRPGKPEGPPPQGGNQSQGPPPHPGKPEGPPPQGGNQSQGPPPRPGKPEGPPPQGGNQSQGPPPRPGKPEGPPSQGGNKPQGPPPHPGKPQGPPPQEGNKPQRPPPPGRPQGPPPPGGNPQQPLPPPAGKPQGPPPPPQGGRPHRPPQGQPPQ

SEQ ID NO: 163246 - protein, 309 aa, Artificial Sequence
  derived and/or modified sequence
MLLILLSVALLALSSAQSLNEDVSQEESPSVISGKPEGRRPQGGNQPQRTPPPPGKPEGRPPQGGNQSQGPPPRPGKPEGPPPQGGNQSQGPPPRPGKPEGQPPQGGNQSQGPPPRPGKPEGPPPQGGNQSQGPPPRPGKPEGPPPQGGNQSQGPPPHPGKPEGPPPQGGNQSQGPPPRPGKPEGPPPQGGNQSQGPPPRPGKPEGPPPQGGNQSQGPPPRPGKPEGPPSQGGNKPQGPPPHPGKPQGPPPQEGNKPQRPPPPGRPQGPPPPGGNPQQPLPPPAGKPQGPPPPPQGGRPHRPPQGQPPQ

SEQ ID NO: 163247 - DNA, 693 bp, Artificial Sequence
  derived and/or modified sequence
atggagaagcccagactgtaccagaagtacaagatcagcagagtgtggtggagactgcccgtgatccccgccaccggcgaggccgaggacaacagactgaaccccgagggcagaggctgcggcgagcccagaagcagacactgcacccccgcctggaccaccaccgccaagctgcacctgaagaccatcatcagcctgcagcccctgaacatgtaccagatggagcccggcgtgggcagcatcagaaccagccccgccctgcagagcccccccgccctgaccagaggccccagcgcctgggacaccgccatcagaaaggccctgagcttcggcgtgggcctgggcgtgctggtgctggtgtgcctgttctaccacttcgtgaccctggcccccatcctgcagttcgccagcctgccctgcctgctggaggccggcgcccagatgagcagacaccccgtgaccacccaggtgtgcgtgatgcccgccagactgagcctgggcagcggcatcagcagaaacctgctgagactgagcgtgtgccacttcaccctgctgctgcccttcagaagcctgagaccctgccccctgagcagcagagacatggtgctgagctacgagctgtggctgctgtgcgacttctacatcgccccccccgacagcagcggcagcggcatctgcaagaaggccatctag

SEQ ID NO: 163248 - DNA, 414 bp, Artificial Sequence
  derived and/or modified sequence
atgagccagttccagggcaagggccccagatggaccgtgctgatcatgagcaaggtgggcctgagaggcggcctgagcgaccagatggccatgaaggtgctggaccccctgagacaggccctggacagcagcatgcagagcaacaacctgtgccagcacccccagcccctggccctgcacgtgagcgccgccgtggccagcgccggcgcccaggccagcagcctgctgggccccctgccccacctgagcagcttcgccttccagcccgcccacagcctgctgagcctgctgggcagccacggcgccgaggtgagcaagaagatggccctgctggccagagagagaagccccgcccacctggtggccttccccggcagactgaccgccaccccccccggcctgcccaccttctag

SEQ ID NO: 163249 - DNA, 930 bp, Artificial Sequence
  derived and/or modified sequence
atgctgctgatcctgctgagcgtggccctgctggccctgagcagcgcccagagcctgaacgaggacgtgagccaggaggagagccccagcgtgatcagcggcaagcccgagggcagaagaccccagggcggcaaccagccccagagaaccccccccccccccggcaagcccgagggcagacccccccagggcggcaaccagagccagggccccccccccagacccggcaagcccgagggcccccccccccagggcggcaaccagagccagggccccccccccagacccggcaagcccgagggccagcccccccagggcggcaaccagagccagggccccccccccagacccggcaagcccgagggcccccccccccagggcggcaaccagagccagggccccccccccagacccggcaagcccgagggcccccccccccagggcggcaaccagagccagggccccccccccagacccggcaagcccgagggcccccccccccagggcggcaaccagagccagggcccccccccccaccccggcaagcccgagggcccccccccccagggcggcaaccagagccagggccccccccccagacccggcaagcccgagggcccccccccccagggcggcaaccagagccagggccccccccccagacccggcaagcccgagggcccccccagccagggcggcaacaagccccagggcccccccccccaccccggcaagccccagggcccccccccccaggagggcaacaagccccagagaccccccccccccggcagaccccagggcccccccccccccggcggcaacccccagcagcccctgcccccccccgccggcaagccccagggcccccccccccccccccagggcggcagaccccacagacccccccagggccagcccccccagtag

SEQ ID NO: 163250 - DNA, 930 bp, Artificial Sequence
  derived and/or modified sequence
atgctgctgatcctgctgagcgtggccctgctggccctgagcagcgcccagagcctgaacgaggacgtgagccaggaggagagccccagcgtgatcagcggcaagcccgagggcagaagaccccagggcggcaaccagccccagagaaccccccccccccccggcaagcccgagggcagacccccccagggcggcaaccagagccagggccccccccccagacccggcaagcccgagggcccccccccccagggcggcaaccagagccagggccccccccccagacccggcaagcccgagggccagcccccccagggcggcaaccagagccagggccccccccccagacccggcaagcccgagggcccccccccccagggcggcaaccagagccagggccccccccccagacccggcaagcccgagggcccccccccccagggcggcaaccagagccagggcccccccccccaccccggcaagcccgagggcccccccccccagggcggcaaccagagccagggccccccccccagacccggcaagcccgagggcccccccccccagggcggcaaccagagccagggccccccccccagacccggcaagcccgagggcccccccccccagggcggcaaccagagccagggccccccccccagacccggcaagcccgagggcccccccagccagggcggcaacaagccccagggcccccccccccaccccggcaagccccagggcccccccccccaggagggcaacaagccccagagaccccccccccccggcagaccccagggcccccccccccccggcggcaacccccagcagcccctgcccccccccgccggcaagccccagggcccccccccccccccccagggcggcagaccccacagacccccccagggccagcccccccagtag

SEQ ID NO: 163251 - DNA, 321 bp, Artificial Sequence
  derived and/or modified sequence
atgccagatgcccagttccaccgcatcatggccagcgagaagctgtccttcatccgggtgcaggagaatgagtacagcctgaacagcgtgcgggccagcggcttccagagggtgctgaacctgctggagagcagcctgctgtggctgtacctgcccaccacagagaacctgctgtgcagcagcccccggctgagcggggaccccaccggctacgccgaccccccaccccagaaccacagaagacggcagagccgcagcaccccccggctgcccggccctggccagctgctgagcagcaggaccaggaccctggagggctag

SEQ ID NO: 163252 - DNA, 930 bp, Artificial Sequence
  derived and/or modified sequence
atgctgctgatcctgctgtctgtggccctgctggccctgagcagcgcccagagcctgaatgaagatgtgtcccaggaggagagccccagcgtcatcagcggcaagccagagggcagaagaccccagggcggcaaccagccccagaggaccccacctcctcctgggaagccagagggccggcccccccagggcggcaaccagagccagggccccccacccaggcctgggaagccagagggccccccaccccagggcggcaaccagagccagggccccccacccaggcctgggaagccagagggccagcccccccagggcggcaaccagagccagggccccccacccaggcctgggaagccagagggccccccaccccagggcggcaaccagagccagggccccccacccaggcctgggaagccagagggccccccaccccagggcggcaaccagagccagggccccccacccaggcctgggaagccagagggccccccaccccagggcggcaaccagagccagggccccccaccccaccctgggaagccagagggccccccaccccagggcggcaaccagagccagggccccccacccaggcctgggaagccagagggccccccaccccagggcggcaaccagagccagggccccccacccaggcctgggaagccagagggcccccccagccagggcggcaacaagccccagggccccccaccccaccctgggaagccccagggccccccaccccaggagggcaacaagccccagaggcctcctcctcctggccggccccagggccccccacctcctgggggcaacccccagcagcccctgcccccacctgctgggaagccccagggccccccacctccaccccagggcggccggccccaccggcccccccagggccagcccccccagtag

SEQ ID NO: 163253 - DNA, 930 bp, Artificial Sequence
  derived and/or modified sequence
atgctgctgatcctgctgtctgtggccctgctggccctgagcagcgcccagagcctgaatgaagatgtgtcccaggaggagagccccagcgtcatcagcggcaagccagagggcagaagaccccagggcggcaaccagccccagaggaccccacctcctcctgggaagccagagggccggcccccccagggcggcaaccagagccagggccccccacccaggcctgggaagccagagggccccccaccccagggcggcaaccagagccagggccccccacccaggcctgggaagccagagggccagcccccccagggcggcaaccagagccagggccccccacccaggcctgggaagccagagggccccccaccccagggcggcaaccagagccagggccccccacccaggcctgggaagccagagggccccccaccccagggcggcaaccagagccagggccccccaccccaccctgggaagccagagggccccccaccccagggcggcaaccagagccagggccccccacccaggcctgggaagccagagggccccccaccccagggcggcaaccagagccagggccccccacccaggcctgggaagccagagggccccccaccccagggcggcaaccagagccagggccccccacccaggcctgggaagccagagggcccccccagccagggcggcaacaagccccagggccccccaccccaccctgggaagccccagggccccccaccccaggagggcaacaagccccagaggcctcctcctcctggccggccccagggccccccacctcctgggggcaacccccagcagcccctgcccccacctgctgggaagccccagggccccccacctccaccccagggcggccggccccaccggcccccccagggccagcccccccagtag

SEQ ID NO: 163254 - DNA, 744 bp, Artificial Sequence
  derived and/or modified sequence
atgctgctgattcttttatccgtggccctcctggccctgtcctccgctgagagcagtagcgaggacgttagtcaggaggagagccttttcttgatatccgggaagcccgagggtcggaggccacaggggggaaaccaaccacagaggcctccgccaccccccggcaagccccagggcccccccccacagggaggtaatcagtcacagggccctccaccacctccaggaaaaccagaaggccgccccccacagggcggcaatcagagccagggaccacccccccatccaggcaagcctgaacggccacctcctcaggggggaaatcagagtcagggaacacccccccctcccggcaaacccgagcgcccacctccgcaagggggcaatcagagccatagaccccctcccccaccgggaaaaccagagcgccctccgccacaggggggtaaccaaagccaggggccccctccccatccaggcaaacccgaaggaccacctccacaagaaggcaataagagccggtcagccagatcacccccagggaaaccccagggtccaccacagcaggaaggtaacaagccccaaggtcctcccccccctgggaagccccagggtcctccacctgcaggagggaatcctcagcaaccccaagccccccccgccggcaagcctcaaggaccaccgccgcctcctcaaggcggtcgcccccctcggcctgcacaaggccaacaaccgcctcaatag

SEQ ID NO: 163255 - DNA, 744 bp, Artificial Sequence
  derived and/or modified sequence
atgttgctgatccttctgtctgtagcgctgctggccctgtcctcggccgagagctcctccgaagatgtaagtcaggaggagagcctcttcctgatatctggaaagccagagggtcgtaggccccagggcggcaaccagccccagcggcctccccctccgcccggtaagcctcagggccctccaccccaggggggcaaccaatcacagggccccccaccccctcctggtaagccagaggggcggcccccccagggcggaaaccagagccagggtcctccacctcatcccgggaagcctgagcggccaccacctcaaggcgggaaccagtcgcagggcacaccacctccacccggaaagcctgagcgccccccaccacagggagggaatcagagccacaggcccccccctccgcccggaaaaccagagaggccgcccccccaggggggtaaccagtcgcaaggaccaccaccacatcctggcaaacctgagggccccccaccacaggaaggcaataaatcgagatccgcaagaagcccccctggcaaaccccaagggccccctcagcaggaaggaaacaaaccgcagggcccacctccccctggtaagccacaagggcctcctcctgctggaggcaacccccaacagccgcaggcaccccctgccggaaagccccaaggacctcctccccctccccagggtggcaggcccccgcgccccgcccagggtcaacagcccccgcagtag

SEQ ID NO: 163256 - DNA, 537 bp, Artificial Sequence
  derived and/or modified sequence
atgctgctgatcctgctgagcgtggccctgctggccctgagcagcgccgagagctccagcgaagacgtttcccaggaggagtccctgttcctgatctctggaaaacctgaaggccgacggccacaaggtgggaatcagcctcaaagacctccccccccaccaggtaagccgcagggaccccccccgcagggtggcaatcagagccagggaccccctccccctccagggaagccagagggcagacctccccagggcgggaaccagagccaaggcccccccccccaccctgggaagccagagcggccacccccgcagggtggaaaccaatcacagggcaaaccccaaggaccccctcagcaagaaggaaacaagccccagggcccccccccccccggtaagccccagggtcctccccctgctggcggcaacccccagcaaccccaagcaccccctgcaggcaagccgcagggaccccctcctcctccccagggcgggaggccaccccgtcctgctcaggggcaacagccccctcagtag

SEQ ID NO: 163257 - protein, 559 aa, Artificial Sequence
  derived and/or modified sequence
MRRLSSWRKMATAEKQKHDGRVKIGHYILGDTLGVGTFGKVKVGKHELTGHKVAVKILNRQKIRSLDVVGKIRREIQNLKLFRHPHIIKLYQVISTPSDIFMVMEYVSGGELFDYICKNGRLDEKESRRLFQQILSGVDYCHRHMVVHRDLKPENVLLDAHMNAKIADFGLSNMMSDGEFLRTSCGSPNYAAPEVISGRLYAGPEVDIWSSGVILYALLCGTLPFDDDHVPTLFKKICDGIFYTPQYLNPSVISLLKHMLQVDPMKRATIKDIREHEWFKQDLPKYLFPEDPSYSSTMIDDEALKEVCEKFECSEEEVLSCLYNRNHQDPLAVAYHLIIDNRRIMNEAKDFYLATSPPDSFLDDHHLTRPHPERVPFLVAETPRARHTLDELNPQKSKHQGVRKAKWHLGIRSQSRPNDIMAEVCRAIKQLDYEWKVVNPYYLRVRRKNPVTSTYSKMSLQLYQVDSRTYLLDFRSIDDEITEAKSGTATPQRSGSVSNYRSCQRSDSDAEAQGKSSEVSLTSSVTSLDSSPVDLTPRPGSHTIEFFEMCANLIKILAQ

SEQ ID NO: 163258 - DNA, 1680 bp, Artificial Sequence
  derived and/or modified sequence
atgcggagactctccagctggcggaaaatggctactgccgagaagcagaagcacgatggtcgggtgaagattgggcattatatattgggcgatacactcggagtgggcacctttggcaaagtaaaggttggcaaacatgagctcaccggccataaggttgccgtgaaaattcttaatagacaaaagatcaggtccctggatgtcgtcggaaagattcgcagagagatccaaaatcttaagctgttcaggcaccctcatattattaaactttaccaagtcatctctactccttccgatatttttatggtgatggaatacgtgtctgggggggaattgtttgattatatctgtaagaatggaagactagacgaaaaggagagtcgcagactgtttcaacaaatcctttccggagtggactattgccaccgtcacatggtggtacatagagatctgaagccagaaaacgttctattagacgcacacatgaatgccaagatcgcagactttgggctgagtaatatgatgtcagacggcgaattcttacgcacatcctgcgggtcacctaactacgccgcaccagaggtgatctctgggcggctgtatgcgggccccgaggtcgatatctggagcagtggcgtgatcctctatgccctgctgtgcggaacacttccgttcgacgacgaccatgttcctactctgtttaagaagatatgtgatgggatcttctatacgccccagtaccttaatccctctgtgatctcactcttgaaacacatgctacaagttgaccctatgaaacgggccacaattaaggacattagagaacacgaatggttcaagcaggatctgcccaagtatttgttccctgaagaccccagctattcttccactatgatcgacgacgaagctctgaaagaagtgtgcgagaagttcgagtgctctgaggaagaagttctctcttgtctctacaacagaaaccaccaggaccctcttgccgtggcgtaccacttgatcattgataataggcgaattatgaacgaggcaaaggacttttacttagccactagcccccctgatagtttcctggacgatcaccacctgacacgacctcatcctgagagggtgccattccttgtggctgaaacacctagggcacggcatactttggatgaattgaaccctcaaaagagcaagcaccagggagtgcgaaaagccaagtggcatcttggcatccgttctcagagcagaccgaacgacataatggccgaagtgtgtcgcgccataaagcagttggactacgagtggaaggtggtgaatccctattaccttagggtccggaggaaaaaccccgtaacgtcgacttactctaaaatgtccttgcagttgtaccaggtagactccagaacgtatctgctggacttccgatcaatcgacgacgagataacagaggcgaagtcagggacagctaccccccagcggtctggaagcgtgtcgaactatcggtcttgccagaggtctgacagcgatgcagaagcccagggaaagtcgagtgaggtgtcattgacatcctctgtcacttctctagatagtagccccgttgacctcacgccaaggcctggtagccatacaatcgagttttttgagatgtgcgccaatctgattaagatactagcccaatag

SEQ ID NO: 163259 - DNA, 1680 bp, Artificial Sequence
  derived and/or modified sequence
atgaggcggctgagctcctggaggaagatggccacagctgagaagcagaagcatgatggccgggtgaagattggccactacatcctgggggacaccctgggcgtgggcaccttcggcaaggtgaaggtgggcaagcatgagctgaccggccacaaggtggccgtgaagatcctgaaccggcagaagatccgcagcctggatgtggtgggcaagatcagaagagagatccagaacctgaagctgttccgccacccccacatcatcaagctgtaccaggtgatcagcacccccagcgacatcttcatggtgatggagtatgtgtctggaggagagctgtttgactacatctgcaagaatggccgcctggatgagaaggagagccggcggctcttccagcagatcctgagcggcgtggactactgccaccgccacatggtggtgcaccgggacctgaagccagaaaatgtgctgctggatgcccacatgaatgccaagattgctgactttggcctgagcaacatgatgtctgatggagagttcctgcggaccagctgtggcagccccaactatgctgcccctgaggtgatcagcggccgcctgtatgccggccctgaggtggacatctggagcagtggagtcatcctgtatgccctgctgtgtggcaccctgccctttgatgatgaccacgtgcccaccctcttcaagaagatctgtgatggcatcttctacaccccccagtacctgaaccccagcgtcatcagcctgctgaagcacatgctgcaggtggaccccatgaagagggccaccatcaaggacatccgggagcacgagtggttcaagcaggacctgcccaagtacctgtttcctgaggaccccagctacagcagcaccatgattgatgatgaggccctgaaggaggtgtgtgagaagtttgagtgcagcgaggaggaggtgctgagctgcctgtacaacagaaaccaccaggaccccctggccgtggcctaccacctgatcatcgacaacagacgcatcatgaatgaggccaaggacttctacctggccaccagccccccagacagcttcctggatgaccaccacctgacccggccccaccctgagcgggtgcccttcctggtggccgagaccccccgggcccggcacaccctggatgagctgaacccccagaagagcaagcaccagggcgtgaggaaggccaagtggcacctgggcatccgcagccagagccggcccaatgacatcatggccgaggtgtgccgggccatcaagcagctggactatgagtggaaggtggtgaacccctactacctgcgggtgcggaggaagaaccctgtgaccagcacctacagcaagatgagcctgcagctgtaccaggtggacagcaggacctacctgctggacttccgcagcattgatgatgagatcacagaggccaagagcggcacagccaccccccagaggagcggctctgtgagcaactaccgcagctgccagaggagtgacagtgatgctgaggcccagggcaagagcagcgaggtgtccctgaccagctctgtgaccagcctggacagcagccctgtggacctgacccccaggcctggcagccacaccatcgagttctttgagatgtgtgccaacctgatcaagatcctggcccagtag

SEQ ID NO: 163260 - DNA, 1680 bp, Artificial Sequence
  derived and/or modified sequence
atgcggcggctgagcagctggcggaagatggccaccgccgagaagcagaagcacgacggacgggtgaaaataggtcactacatcctcggggatactctgggcgtcgggaccttcgggaaagtaaaggtaggaaagcatgagttaacaggtcacaaagttgcagtaaagatcctgaaccgtcaaaagattcgtagcttggatgtggtgggaaaaatccgacgggagatccagaatctcaagctctttcggcatcctcatattatcaagctttaccaagttatctccaccccgtcagacatattcatggtgatggaatacgtgagtgggggagagctgttcgattatatatgcaaaaacggccgcctcgacgagaaagagtcgaggagactcttccagcagatcctgtcaggcgtagattattgtcatcggcacatggtggtacacagagacctcaagccagagaacgtcctcctggatgcacatatgaacgctaagatcgctgactttgggctcagcaatatgatgtctgatggcgaatttcttcggacctcatgcggatcaccaaactatgccgctcctgaggtgatcagcggtaggttgtatgccgggcccgaggtagatatatggtcatcgggtgtgattctctacgcactgctgtgtggtacactgcccttcgacgacgaccatgtacccaccctttttaagaagatatgcgacggaattttctacactccacaatacctcaatccatcagtgattagcctattgaagcatatgcttcaggttgaccccatgaaaagagctacaatcaaagacatccgggaacacgaatggttcaagcaggatcttccaaagtatctgttcccggaggatccatcctatagctcgaccatgattgatgacgaagctctcaaggaagtatgcgagaagttcgaatgctcagaagaagaagtgctgagttgcttgtacaatcggaatcatcaggatccccttgccgtggcctaccaccttatcatcgataaccgacgcatcatgaacgaggctaaagatttttatctggccactagccccccagattctttcctggatgatcatcatctcaccaggccacaccctgagcgggtgccgttccttgtcgcagaaaccccgcgtgcgagacacaccctcgacgagctaaacccccagaagtcaaagcaccagggagtacggaaagcaaaatggcatctgggtatcagaagtcagtcccgccctaatgacattatggctgaagtatgccgggctataaagcaattggactacgaatggaaagttgtgaatccctactacctccgcgtcagacggaagaatccggtcacttctacatactctaaaatgtcccttcaactgtatcaggtggactctagaacgtacctgctagattttcgctccatcgatgatgagattacagaagcgaaaagcggaaccgctactccacagaggtcaggctccgtgtcaaattaccgatcatgtcagaggtctgattctgatgccgaggcccaaggaaaatccagcgaggtgagtctgacgagctccgtcacgtcattggacagtagccccgtggacctgactcctcgccctggctctcacactattgaattcttcgaaatgtgcgcaaatctcattaagattctcgctcagtag

SEQ ID NO: 163261 - DNA, 1680 bp, Artificial Sequence
  derived and/or modified sequence
atgaggcgattatcaagttggcggaagatggccactgctgaaaaacaaaaacacgacgggagagtgaaaattggacactacatcttgggtgatacgcttggcgtgggcacctttggaaaggtgaaagtgggcaagcacgaactcacgggccataaagtggctgtgaagattcttaaccgccagaagattagaagcctcgacgttgtagggaaaattcgaagagaaatccagaacctgaagctcttccgtcaccctcatatcatcaagctgtaccaagtgatctctacccctagcgacatttttatggtgatggaatatgtctcaggcggagagctgttcgattacatctgcaaaaacggcaggttagacgagaaagaatcccgtcggttgttccagcaaatattgtctggagtcgattattgtcaccgccacatggtagtgcatcgcgacttgaagccggagaatgtgcttcttgatgcacacatgaacgcaaaaatagccgattttgggctcagcaatatgatgtccgatggggagtttctgagaactagctgcgggtcacctaattatgccgctccagaagttatctcaggaaggctctacgccggtccggaggtggatatttggagcagcggcgtcatcctgtacgcactgctgtgcggcacactaccctttgatgatgaccatgtcccaactctgttcaaaaagatatgtgatggaatcttttacactcctcagtaccttaacccatccgtgattagcctgcttaagcatatgctgcaggtggacccaatgaaacgggctaccattaaggatattcgcgagcacgaatggttcaagcaggatctgcccaagtatctcttcccggaggaccctagctacagcagcactatgatcgacgacgaggccctcaaggaggtgtgcgaaaaattcgaatgctcagaagaagaggtccttagctgtctgtacaaccgcaatcaccaggatcccctggccgtggcatatcatctgatcatcgacaacaggaggataatgaacgaagcgaaagacttttatctggctacttcacctccagacagcttccttgacgaccatcatcttacccgaccacatccggagagagtgcctttcctggtggccgagacccctcgcgcacgtcacaccctggatgaactcaatccccagaaaagcaaacaccaaggtgtaagaaaggctaagtggcatctgggcatacggtcccagtcccgacctaacgacatcatggcggaagtgtgccgagctataaaacagctcgattacgaatggaaggtggtaaatccttactacctgcgcgtgcggagaaaaaacccagtgacatcaacttattccaagatgagcctgcagctatatcaggtagatagtcgaacatacttactggacttccgttctattgatgacgaaataactgaagccaagagtggcactgccaccccccaaagatccggttccgtgtcaaactaccggtcttgccagcgtagcgacagtgatgctgaggcacagggcaaaagttccgaagtttcactgacctctagcgtgacttccttagactcaagccctgtagacctgactccacggccagggtcacacaccatcgagttcttcgagatgtgcgctaatctgataaagatcctcgctcagtag

SEQ ID NO: 163262 - DNA, 5088 bp, Artificial Sequence
  derived and/or modified sequence
cgcagcgccatgcgcagactcagttcctggagaaagatggcgacagccgagaagcagaaacacgacgggcgggtgaagatcggccactacattctgggtgacacgctgggggtcggcaccttcggcaaagtgaaggttggcaaacatgaattgactgggcataaagtagctgtgaagatactcaatcgacagaagattcggagccttgatgtggtaggaaaaatccgcagagaaattcagaacctcaagcttttcaggcatcctcatataattaaactgtaccaggtcatcagtacaccatctgatattttcatggtgatggaatatgtctcaggaggagagctatttgattatatctgtaagaatggaaggctggatgaaaaagaaagtcggcgtctgttccaacagatcctttctggtgtggattattgtcacaggcatatggtggtccatagagatttgaaacctgaaaatgtcctgcttgatgcacacatgaatgcaaagatagctgattttggtctttcaaacatgatgtcagatggtgaatttttaagaacaagttgtggctcacccaactatgctgcaccagaagtaatttcaggaagattgtatgcaggcccagaggtagatatatggagcagtggggttattctctatgctttattatgtggaacccttccatttgatgatgaccatgtgccaactctttttaagaagatatgtgatgggatcttctatacccctcaatatttaaatccttctgtgattagccttttgaaacatatgctgcaggtggatcccatgaagagggccacaatcaaagatatcagggaacatgaatggtttaaacaggaccttccaaaatatctctttcctgaggatccatcatatagttcaaccatgattgatgatgaagccttaaaagaagtatgtgaaaagtttgagtgctcagaagaggaagttctcagctgtctttacaacagaaatcaccaggatcctttggcagttgcctaccatctcataatagataacaggagaataatgaatgaagccaaagatttctatttggcgacaagcccacctgattcttttcttgatgatcatcacctgactcggccccatcctgaaagagtaccattcttggttgctgaaacaccaagggcacgccatacccttgatgaattaaatccacagaaatccaaacaccaaggtgtaaggaaagcaaaatggcatttaggaattagaagtcaaagtcgaccaaatgatattatggcagaagtatgtagagcaatcaaacaattggattatgaatggaaggttgtaaacccatattatttgcgtgtacgaaggaagaatcctgtgacaagcacttactccaaaatgagtctacagttataccaagtggatagtagaacttatctactggatttccgtagtattgatgatgaaattacagaagccaaatcagggactgctactccacagagatcgggatcagttagcaactatcgatcttgccaaaggagtgattcagatgctgaggctcaaggaaaatcctcagaagtttctcttacctcatctgtgacctcacttgactcttctcctgttgacctaactccaagacctggaagtcacacaatagaattttttgagatgtgtgcaaatctaattaaaattcttgcacaataaacagaaaactttgcttatttcttttgcagcaataagcatgcataataagtcacagccaaatgcttccatttgtaatcaagttatacataattataaccgagggctggcgttttggaatgcaatttgcacagggattggaacatgatttatagttaaaagcctaatatgcagaaatgaattaagatcattttgttgttcattgtgcagtatgtatatagcataatatacacagtgaattataggtctcaggcttacttgatttttggctattttatatttagtgtacacagggctttgaaatattaatttacataaaggccttcatatattattacgtgttatatattacgtgttataaatttattcaataaatatttgcctagaattcccaagacctttataggtgattttgttttctgggctccttaacttcataaatagctagtatcttccagcagtagtaacagtctggataacttcttccatatccctccctctttgtttttttgagacagtgtcactttgtcacccaggctggagtgcaatggtgtggtctcggctcactgcaacctccacctcccgggttcaagtgattctcccgcctcagcttcctgagtagctggaactacaggcgtgtgccaccacacccggctaatttttcgtatttttagtgtagacggggtttcactatgttgcccaggctggtctcgaactcctgaccgcgtgatccaccacctcagcttcccaaagtggtgggattacaggcgtgagccaccgcacccggcctccatatcccccttttaaaattctgtagtgtatggtaagtcatatcagatatcagacctaatttaaatttcattttagctttacaagtccaaaaacacagaatttatatattcagatactctagcactaattttagtcttaaaatattcccacgatattctgtacacaaaatgttctttttgttacaagagctgagttgcatatactgtagataaatcatattatttttgccaatttcacaaattcctctggcccatcatgtcagtcattattgagtatatgcacacattgctacttatttgattatgtatcttttaaattgattcagtgcatagaaaactatctcttacaaactttaagtgctctgatatgacttcccccccaaattttattatgaacatttttaaaaacagaaaaattgaaaaactgtttggtaagcacatgtatatctaccatttagattcagcagttgttaatgttttgtcatttgttttctctatacctatatatgtatagatacagctagttatgcatatatatgcatatatgtgtttgtttgtgtatgtatatatgcttttttccccctgaaccatttggatgttacagacatacttatcaccgtgaaaatacttcaagtatctcctacagataatgacattctcctaaaaatccgtaataccattgtaaaagtaataattccccaatatcatctaatcaagccatatttaaatttctgaagttaactccaaatttctttatagctgattatttcaaactaggatccaattaaagtttacatatgacacttggttataactctttagttggatataacattattattattttgataaaatatggaacaaatcaattctattaataagtggtcacatttgttttgggcttaaattactttttaaagatactggattttcctaagatttctgatttacactgatatttttttttgtcattcttaattgcatcacacaatagatgtaaatgaagatgtagtcacctcagataaaattggtatcgtgtatgataatattgtatcatttatatttgccttatgttaactttaagaaattgatttttttgtattaatcattttcccattgcaacagagctatattttttctattttaagaatcatattttaggattatttttggcaaatacagtgagcacttatgtaaccagatgataatgaactcaaatgtcatgatagcttgcataaatggtgactctagtagatttgactcaagcacttctagaatcatgcactgaattcaaaagaaaaatcttgctgctttttgtccagggcttgttctattcaacttctaatttgaaagctgtacaaagtaatagaagttccatttaaatatgagttcaaaactgtatttactttttatgtggccctctctttaggggattctaattttacttagggtctctaagtgcagcataatgttcctgatgttaacagaagactgtatttttaaagttacaaatttgtatatggaattaagtaatggcgctatatacgctgttgtggggaggggggaagaaaaggaggaaccaattaaataggaccttttaaaaattgttaattttgtaaactttgcttctcttataagttattgtgattcattttagttactgtgttttattttgaaaatatttaaatattgcacttctataaatagtatgataaatgcacagacaattgcagtaaattcttttttaagctaggatatttgaaatgacaacctttggttaagtgtgtcaaggttgcaacagaattttcacaatttttttgttgtttgcaaattgttactaatattgaagaggtaagggaggcaatgcaaatgatttttaatctttttttattatcttttcagcagtttatattttttgtgactttatgcaaccatatttttactttgtcttgacaactgaaagatgtataaggttttttgccagaaatgtactgtatacatagttttaagtataacagattttactgatatgtaaaaattttgccattaaaataaatgatttctcactgagaggaacttttctaccaggttggggcatatgggagcttaatatatcatatctaatttaaaataatttcactgaaataaactccattgcttttacctaatttttttcttgagatgcttttgtagtttttcagagttttagatgattttatacaaaatcctctgcctagcactgctctttttgatgttgtagtgacaccatttacattgaattaatgcttggtagcctggggctagatgtggaactccatggatctgtgttctgactggcacctttggaatgaaagaaaagtgtgtgctgtccaaattttttccccttaattctttccctcatcttctcacccataatagaaattttatttccattgtgagttctgacaagaatgaaattccacatacaacataactgtaaattgttggtaggtagaagttaatatttgtggttcatgtatattttgaccagagtatatttaagtatataatttcagcttccttgatttagaaatatgatataataaagaaaaactccatttatcatctgtta

SEQ ID NO: 163263 - DNA, 1680 bp, Artificial Sequence
  derived and/or modified sequence
atgagaagactgagcagctggagaaagatggccaccgccgagaagcagaagcacgacggcagagtgaagatcggccactacatcctgggcgacaccctgggcgtgggcaccttcggcaaggtgaaggtgggcaagcacgagctgaccggccacaaggtggccgtgaagatcctgaacagacagaagatcagaagcctggacgtggtgggcaagatcagaagagagatccagaacctgaagctgttcagacacccccacatcatcaagctgtaccaggtgatcagcacccccagcgacatcttcatggtgatggagtacgtgagcggcggcgagctgttcgactacatctgcaagaacggcagactggacgagaaggagagcagaagactgttccagcagatcctgagcggcgtggactactgccacagacacatggtggtgcacagagacctgaagcccgagaacgtgctgctggacgcccacatgaacgccaagatcgccgacttcggcctgagcaacatgatgagcgacggcgagttcctgagaaccagctgcggcagccccaactacgccgcccccgaggtgatcagcggcagactgtacgccggccccgaggtggacatctggagcagcggcgtgatcctgtacgccctgctgtgcggcaccctgcccttcgacgacgaccacgtgcccaccctgttcaagaagatctgcgacggcatcttctacaccccccagtacctgaaccccagcgtgatcagcctgctgaagcacatgctgcaggtggaccccatgaagagagccaccatcaaggacatcagagagcacgagtggttcaagcaggacctgcccaagtacctgttccccgaggaccccagctacagcagcaccatgatcgacgacgaggccctgaaggaggtgtgcgagaagttcgagtgcagcgaggaggaggtgctgagctgcctgtacaacagaaaccaccaggaccccctggccgtggcctaccacctgatcatcgacaacagaagaatcatgaacgaggccaaggacttctacctggccaccagcccccccgacagcttcctggacgaccaccacctgaccagaccccaccccgagagagtgcccttcctggtggccgagacccccagagccagacacaccctggacgagctgaacccccagaagagcaagcaccagggcgtgagaaaggccaagtggcacctgggcatcagaagccagagcagacccaacgacatcatggccgaggtgtgcagagccatcaagcagctggactacgagtggaaggtggtgaacccctactacctgagagtgagaagaaagaaccccgtgaccagcacctacagcaagatgagcctgcagctgtaccaggtggacagcagaacctacctgctggacttcagaagcatcgacgacgagatcaccgaggccaagagcggcaccgccaccccccagagaagcggcagcgtgagcaactacagaagctgccagagaagcgacagcgacgccgaggcccagggcaagagcagcgaggtgagcctgaccagcagcgtgaccagcctggacagcagccccgtggacctgacccccagacccggcagccacaccatcgagttcttcgagatgtgcgccaacctgatcaagatcctggcccagtag

SEQ ID NO: 163264 - protein, 683 aa, Artificial Sequence
  derived and/or modified sequence
MSSGTMKFNGYLRVRIGEAVGLQPTRWSLRHSLFKKGHQLLDPYLTVSVDQVRVGQTSTKQKTNKPTYNEEFCANVTDGGHLELAVFHETPLGYDHFVANCTLQFQELLRTTGASDTFEGWVDLEPEGKVFVVITLTGSFTEATLQRDRIFKHFTRKRQRAMRRRVHQINGHKFMATYLRQPTYCSHCREFIWGVFGKQGYQCQVCTCVVHKRCHHLIVTACTCQNNINKVDSKIAEQRFGINIPHKFSIHNYKVPTFCDHCGSLLWGIMRQGLQCKICKMNVHIRCQANVAPNCGVNAVELAKTLAGMGLQPGNISPTSKLVSRSTLRRQGKESSKEGNGIGVNSSNRLGIDNFEFIRVLGKGSFGKVMLARVKETGDLYAVKVLKKDVILQDDDVECTMTEKRILSLARNHPFLTQLFCCFQTPDRLFFVMEFVNGGDLMFHIQKSRRFDEARARFYAAEIISALMFLHDKGIIYRDLKLDNVLLDHEGHCKLADFGMCKEGICNGVTTATFCGTPDYIAPEILQEMLYGPAVDWWAMGVLLYEMLCGHAPFEAENEDDLFEAILNDEVVYPTWLHEDATGILKSFMTKNPTMRLGSLTQGGEHAILRHPFFKEIDWAQLNHRQIEPPFRPRIKSREDVSNFDPDFIKEEPVLTPIDEGHLPMINQDEFRNFSYVSPELQP

SEQ ID NO: 163265 - DNA, 2052 bp, Artificial Sequence
  derived and/or modified sequence
atgtcttctggcaccatgaaattcaatggatatctgcgggtgaggatcggcgaggcagttgggctacaaccgacgcggtggagtctccggcattcacttttcaagaagggtcaccaactgctcgatccctaccttaccgtatcagtagaccaggttcgcgtgggacagactagtacgaaacagaagactaataagccgacctataatgaagagttttgcgccaacgtgacggacggtggccacctggagctagcagtgtttcatgagacgcctctcgggtacgaccactttgtggctaattgtacactgcagttccaggaattacttcggaccaccggtgcaagcgatacctttgaaggctgggtcgacctcgaacccgagggaaaggtgtttgtcgtcatcaccctgactggctcatttactgaggcgactctgcagcgagacaggatatttaagcacttcactaggaaacggcagcgagccatgaggagacgcgtgcatcagattaatggccacaaatttatggcaacctacttacgccagcctacatactgcagccactgtcgtgagttcatctggggcgtctttggaaagcagggatatcagtgccaggtgtgcacgtgtgtcgtgcataagaggtgtcaccacctgatcgtgacggcatgtacatgccagaacaatatcaataaagtcgatagcaagatagccgagcagagatttggcatcaacattccacacaagttcagcatccacaattacaaggttcccactttttgcgaccactgcggctctctgttatggggcattatgagacaggggttacagtgtaagatctgcaaaatgaatgtccacatccggtgtcaggccaatgtggctcctaactgcggggtgaatgcggtggaactggccaagacccttgctggcatgggcctgcagccagggaatatttcacccaccagtaaactggtgagtagatcgacacttaggcgacaaggcaaagaatcatcgaaagagggaaatgggattggcgttaacagcagtaacaggcttgggattgataacttcgaattcatcagggtgctgggcaaaggcagctttggtaaggtgatgctggcacgcgttaaagagactggggacctttacgcggtgaaggttctgaagaaggatgttatactgcaggatgacgatgtggaatgtacgatgactgaaaagcggatactcagcctcgcccgcaaccatcccttcctgacacagctcttctgttgctttcagactcccgatcgacttttctttgtcatggaattcgtgaatggcggagaccttatgttccatattcagaagtcacgacggttcgacgaggctcgcgcacgattttacgcggccgaaataatcagcgcgctgatgtttttgcacgacaaagggatcatctatagagacctgaagctggataatgtccttctggatcacgagggacactgtaagcttgccgatttcggaatgtgcaaagagggtatttgtaacggggtgaccactgcaacattttgcgggacccccgattacattgctccagaaattcttcaggagatgctgtacggtccagcagtcgactggtgggccatgggcgtgttgttgtacgagatgctctgcggccacgcaccctttgaagctgaaaatgaggacgatctgtttgaagcaatcctaaatgatgaagtggtctacccgacgtggctgcacgaggacgccaccggaatccttaagagtttcatgaccaaaaaccctaccatgagactgggctccttaacccagggcggagagcacgccatcttgcgacaccccttctttaaagagattgactgggctcagctgaatcaccggcagatcgaacctcccttccgacctcggataaaaagtagagaggatgttagtaattttgatccagacttcattaaagaagaacctgttctcacaccaatcgacgaggggcatttgccaatgataaaccaagacgagttccgcaatttcagctacgtttctccagagttacagccctag

SEQ ID NO: 163266 - DNA, 2052 bp, Artificial Sequence
  derived and/or modified sequence
atgagcagcggcaccatgaagttcaacggctacctgcgggtgcgcatcggggaggccgtgggcctgcagcccacccgctggagcctgcggcacagcctcttcaagaagggccaccagctgctggacccctacctgactgtgtctgtggaccaggtgcgggtgggccagaccagcaccaagcagaagaccaacaagcccacctacaatgaggagttctgtgccaacgtgacagatggcggccacctggagctggccgtgttccacgagacccccctgggctatgaccactttgtggccaactgcaccctgcagttccaggagctgctgcggaccaccggggccagtgacacctttgagggctgggtggacctggagcctgagggcaaggtgtttgtggtgatcaccctgaccggcagcttcacagaggccaccctgcagagggaccgcatcttcaagcacttcaccaggaagaggcagagggccatgagaagaagagtgcaccagatcaatggccacaagttcatggccacctacctgcggcagcccacctactgcagccactgccgggagttcatctggggcgtgtttgggaagcagggctaccagtgccaggtgtgcacctgtgtggtgcacaagcgctgccaccacctgattgtgacagcctgcacctgccagaacaacatcaacaaggtggacagcaagattgctgagcagcgcttcggcatcaacatcccccacaagttcagcatccacaactacaaggtgcccaccttctgtgaccactgcggcagcctgctgtggggcatcatgaggcagggcctgcagtgcaagatctgcaagatgaatgtgcacatccgctgccaggccaacgtggcccccaactgtggggtgaatgctgtggagctggccaagaccctggccggcatgggcctgcagcccggcaacatcagccccaccagcaagctggtgagccgcagcaccctgcggcggcagggcaaggagagcagcaaggagggcaatggcatcggcgtgaacagcagcaaccggctgggcatcgacaactttgagttcatccgggtgctgggcaagggcagctttgggaaggtgatgctggcccgggtgaaggagactggagacctgtatgctgtgaaggtgctgaagaaggatgtgatcctgcaggatgatgatgtggagtgcaccatgacagagaagaggatcctgagcctggccaggaaccaccccttcctgacccagctgttctgctgcttccagaccccagacaggctcttctttgtgatggagtttgtgaatggaggagacctgatgttccacatccagaagagcagaagatttgatgaggcccgggcccgcttctacgccgctgagatcatcagcgccctgatgttcctgcatgacaagggcatcatctacagagacctgaagctggacaacgtgctgctggaccacgagggccactgcaagctggccgactttggcatgtgcaaggagggcatctgcaatggagtgaccacagccaccttctgtggcaccccagactacatcgcccctgagatcctgcaggagatgctgtatggccctgctgtggactggtgggccatgggcgtgctgctgtatgagatgctgtgtggccacgccccctttgaagcagaaaatgaagatgacctgtttgaggccatcctgaatgatgaggtggtgtaccccacctggctgcatgaagatgccaccggcatcctgaagagcttcatgaccaagaaccccaccatgaggctgggcagcctgacccagggcggggagcacgccatcctgcggcaccccttcttcaaggagattgactgggcccagctgaaccaccggcagatcgagccccccttccggccccgcatcaagagcagagaagatgtgagcaactttgatcctgacttcatcaaggaggagcctgtgctgacccccattgatgagggccacctgcccatgatcaaccaggatgagttcaggaacttctcctatgtgtccccagagctgcagccctag

SEQ ID NO: 163267 - DNA, 2052 bp, Artificial Sequence
  derived and/or modified sequence
atgagcagcggcaccatgaagttcaacggctacctgcgggtgcggataggcgaggcagtgggcctgcagcccacaagatggtccctgaggcactccctgttcaaaaagggtcaccaactgttagacccttacctgaccgtgagtgtagatcaggtaagagttggccaaacttcaacgaagcaaaaaacaaacaaaccaacctacaacgaggaattctgcgctaacgtgactgacggaggacacttagaattggcagtatttcacgaaacgcctttggggtacgatcactttgtcgccaattgtacacttcagttccaagaactcctgcgcactactggcgcttccgatacctttgaggggtgggtagacctcgagcctgaagggaaggtgttcgttgtgattaccctgacaggctcattcaccgaggccacgctgcagcgagataggatcttcaaacacttcacaaggaaaaggcagcgcgctatgagacgccgagtgcatcaaatcaacggccacaaatttatggccacatatttgcggcagcccacatattgctcccactgtagagagttcatatggggtgtgttcgggaagcaggggtaccagtgccaagtctgtacatgcgtcgttcacaaaagatgtcaccaccttatagtcactgcctgtacatgtcagaataatatcaataaagtagatagtaagatcgcggagcagcggtttgggatcaacattcctcacaaattcagcatacacaattacaaagtgccaaccttctgtgatcattgtggcagcctgctgtggggaatcatgcggcagggcttgcagtgcaagatttgtaagatgaatgtgcacatcagatgccaggcaaatgtggcacccaattgtggtgtgaatgcagtcgaactagctaaaacccttgcagggatgggactgcagccgggcaatattagccccaccagcaaattggtttcacggtccacactgcgtcgacaagggaaggagagcagcaaggaaggtaacggaatcggggtaaactctagtaacaggcttggaattgacaacttcgagttcatccgggtcctgggtaagggatcatttggaaaggtcatgcttgcgcgcgtgaaagaaaccggagatctttatgctgttaaagtgttgaagaaggatgtgattctacaggatgacgatgtcgaatgtactatgacggaaaagcggattttgtccttggctaggaaccatccctttctcacacagctcttttgctgtttccagacacccgatcggttgtttttcgtcatggagtttgtaaacggaggtgatctgatgtttcacatccagaagtccaggcggtttgatgaggctagggctcgcttctatgcagcggaaatcatttccgcgttgatgttcctacatgacaaaggtatcatctatagagatttgaagttggacaacgtgctgctggaccatgagggccattgcaagttggccgactttggcatgtgcaaggagggaatctgtaatggcgttaccaccgctactttctgtggtactccagattacatcgcaccagagatcctgcaggagatgttgtatgggcctgccgttgattggtgggcaatgggagtgttactgtacgaaatgttgtgcggacacgcccccttcgaggctgagaacgaggacgacctatttgaggcaatcctgaacgatgaggttgtctaccctacttggttgcacgaagacgctaccggaatcctgaaatctttcatgaccaagaacccaacaatgcgactaggtagtcttacccaagggggggagcatgcgattcttaggcaccctttttttaaggagatcgattgggctcagcttaatcaccggcaaatagaaccacctttcagacctagaattaaatccagggaagatgtgtcaaattttgatcccgatttcattaaagaggagcctgtgctcactcccatcgacgagggtcacctgcctatgattaaccaggatgaattcaggaattttagctacgtatcacccgagcttcaaccctag

SEQ ID NO: 163268 - DNA, 2052 bp, Artificial Sequence
  derived and/or modified sequence
atgtctagcgggacaatgaagttcaacggatacttaagagtgagaattggagaggctgtgggactgcaacctaccagatggagcctcagacacagtctattcaagaagggccatcagctgctggatccgtacctcacggtgtcagtggatcaagtgcgcgtggggcagacatctacgaagcaaaagactaacaaacctacgtataatgaggaattttgcgctaatgtgacggatgggggacaccttgagctagccgtgttccacgagacccctctgggatatgaccattttgtggctaattgtacactccagtttcaggagctcttgaggaccacaggcgctagcgacacattcgaagggtgggtcgatctagagccggaaggcaaggtttttgttgtgataactctgactgggagcttcaccgaagccactctgcagagagatagaattttcaaacatttcacacggaagagacagagagccatgaggagacgcgtgcatcagatcaatgggcataaattcatggcgacatacctgagacagccaacatactgttcgcattgccgcgagttcatctggggcgtttttggcaaacagggctatcaatgccaggtgtgtacatgtgtggtacacaaaagatgccaccacttgatcgtgacagcatgtacatgccaaaacaacataaataaagtggactctaaaattgcagagcagaggttcggtatcaatatcccccataagttcagcatccataactataaagttcccactttctgcgaccactgcggcagccttttatggggaatcatgagacaggggctacagtgcaagatctgtaaaatgaacgtccacattaggtgccaagctaatgtggcacctaactgtggagtgaatgctgttgagctagccaaaaccttagccggaatgggcctgcagcccggaaatattagccctacctcgaagctggtcagtagatcaactttgcgccgacagggcaaggaatcctccaaagaaggcaacgggatcggtgtgaactcatccaaccggctgggaattgataacttcgaattcatccgggtgctgggtaaaggctccttcggtaaggttatgctggcccgagtgaaggagacgggcgatctgtatgccgttaaggtcctgaagaaggatgtgatactgcaggacgatgacgtagagtgtactatgactgagaagaggatcctgtcactggcaaggaatcatcctttcctcacccaactcttctgttgcttccagacacccgaccggctattctttgtgatggagtttgtgaatggtggggacttgatgtttcacattcagaagtctcggagatttgacgaagcccgagcacgtttttacgcagctgaaatcatcagcgcactaatgttcctgcacgacaagggcatcatctatcgcgatctaaaactggacaacgtgctgctagatcacgagggccattgtaagttagctgacttcggcatgtgtaaggagggtatttgtaatggtgtgacaactgctaccttttgtggcactccagactacatcgccccagagatcctgcaagagatgctgtatggccctgcagttgattggtgggccatgggcgtgctgttgtacgaaatgctttgtggccacgccccttttgaggccgagaacgaagatgacctttttgaagcaatcctcaatgatgaggtggtgtatccaacgtggctgcatgaggatgcaaccggtatcctgaaaagctttatgacaaagaatccaactatgaggcttgggtcactcactcaggggggagaacacgccattctgcggcatcccttttttaaggaaatcgattgggctcagttaaaccataggcagattgagcctccattcagacctaggatcaaaagccgcgaggatgtatcaaactttgaccctgactttataaaggaagagccagtgttgacaccaatagatgaaggccacctgccgatgatcaatcaggatgagtttaggaatttttcttacgtctcaccggaacttcagccatag

SEQ ID NO: 163269 - DNA, 3582 bp, Artificial Sequence
  derived and/or modified sequence
gggaagagacgcttggggctggggctcaccggacgggtaggtccggctctccagggagaggagctgcccggccctggagaaggggcgagtcctgcgcgagtccccgggaggcgccgcgcgcttggaagggacggtcgggcttccccggcccgctgagggctcggcggcgggctcccctcctttccacctcgggagggagggaaggaggggagggaaaagtcccacggaggaggcagaatggccagtcgaggggcgcttaggcgctgcctttccccagggctgcctcgactcctgcacctgtcccgagggctggcctgagacgggactcccggttctcccgctgcgaagcagcgcggccccccggggccggggcagcggcgccggcatgtcgtctggcaccatgaagttcaatggctatttgagggtccgcatcggtgaggcagtggggctgcagcccacccgctggtccctgcgccactcgctcttcaagaagggccaccagctgctggacccctatctgacggtgagcgtggaccaggtgcgcgtgggccagaccagcaccaagcagaagaccaacaaacccacgtacaacgaggagttttgcgctaacgtcaccgacggcggccacctcgagttggccgtcttccacgagacgcccctgggctacgaccacttcgtggccaactgcaccctgcagttccaggagctgctgcgcacgaccggcgcctcggacaccttcgagggttgggtggatctcgagccagaggggaaagtatttgtggtaataacccttaccgggagtttcactgaagctactctccagagagaccggatcttcaaacattttaccaggaagcgccaaagggctatgcgaaggcgagtccaccagatcaatggacacaagttcatggccacgtatctgaggcagcccacctactgctctcactgcagggagtttatctggggagtgtttgggaaacagggttatcagtgccaagtgtgcacctgtgtcgtccataaacgctgccatcatctaattgttacagcctgtacttgccaaaacaatattaacaaagtggattcaaagattgcagaacagaggttcgggatcaacatcccacacaagttcagcatccacaactacaaagtgccaacattctgcgatcactgtggctcactgctctggggaataatgcgacaaggacttcagtgtaaaatatgtaaaatgaatgtgcatattcgatgtcaagcgaacgtggcccctaactgtggggtaaatgcggtggaacttgccaagaccctggcagggatgggtctccaacccggaaatatttctccaacctcgaaactcgtttccagatcgaccctaagacgacagggaaaggagagcagcaaagaaggaaatgggattggggttaattcttccaaccgacttggtatcgacaactttgagttcatccgagtgttggggaaggggagttttgggaaggtgatgcttgcaagagtaaaagaaacaggagacctctatgctgtgaaggtgctgaagaaggacgtgattctgcaggatgatgatgtggaatgcaccatgaccgagaaaaggatcctgtctctggcccgcaatcaccccttcctcactcagttgttctgctgctttcagacccccgatcgtctgttttttgtgatggagtttgtgaatgggggtgacttgatgttccacattcagaagtctcgtcgttttgatgaagcacgagctcgcttctatgctgcagaaatcatttcggctctcatgttcctccatgataaaggaatcatctatagagatctgaaactggacaatgtcctgttggaccacgagggtcactgtaaactggcagacttcggaatgtgcaaggaggggatttgcaatggtgtcaccacggccacattctgtggcacgccagactatatcgctccagagatcctccaggaaatgctgtacgggcctgcagtagactggtgggcaatgggcgtgttgctctatgagatgctctgtggtcacgcgccttttgaggcagagaacgaagatgacctctttgaggccatactgaatgatgaggtggtctaccctacctggctccatgaagatgccacagggatcctaaaatctttcatgaccaagaaccccaccatgcgcttgggcagcctgactcagggaggcgagcacgccatcttgagacatcctttttttaaggaaatcgactgggcccagctgaaccatcgccaaatagaaccgcctttcagacccagaatcaaatcccgagaagatgtcagtaattttgaccctgacttcataaaggaagagccagttttaactccaattgatgagggacatcttccaatgattaaccaggatgagtttagaaacttttcctatgtgtctccagaattgcaaccatagccttatggggagtgagagagagggcacgagaacccaaagggaatagagattctccaggaatttcctctatgggaccttcccagcatcagccttagaacaagaaccttaccttcaaggagcaagtgaagaactctgtgaaggatggaactttcagatatcaactatttagagtccagagggagccatggcactagaaatagttgataatgaaatgagattttatgaagtataccgctccacctatgagcgtctgtctctgtgggcttgggatgttaacaggagccaaaaggagggaaagtgtgaagaataaagtagatctgagaaattctgagccaatcaggcttcttaattcaagagacaaaccaagacgttctgtcaactgtgctgtgctcttctttaagccaatgaaccccaattcctggcagtctacaagaagtctcttaatgctaatgaagaatttaaaggtctttttaaggaaatgaagggctttccaaatagaatgatttactctgaagaaacaaacaatggtatctctgaaactcacaacctaaagcccaatcttgaaaatatgttgtgcaccaagacgactgcttcagcttcttctcttatccttactttctttaatagatatttattaaactgtccagtgaaaaggtgccacaatgcccagtattgtaaacaacaggtttgcattcatgaagctttcattcattctggagtctactaatttacctgaatggtgtttgcattctgtgaaatgcctctccacgttgcatatgtcacacttttgtctgcacataactcttttttcacaagaagggtcactgccacaacagcacagtcagcgggtgaattacaggtgcctgctgcctgcctacctgggtaatctgatcttgtctgtatcgccgtgtgctcatcactgaagaattgcaggccactcatgtcagtgaccagatttgtggcttataaacattagcagtttatttatgttttaagatgcaaagatgtgtgtttgatattcactttaataattagaaatggatcttgtaaacagggcatatatcaaagatgaccttataatatgtacccgaatatacagttcaagaattttgtctgactggaaataaatgcattttgtagcaaaa

SEQ ID NO: 163270 - DNA, 2052 bp, Artificial Sequence
  derived and/or modified sequence
atgagcagcggcaccatgaagttcaacggctacctgagagtgagaatcggcgaggccgtgggcctgcagcccaccagatggagcctgagacacagcctgttcaagaagggccaccagctgctggacccctacctgaccgtgagcgtggaccaggtgagagtgggccagaccagcaccaagcagaagaccaacaagcccacctacaacgaggagttctgcgccaacgtgaccgacggcggccacctggagctggccgtgttccacgagacccccctgggctacgaccacttcgtggccaactgcaccctgcagttccaggagctgctgagaaccaccggcgccagcgacaccttcgagggctgggtggacctggagcccgagggcaaggtgttcgtggtgatcaccctgaccggcagcttcaccgaggccaccctgcagagagacagaatcttcaagcacttcaccagaaagagacagagagccatgagaagaagagtgcaccagatcaacggccacaagttcatggccacctacctgagacagcccacctactgcagccactgcagagagttcatctggggcgtgttcggcaagcagggctaccagtgccaggtgtgcacctgcgtggtgcacaagagatgccaccacctgatcgtgaccgcctgcacctgccagaacaacatcaacaaggtggacagcaagatcgccgagcagagattcggcatcaacatcccccacaagttcagcatccacaactacaaggtgcccaccttctgcgaccactgcggcagcctgctgtggggcatcatgagacagggcctgcagtgcaagatctgcaagatgaacgtgcacatcagatgccaggccaacgtggcccccaactgcggcgtgaacgccgtggagctggccaagaccctggccggcatgggcctgcagcccggcaacatcagccccaccagcaagctggtgagcagaagcaccctgagaagacagggcaaggagagcagcaaggagggcaacggcatcggcgtgaacagcagcaacagactgggcatcgacaacttcgagttcatcagagtgctgggcaagggcagcttcggcaaggtgatgctggccagagtgaaggagaccggcgacctgtacgccgtgaaggtgctgaagaaggacgtgatcctgcaggacgacgacgtggagtgcaccatgaccgagaagagaatcctgagcctggccagaaaccaccccttcctgacccagctgttctgctgcttccagacccccgacagactgttcttcgtgatggagttcgtgaacggcggcgacctgatgttccacatccagaagagcagaagattcgacgaggccagagccagattctacgccgccgagatcatcagcgccctgatgttcctgcacgacaagggcatcatctacagagacctgaagctggacaacgtgctgctggaccacgagggccactgcaagctggccgacttcggcatgtgcaaggagggcatctgcaacggcgtgaccaccgccaccttctgcggcacccccgactacatcgcccccgagatcctgcaggagatgctgtacggccccgccgtggactggtgggccatgggcgtgctgctgtacgagatgctgtgcggccacgcccccttcgaggccgagaacgaggacgacctgttcgaggccatcctgaacgacgaggtggtgtaccccacctggctgcacgaggacgccaccggcatcctgaagagcttcatgaccaagaaccccaccatgagactgggcagcctgacccagggcggcgagcacgccatcctgagacaccccttcttcaaggagatcgactgggcccagctgaaccacagacagatcgagccccccttcagacccagaatcaagagcagagaggacgtgagcaacttcgaccccgacttcatcaaggaggagcccgtgctgacccccatcgacgagggccacctgcccatgatcaaccaggacgagttcagaaacttcagctacgtgagccccgagctgcagccctag

SEQ ID NO: 163271 - protein, 389 aa, Artificial Sequence
  derived and/or modified sequence
MEKQNMFLHGSYILREDVRTANVIAAEAVTCLVIDRDSFKHLIGGLDDVSNKAYEDAEAKAKYEAEAAFFANLKLSDFNIIDTLGVGGFGRVELVQLKSEESKTFAMKILKKRHIVDTRQQEHIRSEKQIMQGAHSDFIVRLYRTFKDSKYLYMLMEACLGGELWTILRDRGSFEDSTTRFYTACVVEAFAYLHSKGIIYRDLKPENLILDHRGYAKLVDFGFAKKIGFGKKTWTFCGTPEYVAPEIILNKGHDISADYWSLGILMYELLTGSPPFSGPDPMKTYNIILRGIDMIEFPKKIAKNAANLIKKLCRDNPSERLGNLKNGVKDIQKHKWFEGFNWEGLRKGTLTPPIIPSVASPTDTSNFDSFPEDNDEPPPDDNSGWDIDF

SEQ ID NO: 163272 - protein, 283 aa, Artificial Sequence
  derived and/or modified sequence
MKILKKRHIVDTRQQEHIRSEKQIMQGAHSDFIVRLYRTFKDSKYLYMLMEACLGGELWTILRDRGSFEDSTTRFYTACVVEAFAYLHSKGIIYRDLKPENLILDHRGYAKLVDFGFAKKIGFGKKTWTFCGTPEYVAPEIILNKGHDISADYWSLGILMYELLTGSPPFSGPDPMKTYNIILRGIDMIEFPKKIAKNAANLIKKLCRDNPSERLGNLKNGVKDIQKHKWFEGFNWEGLRKGTLTPPIIPSVASPTDTSNFDSFPEDNDEPPPDDNSGWDIDF

SEQ ID NO: 163273 - protein, 686 aa, Artificial Sequence
  derived and/or modified sequence
MGTLRDLQYALQEKIEELRQRDALIDELELELDQKDELIQKLQNELDKYRSVIRPATQQAQKQSASTLQGEPRTKRQAISAEPTAFDIQDLSHVTLPFYPKSPQSKDLIKEAILDNDFMKNLELSQIQEIVDCMYPVEYGKDSCIIKEGDVGSLVYVMEDGKVEVTKEGVKLCTMGPGKVFGELAILYNCTRTATVKTLVNVKLWAIDRQCFQTIMMRTGLIKHTEYMEFLKSVPTFQSLPEEILSKLADVLEETHYENGEYIIRQGARGDTFFIISKGTVNVTREDSPSEDPVFLRTLGKGDWFGEKALQGEDVRTANVIAAEAVTCLVIDRDSFKHLIGGLDDVSNKAYEDAEAKAKYEAEAAFFANLKLSDFNIIDTLGVGGFGRVELVQLKSEESKTFAMKILKKRHIVDTRQQEHIRSEKQIMQGAHSDFIVRLYRTFKDSKYLYMLMEACLGGELWTILRDRGSFEDSTTRFYTACVVEAFAYLHSKGIIYRDLKPENLILDHRGYAKLVDFGFAKKIGFGKKTWTFCGTPEYVAPEIILNKGHDISADYWSLGILMYELLTGSPPFSGPDPMKTYNIILRGIDMIEFPKKIAKNAANLIKKLCRDNPSERLGNLKNGVKDIQKHKWFEGFNWEGLRKGTLTPPIIPSVASPTDTSNFDSFPEDNDEPPPDDNSGWDIDF

SEQ ID NO: 163274 - DNA, 2061 bp, Artificial Sequence
  derived and/or modified sequence
atgggcaccctccgcgacctgcagtatgcactacaggagaaaatcgaagaactgcgtcagcgggatgccctcatcgatgaattggaattagagctggaccagaaggacgagttgatacagaagctccagaacgagttagacaagtaccgatccgtgatcagacccgctacccaacaggcgcaaaagcagagcgcgtctacccttcagggcgagcccaggacaaaacggcaggctatttctgcagagcccaccgcattcgacattcaagaccttagccacgttactctgcctttctaccccaaatccccccagagtaaggatttgattaaggaggccattcttgataatgatttcatgaaaaacttagagttgtctcaaatacaggagatagtagattgcatgtatccggtggagtatgggaaggactcatgcatcatcaaggagggagacgtcggaagcctcgtgtacgtgatggaggacggcaaggtagaagtgaccaaggaaggggtaaagctgtgcactatgggccccggcaaagtttttggtgagttggccatcttgtacaattgcacgcgcaccgccactgttaaaactcttgtaaatgtgaaattgtgggcgattgatcggcagtgttttcaaactatcatgatgcgaactggactgataaagcacaccgagtatatggagtttttgaagtctgtgcccactttccaaagcctgcccgaggagattttgtcaaaactggccgatgtcctggaggaaacccattatgaaaatggcgagtatattattaggcagggggcacggggcgacaccttctttatcatcagtaagggtacggttaacgttacaagggaggactcaccctcggaagaccccgtttttttgcggactctgggaaagggggactggtttggcgagaaggccctccagggagaagacgtcagaacagccaatgtgatagctgccgaggctgtaacatgtctggtaatcgaccgcgattcatttaagcatctcattggcggattggatgatgtaagcaataaagcatatgaagacgccgaagcaaaggctaaatacgaggctgaggctgccttcttcgccaatctgaagctgtctgattttaatatcatcgacaccctgggagtcggcggatttggcagagtggagctggtgcaactcaagtccgaggagagtaaaacgtttgccatgaaaatcctgaaaaagaggcatatcgtggatacacgccaacaggaacatatcaggagcgaaaagcagatcatgcagggtgctcattctgacttcattgttcggctgtaccggacctttaaggattccaagtacctgtatatgcttatggaggcgtgcctcggaggcgagttgtggactattcttagagataggggtagctttgaagattctactacgcggttctatacagcttgtgttgttgaagcattcgcctaccttcattccaaaggaatcatatacagagatttgaagcccgagaacctgatactggatcatagaggttacgcaaagttggttgactttggatttgctaagaaaattggatttggaaaaaagacttggaccttttgtggaacgcccgagtatgtggcaccagaaatcatactgaacaaaggccacgacatatctgctgattattggtcacttggcattctgatgtacgagctgctcaccgggagcccgcccttttcaggaccagaccctatgaaaacgtataatatcatactgcgcggcatcgacatgattgagttccccaaaaaaatcgctaaaaatgccgccaatctgatcaaaaagttatgccgcgacaaccccagtgaaagactcggcaatctcaagaacggagtcaaagatatccagaagcataagtggtttgaaggcttcaactgggaggggctgcgtaaagggaccctcaccccccccattatcccatctgtcgccagcccaaccgatacatcaaatttcgattcttttccagaagataatgatgaacccccacctgacgataactctggctgggacattgacttctag

SEQ ID NO: 163275 - DNA, 2061 bp, Artificial Sequence
  derived and/or modified sequence
atgggcaccctgcgggacctgcagtatgccctgcaggagaagattgaggagctgcggcagagagatgccctgattgatgagctggagctggagctggaccagaaggatgagctgatccagaagctgcagaatgagctggacaagtacagaagtgtcatccggcctgccacccagcaggcccagaagcagagcgccagcaccctgcagggcgagcccaggaccaagaggcaggccatctctgctgagcccacagcctttgacatccaggacctgagccacgtgaccctgcccttctaccccaagagcccccagagcaaggacctgatcaaggaggccatcctggacaatgacttcatgaagaacctggagctgagccagatccaggagatcgtggactgcatgtaccctgtggagtatggcaaggacagctgcatcatcaaggagggagatgtgggcagcctggtgtatgtgatggaggatggcaaggtggaggtgaccaaggagggcgtgaagctgtgcaccatgggccctgggaaggtgtttggagagctggccatcctgtacaactgcaccaggacagccaccgtgaagaccctggtgaatgtgaagctgtgggccatcgaccggcagtgcttccagaccatcatgatgaggacaggcctcatcaagcacacagagtacatggagttcctgaagtctgtgcccaccttccagagcctgcctgaggagatcctgagcaagctggctgatgtgctggaggagacccactatgaaaatggagagtacatcatccggcagggcgcccggggggacaccttcttcatcatcagcaagggcaccgtgaatgtgacccgggaggacagccccagtgaagatcctgtgttcctgcggaccctgggcaaaggagactggtttggagagaaggccctgcagggagaagatgtgaggacagccaacgtgattgctgctgaggccgtgacctgcctggtgattgaccgggacagcttcaagcacctgattggaggcctggatgatgtgagcaacaaggcctatgaagatgctgaggccaaggccaagtatgaggccgaggccgccttctttgccaacctgaagctgagtgacttcaacatcatcgacaccctgggcgtgggcggcttcggccgggtggagctggtgcagctgaagtctgaggagagcaagacctttgccatgaagatcctgaagaagaggcacatcgtggacacccggcagcaggagcacatccgctctgagaagcagatcatgcagggcgcccacagcgacttcatcgtgcggctgtaccgcaccttcaaggacagcaagtacctgtacatgctgatggaggcctgcctgggcggggagctgtggaccatcctgcgggaccggggcagctttgaggacagcaccacccgcttctacacagcctgtgtggtggaggcctttgcctacctgcacagcaagggcatcatctacagagacctgaagccagaaaatctcatcctggaccaccggggctacgccaagctggtggactttggatttgccaagaagattggatttgggaagaagacctggaccttctgtggcaccccagaatatgtggcccctgagatcatcctgaacaagggccatgacatctctgctgactactggagcctgggcatcctgatgtatgagctgctgaccggcagcccccccttcagcggccctgaccccatgaagacctacaacatcatcctgcggggcatcgacatgattgagttccccaagaagatcgccaagaatgctgccaacctgatcaagaagctgtgccgggacaaccccagcgagcggctgggcaacctgaagaatggagtgaaggacatccagaagcacaagtggtttgagggcttcaactgggagggcctgaggaagggcaccctgaccccacccatcatccccagcgtggccagccccacagacaccagcaactttgacagcttcccagaagataatgatgagcccccaccagatgacaacagcggctgggacatcgacttctag

SEQ ID NO: 163276 - DNA, 2061 bp, Artificial Sequence
  derived and/or modified sequence
atgggcaccctgcgggacctgcagtacgccctgcaggagaagatcgaggagttgaggcagcgagatgccctgattgacgagctggagctggaacttgatcaaaaagatgaactgatacagaagctccaaaatgagctagataaataccggtccgtgattagacccgcaacccagcaggcccagaagcagagcgcaagcaccctgcagggagagcctagaactaagagacaggcgatttccgctgaaccaacggcatttgacattcaagatctctctcatgtgacactgccattctaccccaagagtccacagtctaaggacctcatcaaagaagcgattctcgacaacgattttatgaaaaacttagagctttcgcagattcaagaaatcgttgattgcatgtaccccgtcgaatacggcaaagactcctgcataatcaaagagggtgacgtcggttctctagtgtacgttatggaggacgggaaagtagaggtcacaaaggaaggagtaaaactatgcaccatggggccgggtaaagtatttggcgagctggcgatactgtataactgcaccagaaccgccaccgttaagaccctggtcaatgtcaaactgtgggccatagataggcaatgttttcaaacaattatgatgcggactggcctaattaaacacacagagtacatggagtttcttaagtcagtccccacatttcagagcctccctgaggaaatcctaagcaaattagccgacgtcctggaggagacccattatgaaaacggtgagtacataatacgccagggagctagaggagatacattttttataatttccaagggaaccgtgaacgtcactcgtgaggacagcccctccgaagatccggtgttcttgcgcacactgggcaaaggcgattggtttggggagaaagcactgcagggggaggatgtacgcaccgccaatgtaatcgcagcggaggcggtaacttgcctggttatcgatcgcgactcattcaagcacttgatcggcggattagacgacgtgtcaaacaaggcttacgaggacgccgaagctaaagctaaatatgaggcggaggcggcctttttcgccaacctgaaactgtccgacttcaatataatagacacactgggcgtcgggggtttcggccgggtcgaactggtccagcttaaatctgaggagtcaaaaacattcgccatgaaaattttgaaaaagcggcacatcgttgatactcgtcaacaggagcatatccggtcggagaagcagatcatgcagggggcacattccgatttcatcgtgaggttgtatcggacgttcaaagatagcaagtacctgtatatgctgatggaggcctgcctgggaggagaactgtggacgatactgagggatcgcgggtctttcgaggatagtacaacccggttttacaccgcctgcgttgttgaagcttttgcctacctacacagcaaggggatcatttacagagacctgaaacctgaaaatctaatcctggatcatcggggctatgcgaagctcgtggatttcgggtttgctaaaaaaatcggctttggcaaaaagacttggaccttctgtggtactccagagtatgttgcccccgaaataatactcaacaagggccacgatatttctgctgactattggtcattgggcattttaatgtatgagctactaacaggatctccccctttctccggtccagacccgatgaaaacatataatatcattctgagaggaattgatatgatcgaatttccaaaaaaaatagcgaagaatgccgctaacttgattaaaaaactgtgccgagataatcctagtgagagactgggaaacttgaagaacggcgtgaaggacatccagaagcacaaatggtttgagggcttcaattgggaaggcctcagaaaaggcacactgacaccacctattataccatctgtggcaagccccaccgatacgagcaatttcgattctttccccgaggacaacgacgagcccccccccgatgataacagcggctgggacatagatttttag

SEQ ID NO: 163277 - DNA, 2061 bp, Artificial Sequence
  derived and/or modified sequence
atggggacgctgagagacctgcagtatgctctgcaagaaaagatcgaggagcttcggcagagagacgctctgatagatgaactcgagctagaactagatcaaaaagatgagcttattcaaaaactgcaaaatgaactcgataagtatcgctcggttatccggccagccacacaacaggctcagaagcagtctgcctctacattgcagggggaacccagaacgaagcggcaagctatcagcgctgagcctacggcttttgacatacaggacctatcccacgtgacgctgccattctaccctaagagcccccagagcaaggatctgatcaaggaagcaatcctggacaatgactttatgaagaacctggaactttctcagatacaggagatcgtggactgtatgtatcccgtggagtacggcaaggattcctgcattataaaggaaggggatgttggatcacttgtatacgtgatggaagatggtaaggttgaggttaccaaggagggagtgaagctgtgtacgatgggccctggaaaggtattcggggagcttgcaatactttataattgtactcgaaccgcaacagtcaagaccctcgtaaacgtcaaactctgggccatagatcgacagtgctttcagacaatcatgatgcgaaccggtctgataaagcacaccgagtatatggagtttttgaaaagtgtgccaacctttcagtccctccccgaggaaatcctgtcgaaacttgctgatgtccttgaagaaactcattacgaaaatggcgaatatatcatccgccagggagcacgaggcgatactttcttcattattagcaagggcaccgtgaacgtgacaagggaagattccccctccgaagatcccgtatttttaagaacactgggcaagggcgattggtttggtgagaaggctctgcagggagaagacgtcagaactgctaacgtgatcgctgccgaggccgtcacgtgtctagtcattgaccgggattcttttaagcacctaattggaggcttggatgacgtgtccaataaagcttatgaagatgccgaggctaaggcaaagtacgaagctgaagctgcattttttgctaatctgaagctatctgatttcaacatcatcgatacccttggagtgggaggctttggccgagtggagctcgtccagctgaaaagtgaagaatcaaagaccttcgcgatgaaaatcctcaaaaagagacacattgtcgatactcggcagcaggagcacataaggagcgaaaaacagatcatgcagggcgcacattctgattttatcgtgagactctataggaccttcaaagatagtaaatacctgtatatgctaatggaagcgtgcctcggcggtgagctgtggacgatcctgcgtgatcgaggatcatttgaagacagcactactagattttacaccgcctgcgttgtggaggcattcgcttacctgcactccaagggcattatttaccgggatctgaagccagagaatctgatcctcgatcaccgagggtatgcgaagctggtggacttcggttttgcaaagaagattggctttggcaagaagacatggaccttctgcggcacaccagaatacgtggctcccgaaatcattctcaacaagggccacgacatctcggcagattactggagcttgggaatccttatgtacgaactcctcactggctctccacccttcagtggacccgacccaatgaagacttacaatattattctgagaggcatagatatgatcgaattcccaaaaaagatcgcaaaaaatgcagctaacctcattaagaagttatgccgcgataacccttcagaacgcctaggaaatttgaagaatggggtaaaggatattcagaagcacaagtggtttgaagggtttaattgggaagggctgcgaaagggtactcttacacctcccattatccctagcgttgcgtctcctacagatacctcaaactttgactctttcccggaggacaatgacgagcccccaccagacgataactcagggtgggacatcgatttttag

SEQ ID NO: 163278 - DNA, 6928 bp, Artificial Sequence
  derived and/or modified sequence
gccccgcaagcttccttgggcgcccggcgcgagggactctgagagcccagccgctgcctcggagcccccattcacgtcccctcctcccgctcccccgccaccgcgcctccgactcttctcccccgcgccgcggcgcccaccgcgtctcaggtttaatcccgggttggacctgctggtttgctctccccgctctgagcctcacagccagcccagagaagtggaatctgcactgaaactctgggtggctggagccggcggactgggcatgctcagaagccagggctggctttggtctcaagtaggaagctttggcactcgggaggcagcggcgactttggggaaagttgatcggagaggggaggaagcctcaagacgcggagcagcggcaggaaggagcccccggcagcccggaggagcatgggcaccttgcgggatttacagtacgcgctccaggagaagatcgaggagctgaggcagcgggatgctctcatcgacgagctggagctggagttggatcagaaggacgaactgatccagaagctgcagaacgagctggacaagtaccgctcggtgatccgaccagccacccagcaggcgcagaagcagagcgcgagcaccttgcagggcgagccgcgcaccaagcggcaggcgatctccgccgagcccaccgccttcgacatccaggatctcagccatgtgaccctgcccttctaccccaagagcccacagtccaaggatcttataaaggaagctatccttgacaatgactttatgaagaacttggagctgtcgcagatccaggagattgtggattgtatgtacccggtggagtatggcaaggacagttgcatcatcaaagaaggagacgtggggtcactggtgtatgtcatggaagatggtaaggttgaagttacaaaagaaggtgtgaagttgtgtaccatgggtccaggaaaagtgtttggggaattggctattctttacaactgtacccggacagcgaccgtcaagactcttgtaaatgtaaaactctgggccattgatcgacaatgttttcaaacaataatgatgaggacaggactcatcaagcataccgagtatatggaatttttaaaaagcgttccaacattccagagccttcctgaagagatcctcagcaagcttgctgatgtccttgaagagacccactatgaaaatggagaatatattatcaggcaaggtgcaagaggggacaccttctttatcatcagcaaaggaacggtaaatgtcactcgtgaagactcaccgagtgaagacccagtctttcttagaactttaggaaaaggagactggtttggagagaaagccttgcagggggaagatgtgagaacagcaaacgtaattgctgcagaagctgtaacctgccttgtgattgacagagactcttttaaacatttgattggagggctggatgatgtttctaataaagcatatgaagatgcagaagctaaagcaaaatatgaagctgaagcggctttcttcgccaacctgaagctgtctgatttcaacatcattgatacccttggagttggaggtttcggacgagtagaactggtccagttgaaaagtgaagaatccaaaacgtttgcaatgaagattctcaagaaacgtcacattgtggacacaagacagcaggagcacatccgctcagagaagcagatcatgcagggggctcattccgatttcatagtgagactgtacagaacatttaaggacagcaaatatttgtatatgttgatggaagcttgtctaggtggagagctctggaccattctcagggatagaggttcgtttgaagattctacaaccagattttacacagcatgtgtggtagaagcttttgcctatctgcattccaaaggaatcatttacagggacctcaagccagaaaatctcatcctagatcaccgaggttatgccaaactggttgattttggctttgcaaagaaaataggatttggaaagaaaacatggactttttgtgggactccagagtatgtagccccagagatcatcctgaacaaaggccatgacatttcagccgactactggtcactgggaatcctaatgtatgaactcctgactggcagcccacctttctcaggcccagatcctatgaaaacctataacatcatattgagggggattgacatgatagaatttccaaagaagattgccaaaaatgctgctaatttaattaaaaaactatgcagggacaatccatcagaaagattagggaatttgaaaaatggagtaaaagacattcaaaagcacaaatggtttgagggctttaactgggaaggcttaagaaaaggtaccttgacacctcctataataccaagtgttgcatcacccacagacacaagtaattttgacagtttccctgaggacaacgatgaaccaccacctgatgacaactcaggatgggatatagacttctaatgtatttctcttacctgcttctgccttgctgaagacagctttttctgagacacagctgccagcaaacctgagggaaagagagaagattagtgctcggggtcaccatgatgcctttgatcgatgctgctccagtaactacagtggcattaggacttaccgcttagatgacaatagtgctctttacatgttttctgtttgaacctaaaatagcagttgacatggtggtcctgaagcaaagcctttcaccagtaaaagatgttttctattgttgcaatgaccttgctttgctctgattataatttgaaagactgtaggaaacacttcaatgtagtataagagtctgtaccttgctggaatattcaagaagatgaaagaataatatattgggtacaatagattactatggtacagaaactgggctattccctttcttcaagtgaaggctgtgggatctattactgcaggccggtgtatataccatacaaaagaggaccacacatctgttggtcacagagttcatgtcacaccagtgctagaagtttcatgattttatttcccagcagtgctgatgacaagactgaatgttaccttttctttctgacagattttaaaaattgatatgataaaagcacaactgctatagattctgctgagacctctcatagtaggtatatatgagttttcacagaagactgaaaaataatgcatgatatttgtttgttttttttgataaattggcatgacagagtggggaaaaaaagcaattcacaaaaccatttcatattttttaaaatattgtgcttaaagatggtcctggaagtaaatgactagcagccaattggttttacttaacataccctcaaactgaggcttaaagtattcccttttataaaaataaatgcttggggtagggtggagtggggagggattaaaacccatccaaaaaataaataaaaactatataggtgctatgtatatctttcatctgtaaatgtcagtgtctgaacagacaacacaaattcaaatcattatacgtgtagccagaaactcaagcattttcactaaagttattaaaccaaactcctgtccaatttcacttatacaacatagtcagtctagagttgagagacaaaggtaattataaacctatttgaactagcttcttgtcttaggcctgaaccaaaaaacaacaaacaaacaaaaaacaagaatgaaaaacagaaataaaagaagtagaaaagacaaagaaagaaagcccaaagtcaaagttgttaatatttacaggtttaccagatctggaacattacttatttgaggtcagagaacaaaacaagaacctggccaggtgttgattaccttttagtgaataagctgagtccatatacttgtctaactaagaaagcagtacagaggaaaacaggaacctgatttttttaaaataaattttaaataaaatagaattactacaattctgcaatttcatactacctaaaaaagactagatttgaaaatgtcaagctgatttactttattcacatggagaaaagaatccacaaattaaactgagtccttcactggcatgccagttgactattattagctgtcataagtaactcagccatttggaagcatttcctggacaaaattacattatacctgtgaagaaaaatatagaagctttcaagctgtcattctgttttggccctgtgtgaatttggtatattaaattgacgcttgctttttttttcagtagagttttctttttaatcaatcaaacgcctacatttctggaagaaaaagtccaattagatcattacaccttaactaagaaggcaaatcttataaattttgcttgaattgttcttactcaaaactaccttagaatatggtatcttatgaaaatataatattcttaaaattttggaggataaaatgaaaagggtataaacttcaattagaactttaatcctaaaatattgttattcttgtatttttggagttttccgtcccttacaatttctccaaattggtctattccccaagatatccactgttttctacagattttagaatataaaattaaacatatcaacctaaaatctagctatgaatgttatttcaagagttttatatttttaattggctttttaaaaatatgtaattccaatattatagtgaatgttcagtaacttttgttgaaagataatgtggtttaggcttgctaaagaaaggcttgctagaatactaaatttaccttgttatttggaaagagaatctgctcctataacgttttaaaaatccccaaagtcccagagattagcacttgctatggattttggaactatggttcaagtctaagacaaccaatatgaataagttcaatggagaaggaagaagtagcattcagcacaagaaactgtagattgtttctcccacttgttactgcatctttgttcatttcacccatagcattgcatttgatgtctgaagtaattaccacaaaataaaggtaaactacatcttccaagatgtaccaacagaaaacattcgtctaattttgtcaacattgaatttttaggatttaaatcttgtcttaatgaagactctagggctaaaattcatggtcagttccataaaatgcatctcactttatttctgaatttttcacaacccctctattttcttacattaaagaacatctggataagttagaatagtgccaacttgtttgatttgttatatgattttcttgttaatgtgttgagtatgggaaataagggctttctgtgtgtcttgactcacaggaaaactgaaactgccaagggaagcaacattaaaacaactgggatagattgaatacatttgaaaaaataatttctggaaaaacgctatacatgctttttatgtttatatcttctttcttattaagacatgaatcagatccatgtggcattcaaaacaaatttattttggttatattctttacaagtcataatttttacctaaaattgtggaatatgcatgtgaattacacatgtgtagtaataaactcaactattgaatttttcctgtttcatttctaaatgactgaactgatggtaaacaaatttaatgaagtcagctaccatgttgaaaataaggatattagaactgatttcatacaatagaggtgatctgtgcattatccataacaacgttttctttcactataggaccacagacaaatatttatgtaaataggtatttttgtgtgatattttgtggtacatataactttttttagtgtttcacagcattattatttcattttatttgtattgaataatgtttttaggtccaagtagacttgaattaatgtcataattgtcagtattattgaaaattatgtcaactgtactgttattcatctgtcccatagtttagaacatgacctggctatctggcattgttgcaagtgccttaaattcatggcatcctattaaaaaaacaaatttggtgttatgctgcatgacaaagacaaacacacctcaaaatgttgtcctttcttagcttgctgcgttttacagttctttctgctaacaatttataagcctttattatataatattgatgaattacagaaatgatgaagttgttctcttatttctgttaaatgtaccagagctgtgtatctgttaatgagatacagcgtcatttctgtgaaatgtataaatgtatgtgcaggtcaaattaatatatgacattctatcagtctgtatacaggtattcctgttttgctaagctgtgcagattctgtaaaaataaattagtgcagtcaagttctaacatatctcattttatagactccattgacaatggtccaaccgaaaagaaaaattggaaatgactgctaaccagacctcgttatgaaaccaatgatgaaaaagtcacttggtgcacctctcaacaaaacaggatgctttttccgagttcttgtatatgcaaatcatttacgaggcaagttttcaacagacctagaaagcaaaacattgaaagtgtgttgttagccctcctctctgcccctgaatcaacagacagagctctgggaccttggcaatgactcagaggttggggctttctgagtaaagggacatttctttaagcatcatctatcaaatttatttcaatgtatgatgtttttacaactggtcagttcttttgtattcttacagctatggttatttgattgtcctcttacaatttgttctacatgaaagagttctttgttagtcagaatgcaacaaactgtcatcaaatggtcattgaccacttgcactcttttgatgtagattaaaaactttttcataaatttacctgctttgatttgctctgtatttttcctgcagctgtaattgctgagtgcctgttgtatactttatagagttgaaataaaaaaataattacttttgaa

SEQ ID NO: 163279 - DNA, 2061 bp, Artificial Sequence
  derived and/or modified sequence
atgggcaccctgagagacctgcagtacgccctgcaggagaagatcgaggagctgagacagagagacgccctgatcgacgagctggagctggagctggaccagaaggacgagctgatccagaagctgcagaacgagctggacaagtacagaagcgtgatcagacccgccacccagcaggcccagaagcagagcgccagcaccctgcagggcgagcccagaaccaagagacaggccatcagcgccgagcccaccgccttcgacatccaggacctgagccacgtgaccctgcccttctaccccaagagcccccagagcaaggacctgatcaaggaggccatcctggacaacgacttcatgaagaacctggagctgagccagatccaggagatcgtggactgcatgtaccccgtggagtacggcaaggacagctgcatcatcaaggagggcgacgtgggcagcctggtgtacgtgatggaggacggcaaggtggaggtgaccaaggagggcgtgaagctgtgcaccatgggccccggcaaggtgttcggcgagctggccatcctgtacaactgcaccagaaccgccaccgtgaagaccctggtgaacgtgaagctgtgggccatcgacagacagtgcttccagaccatcatgatgagaaccggcctgatcaagcacaccgagtacatggagttcctgaagagcgtgcccaccttccagagcctgcccgaggagatcctgagcaagctggccgacgtgctggaggagacccactacgagaacggcgagtacatcatcagacagggcgccagaggcgacaccttcttcatcatcagcaagggcaccgtgaacgtgaccagagaggacagccccagcgaggaccccgtgttcctgagaaccctgggcaagggcgactggttcggcgagaaggccctgcagggcgaggacgtgagaaccgccaacgtgatcgccgccgaggccgtgacctgcctggtgatcgacagagacagcttcaagcacctgatcggcggcctggacgacgtgagcaacaaggcctacgaggacgccgaggccaaggccaagtacgaggccgaggccgccttcttcgccaacctgaagctgagcgacttcaacatcatcgacaccctgggcgtgggcggcttcggcagagtggagctggtgcagctgaagagcgaggagagcaagaccttcgccatgaagatcctgaagaagagacacatcgtggacaccagacagcaggagcacatcagaagcgagaagcagatcatgcagggcgcccacagcgacttcatcgtgagactgtacagaaccttcaaggacagcaagtacctgtacatgctgatggaggcctgcctgggcggcgagctgtggaccatcctgagagacagaggcagcttcgaggacagcaccaccagattctacaccgcctgcgtggtggaggccttcgcctacctgcacagcaagggcatcatctacagagacctgaagcccgagaacctgatcctggaccacagaggctacgccaagctggtggacttcggcttcgccaagaagatcggcttcggcaagaagacctggaccttctgcggcacccccgagtacgtggcccccgagatcatcctgaacaagggccacgacatcagcgccgactactggagcctgggcatcctgatgtacgagctgctgaccggcagcccccccttcagcggccccgaccccatgaagacctacaacatcatcctgagaggcatcgacatgatcgagttccccaagaagatcgccaagaacgccgccaacctgatcaagaagctgtgcagagacaaccccagcgagagactgggcaacctgaagaacggcgtgaaggacatccagaagcacaagtggttcgagggcttcaactgggagggcctgagaaagggcaccctgaccccccccatcatccccagcgtggccagccccaccgacaccagcaacttcgacagcttccccgaggacaacgacgagcccccccccgacgacaacagcggctgggacatcgacttctag

SEQ ID NO: 163280 - protein, 762 aa, Artificial Sequence
  derived and/or modified sequence
MGNGSVKPKHSKHPDGHSGNLTTDALRNKVTELERELRRKDAEIQEREYHLKELREQLSKQTVAIAELTEELQNKCIQLNKLQDVVHMQGGSPLQASPDKVPLEVHRKTSGLVSLHSRRGAKAGVSAEPTTRTYDLNKPPEFSFEKARVRKDSSEKKLITDALNKNQFLKRLDPQQIKDMVECMYGRNYQQGSYIIKQGEPGNHIFVLAEGRLEVFQGEKLLSSIPMWTTFGELAILYNCTRTASVKAITNVKTWALDREVFQNIMRRTAQARDEQYRNFLRSVSLLKNLPEDKLTKIIDCLEVEYYDKGDYIIREGEEGSTFFILAKGKVKVTQSTEGHDQPQLIKTLQKGEYFGEKALISDDVRSANIIAEENDVACLVIDRETFNQTVGTFEELQKYLEGYVANLNRDDEKRHAKRSMSNWKLSKALSLEMIQLKEKVARFSSSSPFQNLEIIATLGVGGFGRVELVKVKNENVAFAMKCIRKKHIVDTKQQEHVYSEKRILEELCSPFIVKLYRTFKDNKYVYMLLEACLGGELWSILRDRGSFDEPTSKFCVACVTEAFDYLHRLGIIYRDLKPENLILDAEGYLKLVDFGFAKKIGSGQKTWTFCGTPEYVAPEVILNKGHDFSVDFWSLGILVYELLTGNPPFSGVDQMMTYNLILKGIEKMDFPRKITRRPEDLIRRLCRQNPTERLGNLKNGINDIKKHRWLNGFNWEGLKARSLPSPLQRELKGPIDHSYFDKYPPEKGMPPDELSGWDKDF

SEQ ID NO: 163281 - protein, 342 aa, Artificial Sequence
  derived and/or modified sequence
MSNWKLSKALSLEMIQLKEKVARFSSSSPFQNLEIIATLGVGGFGRVELVKVKNENVAFAMKCIRKKHIVDTKQQEHVYSEKRILEELCSPFIVKLYRTFKDNKYVYMLLEACLGGELWSILRDRGSFDEPTSKFCVACVTEAFDYLHRLGIIYRDLKPENLILDAEGYLKLVDFGFAKKIGSGQKTWTFCGTPEYVAPEVILNKGHDFSVDFWSLGILVYELLTGNPPFSGVDQMMTYNLILKGIEKMDFPRKITRRPEDLIRRLCRQNPTERLGNLKNGINDIKKHRWLNGFNWEGLKARSLPSPLQRELKGPIDHSYFDKYPPEKGMPPDELSGWDKDF

SEQ ID NO: 163282 - DNA, 2289 bp, Artificial Sequence
  derived and/or modified sequence
atgggaaatggctcagtgaagccgaagcacagcaaacatccagatggtcactctggcaacctgactactgacgcgctgcgcaacaaggtgacggagctggagagggaactgagaagaaaagatgcagagattcaagaacgcgagtatcacctaaaagagctgagagagcagctgagtaaacagactgtagccattgccgagcttacagaggagttacagaataagtgcattcagttgaacaaattacaggacgtggtgcacatgcagggcggctcccctcttcaggcatctcccgataaagtgcccctggaagtccatagaaagacctctggtctggtgtctctgcatagccggcgcggcgccaaagctggagtgagtgctgagcccacaacccggacctatgacctcaacaagcccccagagttcagcttcgagaaggcacgcgttcgcaaggacagctctgaaaaaaaactgataaccgatgccctcaacaagaatcagttcctgaaaaggctggacccccagcagatcaaagatatggtggagtgcatgtatggtaggaattaccagcagggctcctacatcatcaagcagggtgaacctggcaaccacatcttcgtgcttgctgaaggcaggctggaagtgttccagggcgaaaagctcttgagctctatcccaatgtggaccaccttcggagagctggccatcctttataattgcactcgcaccgcctccgtgaaggctattaccaatgttaagacctgggccctggatcgggaggtgtttcagaatatcatgcggaggacagctcaggcaagggatgagcagtacagaaacttcctccggagtgtctccttgctgaaaaacctccctgaagacaaactgacaaaaatcatcgattgcttagaggtcgagtattacgataagggcgattatataattagagagggagaggaagggtctactttctttatactagccaaaggcaaagttaaagttacgcaaagcaccgagggccacgatcagccgcagctcatcaagacactgcagaagggggaatacttcggggagaaggctctgatctcagatgatgtgcgtagcgcaaatataatagctgaagagaacgacgtagcttgtctcgtgatcgatcgcgaaacattcaaccagacagttgggacgttcgaggagctgcagaaataccttgaagggtacgtcgctaacctgaaccgcgatgatgaaaagagacatgcaaaaagaagcatgagtaactggaagttgtctaaagctctgagcctcgaaatgattcaactgaaggaaaaagtggcccgtttttcttccagcagcccattccaaaatctggagattatcgccactctcggagtgggcggttttggtagggttgaactcgtgaaggtcaaaaatgagaacgttgcgttcgcaatgaagtgcattagaaaaaagcacattgtggacactaagcaacaggagcatgtttactcggaaaaacgaatcctcgaagaactgtgttcacctttcattgtgaaactatacagaactttcaaagacaataagtacgtgtatatgctgttggaagcatgtctgggaggggaactctggtcaattctacgagatcgtgggtcttttgacgagcccaccagtaaattttgtgtggcctgtgttacagaggcatttgattacttgcaccggctcgggattatttacagagatctcaaaccagaaaacttgatcctagacgccgaaggatacctgaagctggtggatttcggatttgccaaaaaaatcggttcaggacagaaaacctggaccttttgtggcactcctgaatacgtagctcctgaagtgatcctgaacaagggccatgatttctctgtggacttttggagcctgggcatcctggtgtatgaactcttgaccggaaacccaccctttagtggcgtggaccaaatgatgacatataacctgattctaaaaggtattgaaaaaatggactttcctcgcaaaattacacgcagacccgaggacctgatcagaagactgtgtcgacaaaaccccaccgagagactcgggaatctgaagaatggaatcaatgatataaaaaagcataggtggctgaacggcttcaattgggaaggactaaaggcacgttcccttccaagtcctctgcaaagggaactgaaggggcctatcgatcacagctattttgacaagtaccccccagaaaagggcatgccgcccgacgagctgtccggctgggacaaggatttctag

SEQ ID NO: 163283 - DNA, 2289 bp, Artificial Sequence
  derived and/or modified sequence
atgggcaatgggtccgtgaaaccaaaacactcaaagcatcccgatggccactctggtaacctaacaacagatgccttgcgaaataaggtgaccgaactggagcgtgaactgcgcaggaaagacgccgagatccaagagcgcgagtaccatctcaaagaattgagggaacagctgtcaaaacaaaccgttgccatcgccgagctgactgaggagctgcagaataaatgcatacagttaaacaaactgcaggatgtggttcacatgcaaggggggtcaccactgcaagcctcccccgataaggtcccattggaggtacatcgcaagacatccggcctggtttctctacacagccgccgcggggccaaggcgggcgtctctgcagaaccgaccacaagaacatacgacctcaacaaaccacccgaattttcttttgagaaggctcgggtgagaaaagatagctctgagaagaagctgatcactgacgcactgaacaaaaaccagttcctgaaaaggctcgacccccagcagattaaagatatggttgagtgcatgtacggacggaattaccaacagggctcatatattatcaagcagggcgaacccgggaatcatatctttgtccttgcagaaggacgattggaggtgttccagggggaaaagctcctctcctcaattcctatgtggacaacattcggagagctggccattttatataactgcacccgtactgccagcgtgaaagcaattacaaatgtgaagacatgggctctggatcgtgaagtctttcaaaatataatgagaaggacagcccaagcccgagatgagcagtataggaattttcttagatccgtctctctcctgaagaacctacccgaggataaactaaccaagattatcgactgcttggaagtggagtattatgataagggagattatatcatccgagaaggagaggagggctcaacattttttattttggccaaaggaaaagttaaggtaacacagagcactgaaggtcatgaccagccccagctgatcaagaccctgcaaaagggagaatacttcggagaaaaagcgctgatctctgacgatgtaaggagtgccaatattatcgctgaagagaatgatgtagcgtgccttgtgatcgatcgcgagacatttaatcagaccgttggaacatttgaagaactccagaagtacttggaggggtacgttgctaacctgaaccgcgacgatgagaagcggcatgccaaacgctctatgagcaattggaagttgtcgaaggccctgagcttggagatgatacagctgaaagagaaagtagccagattcagcagctctagcccgttccaaaatcttgaaatcatcgcgacccttggagtaggcggatttgggagggtggaattagtaaaagtgaagaacgagaacgtggctttcgctatgaaatgcatccggaagaaacatattgtggacactaagcagcaagaacatgtgtattctgaaaaaagaatcctggaagaattgtgttctccctttatagtaaaactgtacagaaccttcaaggacaacaagtacgtgtacatgttgcttgaagcctgtctggggggcgaactgtggtctattcttagagaccgcggcagtttcgacgaacccacctccaagttttgcgtagcttgtgtaacagaggcatttgattacctacatagactgggcatcatttatagggacctgaagcccgaaaacctgatcctggacgccgaaggttatttgaaactggtggatttcgggttcgctaagaaaattggatccggccagaagacctggacgttctgtggaacccccgagtacgtggcgcccgaggtaatcttgaataaaggacacgatttttccgtcgacttctggtctcttggaatccttgtatatgaattactgactggcaatcctccatttagtggggttgatcagatgatgacctataatctgattctgaagggtattgagaagatggattttccgcgtaaaattactaggagacccgaggatctgattagaaggctgtgccggcagaatcccaccgaacgcctaggcaatctcaaaaacggcatcaacgacataaaaaaacaccgctggctgaatgggttcaactgggaaggtcttaaagcccgcagtttgccctctcctttgcagcgggagctcaagggccctatagaccatagctatttcgacaagtaccctccagagaagggcatgcctccagacgagctgagcggatgggacaaagacttctag

SEQ ID NO: 163284 - DNA, 2289 bp, Artificial Sequence
  derived and/or modified sequence
atgggaaatggatctgtgaagcccaagcacagcaagcacccagatggccacagcggcaacctgaccacagatgccctgaggaacaaggtgacagagctggagcgggagctgcggaggaaggatgctgagatccaggagcgggagtaccacctgaaggagctgcgggagcagctgagcaagcagacagtggccatcgccgagctgacagaggagctgcagaacaagtgcatccagctgaacaagctgcaggatgtggtgcacatgcagggcggcagccccctgcaggccagcccagacaaggtgcccctggaggtgcacaggaagaccagcggcctggtgtccctgcacagccggcggggggccaaggccggcgtgtctgctgagcccaccaccaggacctatgacctgaacaagcccccagagttctcctttgagaaggcccgggtgaggaaggacagcagcgagaagaagctgatcacagatgccctgaacaagaaccagttcctgaagaggctggacccccagcagatcaaggacatggtggagtgcatgtatggaagaaactaccagcagggcagctacatcatcaagcagggcgagcccggcaaccacatctttgtgctggccgagggccgcctggaggtgttccagggcgagaagctgctgagcagcatccccatgtggaccacctttggagagctggccatcctgtacaactgcaccaggacagcctctgtgaaggccatcaccaacgtgaagacctgggccctggaccgggaggtgttccagaacatcatgagaagaacagcccaggccagagatgagcagtacagaaacttcctgcggtctgtgtccctgctgaagaacctgcctgaggacaagctgaccaagatcatcgactgcctggaggtggagtactatgacaagggggactacatcatccgggagggggaggagggcagcaccttcttcatcctggccaagggcaaggtgaaggtgacccagagcacagagggccatgaccagccccagctgatcaagaccctgcagaagggggagtactttggagagaaggccctgatcagtgatgatgtgcgcagcgccaacatcatcgccgaggagaatgatgtggcctgcctggtgattgaccgggagaccttcaaccagacagtgggcacctttgaggagctgcagaagtacctggagggctacgtggccaacctgaacagagatgatgagaagagacatgccaagaggtccatgagcaactggaagctgagcaaggccctgagcctggagatgatccagctgaaggagaaggtggcccgcttcagcagcagcagccccttccagaacctggagatcatcgccaccctgggcgtgggcggcttcggccgggtggagctggtgaaggtgaagaatgaaaatgtggcctttgccatgaagtgcatcaggaagaagcacatcgtggacaccaagcagcaggagcacgtgtacagcgagaagaggatcctggaggagctgtgcagccccttcatcgtgaagctgtaccgcaccttcaaggacaacaagtatgtgtacatgctgctggaggcctgcctgggcggggagctgtggagcatcctgcgggaccggggcagctttgatgagcccaccagcaagttctgtgtggcctgtgtgacagaggcctttgactacctgcaccggctgggcatcatctacagagacctgaagccagagaacctgatcctggatgctgagggctacctgaagctggtggactttggatttgccaagaagattggcagcggccagaagacctggaccttctgtggcaccccagaatatgtggcccctgaggtgatcctgaacaagggccatgacttctctgtggacttctggagcctgggcatcctggtgtatgagctgctgactggaaacccccccttctctggagtggaccagatgatgacctacaacctgatcctgaagggcatcgagaagatggacttccccaggaagatcaccaggaggcctgaggacctgatccggcggctgtgccggcagaaccccacagagcggctgggcaacctgaagaatggcatcaatgacatcaagaagcaccgctggctgaatggcttcaactgggagggcctgaaggcccggagcctgcccagccccctgcagcgggagctgaagggccccatcgaccacagctactttgacaagtacccacctgagaagggcatgcccccagatgagctgagcggctgggacaaggacttctag

SEQ ID NO: 163285 - DNA, 2289 bp, Artificial Sequence
  derived and/or modified sequence
atgggcaacggcagcgtgaagcccaagcacagcaagcaccccgacggtcactcaggtaatctcacaacagacgccttgcgtaacaaggtgacagaactggagagagagctgcgacgcaaggatgctgaaattcaggagagagaataccatctcaaggaacttcgagagcaactctcaaagcaaaccgtggccatcgccgaactcacagaggaactgcagaataagtgtatccagttgaacaagttgcaggatgtggtccacatgcagggcggatctcctcttcaggcctcccctgacaaggtccccctcgaagtgcatcgcaagaccagtggactggtttcgctccattctagacgcggcgcgaaagctggcgtgtccgccgagcctacaacgcgaacatacgatttgaacaagcctcccgagttttcttttgagaaggccagggtgagaaaggattcttctgaaaagaagttaattactgacgctctcaacaagaatcagttcctcaaaagactcgacccacagcagatcaaagatatggtggaatgtatgtatggccgaaattaccagcaggggagctacatcattaagcagggagagcccggcaaccatatttttgtgctcgccgaaggacgccttgaagtgtttcagggcgaaaaactactaagtagcatcccgatgtggacgacttttggtgagcttgcaattttatataactgcacccgcaccgcttcggtaaaagctatcacaaatgtaaagacctgggccttggacagggaggtttttcaaaacatcatgcgacgcactgctcaggccagagatgagcagtatcgtaacttcctgaggtccgtgagtctcctcaagaacctgccagaggacaagctgaccaaaattattgactgcctggaagtcgaatactacgacaagggtgactacattatcagagaaggagaggagggctcaacctttttcatcctggctaagggaaaggtgaaagtgacccagagtaccgagggacacgatcagcctcagctgataaagactctgcagaaaggcgagtactttggagaaaaggcgctcatcagtgatgatgttcgatccgcaaacattattgcagaggagaacgatgtggcatgcctcgtaatagacagggagacctttaatcagacagtcggcactttcgaggaattgcaaaaatacctcgagggctacgtagcgaatctgaatcgggacgatgaaaaaaggcatgccaagagaagtatgtctaattggaagttaagtaaggctttgagcctcgaaatgattcagctgaaagagaaagtggccaggttcagttcttccagcccgtttcagaacttggagattatcgccactctgggtgtgggggggttcggccgggtggaactggttaaagtgaagaatgaaaacgtggccttcgccatgaaatgtatccgaaagaaacatattgtggatacaaaacaacaggaacacgtttatagcgaaaaaaggatcctggaggaactctgcagtccgttcatcgtgaaactgtatcgcacatttaaagataataagtacgtctatatgctgttggaagcgtgcctgggaggtgagctgtggagtatcctccgcgatagaggctcctttgatgagcccacttcaaaattttgtgtggcttgcgtgacagaagctttcgactatctgcaccgccttgggataatttatcgtgaccttaaacctgagaacctgattctagatgctgaaggctaccttaagctggtggatttcggattcgcgaagaagattggctccgggcaaaagacctggaccttttgtggtacacctgagtacgtggcccccgaggtgatactcaataagggccatgattttagcgtcgacttctggtcacttggcatcttagtttacgagctgctgactggcaaccctccttttagtggcgttgaccagatgatgacttataacctgatcctgaaaggaatcgaaaaaatggactttcctagaaaaattacacggcgtcccgaggatcttatccgacgactctgtagacagaatcccactgagcgtcttggcaacctgaagaacggcattaatgatatcaaaaaacacagatggctcaacgggttcaactgggaaggattgaaggctcggtcactgcccagccccctgcagcgagagctgaaggggcccatcgatcactcctattttgataaatatcctcctgaaaagggcatgccccccgacgaactttccggatgggacaaagatttctag

SEQ ID NO: 163286 - DNA, 2289 bp, Artificial Sequence
  derived and/or modified sequence
atgggcaacggcagcgtgaagcccaagcacagcaagcaccccgacggccactcaggaaatttaaccactgatgccctgaggaataaggttactgagctggagagagaattgaggcgtaaggacgcagaaatccaggagagggagtaccacctgaaggagttacgggagcagttgtccaagcaaacagtagccatcgccgagctaaccgaagagctccagaacaagtgcatacagttgaacaaattgcaggatgtggtgcatatgcaaggggggtcgcctctgcaggcatcccccgataaggtgcctctggaggtgcatcgcaagactagcggattggtgtcccttcactccagacgaggcgccaaagctggcgtgagcgccgagcctactaccagaacctacgatttgaacaaaccccccgaattttctttcgaaaaagcacgcgtaagaaaagattcaagtgagaagaagttgattacagatgccctgaataagaatcaatttcttaagcggttggacccgcagcagattaaagacatggttgagtgtatgtatggaagaaactaccaacagggctcctacattatcaagcaaggcgaacccgggaatcacatcttcgtcctggcggaagggcgacttgaagtgtttcagggcgagaaattattaagcagcatccccatgtggaccactttcggggaattagcaatactttataactgtactcggaccgcttccgtgaaggctattacaaatgtgaagacgtgggccttggatcgagaagtgtttcaaaacattatgagaagaaccgcccaagcccgcgacgagcagtatcgcaacttccttcggtccgtgtcgttactgaaaaacctgccggaggacaagttgacaaagatcattgactgtcttgaagtggagtactacgacaagggggattatattataagagagggcgaggaaggctccacattctttatcctggcaaaggggaaggtaaaagttactcaatcaacagagggccacgaccagccccagctgatcaaaacccttcagaagggcgaatactttggcgagaaagccctgattagcgatgacgttcgcagcgccaatatcattgctgaggagaacgatgttgcatgtttagtgatagacagagagactttcaaccagactgtagggacatttgaggagttacagaaatacctcgaaggatatgtggccaacctcaatcgggatgacgaaaaacgtcatgccaagaggagcatgagcaactggaaacttagtaaggccctgagcttggaaatgatacagttaaaggaaaaggtagcccggttttccagctcttccccttttcagaaccttgaaattatcgccaccttgggagtgggtggattcggcagagtggaacttgttaaggtcaagaatgagaacgtggcgtttgctatgaaatgtattaggaagaaacatatcgtggacactaagcagcaggaacacgtgtattctgagaagaggatcctggaagagctctgctctcccttcattgtgaaattgtacagaacatttaaagataacaagtacgtatacatgctgctagaggcatgcctggggggggagctctggtcaattcttagggatcgtggctcttttgatgaacctacttctaaattttgcgtggcttgcgtgacagaggcatttgattatttgcaccgcctggggatcatttaccgggatcttaagcccgagaaccttatcttggacgctgagggttacctgaagctcgtagacttcggctttgcgaagaagatcggatccggccagaagacatggaccttctgcggtactccggagtatgttgcccccgaagttattctcaataagggacacgacttctccgtggacttttggtctctgggtatactcgtgtatgagctcctgacaggaaaccctccatttagtggcgtggaccaaatgatgacgtataacctgatcctgaagggcatcgagaagatggatttcccgcgtaagattacgcggcggccagaggacttgatccgcagactctgccggcagaaccctacggagcgcctgggaaacctaaagaatggaattaacgacatcaagaaacaccggtggctgaacggattcaattgggaaggcctaaaggctcgatctctcccatcccctcttcagcgcgagctgaaaggcccgatcgatcactcctatttcgacaagtaccccccggagaaaggaatgcccccagatgagttgtcaggatgggacaaagacttctag

SEQ ID NO: 163287 - DNA, 2289 bp, Artificial Sequence
  derived and/or modified sequence
atgggaaacggttcggtcaaacctaagcattcaaagcatcctgacgggcattctggaaatctgactactgacgcgctgcggaacaaagttactgagttggaacgcgaactgagacgtaaggatgcggagattcaagagagagagtaccacctgaaggagcttagagagcaactgtctaagcagaccgtcgccatcgctgagctgaccgaggagttgcaaaacaaatgtattcagctgaacaaactccaggacgttgtgcatatgcagggtgggagcccactgcaagcttctcccgataaggttccattggaggtacaccgaaagacaagcggcctggtgtcgctacactcgcggcgtggtgcaaaggcaggagtttctgcagagcccacaacccgcacgtacgatttgaacaaaccacccgagttttcatttgaaaaagccagagtacggaaggattcctctgaaaagaaactgattaccgatgcgctgaataagaaccagtttctgaaaagactggacccgcagcaaattaaagacatggtcgagtgtatgtacgggcgtaactatcagcagggctcctatattatcaagcagggagagcccggtaaccacatttttgttctcgctgagggccgtcttgaagtgttccaaggggagaagctgctgtcaagcatccctatgtggacgacattcggagagctcgctattctttacaattgtactcgaaccgcctctgttaaggcaatcaccaacgtgaagacttgggcacttgaccgagaggtattccagaacatcatgagaagaacagcgcaggcgagagatgagcagtacagaaatttcctcaggagcgtctcgcttctgaaaaacttgcctgaggacaaacttaccaagattatcgattgtttggaagtcgagtattacgataaaggagactatatcatccgggagggagaggagggcagcacgttctttattctggctaaggggaaagttaaggtcactcagtctactgaggggcatgaccaaccccagcttatcaaaacccttcagaaaggcgagtacttcggcgaaaaagctttgatcagtgatgatgttcggtccgctaatatcattgccgaagaaaacgatgtcgcttgcctggtgattgatcgagagacgttcaaccagaccgtgggcaccttcgaagaactccaaaaatatctggagggttacgtggccaacctgaatagagatgacgaaaagaggcatgccaaacggagtatgagcaactggaagctgagcaaggctctgagtttggaaatgatccaactgaaggagaaggtggccagattctccagctcatcccctttccagaatttagagatcatcgctactttgggggtcggagggttcgggcgagtggagcttgtcaaggtcaagaacgaaaacgtggccttcgccatgaagtgcatcaggaagaagcatatcgttgacacaaaacagcaggagcacgtctacagcgagaagcgtatcttagaggagctgtgtagcccttttatcgtgaaactgtacaggaccttcaaggacaacaagtacgtgtatatgttgctcgaagcctgtctggggggagagctgtggtccattctgagagatcggggtagcttcgacgagccaacgagtaaattttgcgtggcctgcgttacggaggccttcgactacctccataggttgggtattatctatcgggacctgaaaccagaaaacctaatactggatgccgagggctatctgaaactggttgactttggattcgctaagaagattgggagcggacagaaaacgtggaccttctgcggcacccccgagtacgtggccccagaggtgatcctgaataaagggcatgactttagcgtcgacttttggtccctgggaatactggtgtacgagcttcttacaggcaatcccccattctcaggggtagaccaaatgatgacatacaacctgatccttaaaggaatcgagaagatggattttcctcgaaaaatcactcggcgtcctgaagacctcatcaggagactctgcaggcagaacccaaccgaacggctggggaatcttaaaaatggaataaacgacatcaaaaagcaccggtggctgaatgggtttaactgggaaggcctgaaggctagatcactgccctctccactccagcgcgaactcaagggcccaattgatcattcctactttgataaataccccccagagaaagggatgccccctgacgagctctcgggctgggataaagatttctag

SEQ ID NO: 163288 - DNA, 2289 bp, Artificial Sequence
  derived and/or modified sequence
atgggcaatggatctgtgaaaccaaaacactcaaagcatccagatggtcactccggtaacctgacgaccgatgcattacggaataaagtcacggaacttgaaagagaactgagaagaaaggacgccgaaatccaggaaagagagtaccacctcaaggaactgagggaacagctctccaagcagacagtggccatcgccgaactgacagaagaactgcagaacaagtgtatacagctgaataagctgcaggatgtggtgcacatgcaagggggatccccactgcaggctagccctgataaggtccctcttgaagtgcacagaaaaacttcaggccttgtctccttgcacagtagaagaggcgctaaagccggtgtctccgctgagccgactactcgcacatatgacctgaataagcctcccgagttctctttcgaaaaggctagggtgcggaaggattcaagtgagaaaaagctgatcacggacgccctcaacaagaatcaatttcttaagaggctggacccccagcagatcaaggatatggtggaatgtatgtatgggcgaaactatcagcaagggagctatataataaagcagggcgaacccggaaatcatatcttcgttctggcggagggcaggctggaagtattccagggagaaaagctgctgtcgtccatccccatgtggaccacgttcggagaacttgccatcctgtataattgcactcgcacagcaagtgtgaaagccatcactaatgtcaaaacctgggcactggatagggaggtctttcagaacataatgcgcagaaccgcccaggcccgagacgagcagtaccgcaactttctgcggtctgtatcactgctgaagaatctccctgaggataaactgaccaaaatcatagattgcttggaggttgagtactacgataagggcgattacatcatccgcgagggagaagagggcagcacctttttcattctggccaaggggaaagttaaggtcacgcaaagcacagagggccatgaccaacctcaactgattaaaacactacagaagggcgagtacttcggagaaaaagctctgattagtgacgatgtgcgttcagcaaatataatcgctgaggagaatgatgtagcctgcctcgttattgacagggagaccttcaatcaaactgtgggaacatttgaagagctccagaaatacctggaaggctacgtcgcaaatctgaatagggatgatgagaagagacatgctaaacgaagtatgagcaattggaagctgtcgaaggccctgagcctggaaatgatacagcttaaggaaaaagtggctcgtttctcttcctcttcaccttttcaaaatcttgagatcatcgctaccttgggggtagggggtttcggacgcgtggagctggtcaaggttaaaaacgagaacgtagcatttgcaatgaaatgcatccgcaaaaaacatatcgtcgatacaaaacagcaggaacacgtgtactccgagaaacgcatactggaggagctctgcagtccattcatcgtcaagctgtaccgcacatttaaggacaacaagtacgtgtacatgctcctcgaggcgtgtctgggtggagagctttggagtatcctgagagaccggggatcatttgacgaacccacatccaaattctgcgtggcatgcgtaacggaggcgtttgattacttgcatagactgggtattatctacagggacctgaagcctgaaaacttgatcttggatgccgaagggtacctcaaactggttgatttcggcttcgccaagaagattggaagtggacagaaaacatggaccttctgcgggacacccgaatacgttgcacctgaagtcatcttgaataagggtcacgatttttcagttgatttttggtccttgggtatcttggtttacgagctcctgacaggcaaccctccattctccggtgtcgatcagatgatgacatataatctgattctgaaagggatcgagaagatggacttcccgcgaaagattactcgcagaccggaagaccttatccgaaggctgtgcaggcaaaatcccacggagcgtctgggcaacttgaagaacggcatcaatgatatcaaaaagcacaggtggctgaacgggttcaactgggagggtctgaaggcgcgaagcctgccctcccctttgcagcgcgaattgaaaggccctatcgatcatagctatttcgacaaatacccccctgaaaagggcatgccccctgacgagttgagcgggtgggataaggacttctag

SEQ ID NO: 163289 - DNA, 3328 bp, Artificial Sequence
  derived and/or modified sequence
ggtccctgagcaaaatgggaaatggttcagtgaaacctaaacattctaagcacccagatggacactctgggaacctcaccactgatgctctgcggaacaaggtgacagagctggagagagagttgaggaggaaggatgctgagatccaggagcgggagtaccatttgaaggagctgcgggagcagctgtcgaagcagactgtggccattgctgaactcacagaggagctccagaacaagtgcatccagctgaacaagctgcaggatgtggtgcatatgcagggaggaagcccgcttcaggcctctccagataaagtgcctcttgaggtccaccggaagacctctggattggtctctctccatagcaggaggggagcaaaggctggcgtgtctgctgagccaacaacccggacctatgacctgaacaaaccccctgaattttcctttgagaaagcaagagtcagaaaagactccagtgagaagaagctcattacagatgcccttaataaaaatcagtttctgaaaagactggatcctcagcagatcaaagacatggtggaatgcatgtatgggagaaactatcagcaagggagttacattattaagcaaggagaaccaggaaaccatatctttgtgctggcagagggtcgactagaggtgttccaaggggagaaattgctgtcctccatccctatgtggaccacatttggggagcttgccattttatacaattgtacaaggactgcctctgtgaaagctattaccaatgttaaaacatgggcactagatcgagaggtattccagaatataatgaggaggacagcccaagctagagatgaacaatacagaaacttcctcagaagtgtatccttgctgaagaatttacctgaagataaattaaccaagatcattgactgcttggaagtggaatactatgacaaaggagattacatcattagagagggcgaggaaggaagtacctttttcattttggcaaaaggaaaggtaaaagtaacacagagcacagaaggccatgatcaaccacagctgataaaaacactgcagaaaggagaatactttggagaaaaagctcttatcagtgatgatgtcaggtcagctaacattattgctgaagaaaatgatgttgcatgcctggttatagatcgagaaacattcaaccaaactgtcggtacatttgaagagctgcaaaaataccttgaaggatatgtggcaaacctgaaccgtgatgatgaaaaaagacatgcgaagcggtccatgtctaactggaagctgtccaaagcactctctctggaaatgattcagctgaaggagaaggtggccagattttcctcatcatccccattccagaaccttgagattattgcaacactgggcgttggtgggttcggaagagttgagcttgttaaagtaaaaaatgagaatgttgcttttgctatgaagtgtataaggaagaagcacatagttgacaccaagcagcaggagcatgtctactcagagaagaggatcctagaggagctgtgctctccattcattgtgaaattatatcgtactttcaaggacaataagtatgtatacatgcttctggaggcctgcttaggtggggagctctggagtatattaagggacagaggcagctttgatgaacccacctccaaattctgcgttgcttgtgtgacagaagcatttgattacctgcatcgactaggtattatctacagagacttgaaaccagaaaacttaattctagatgctgagggttaccttaaattggttgactttggatttgcgaagaaaatagggtctggacagaaaacatggacattctgtgggactccagaatatgtagctcctgaagtcattctcaacaagggacatgacttcagtgtggatttctggtcactgggaattctagtgtatgagctcctaacgggcaacccacccttttctggggttgaccaaatgatgacctacaatttgattctcaaaggaattgaaaaaatggattttcccaggaagataacacgacgacctgaggatttgattcggaggctttgcaggcaaaatccaacagaaaggctgggaaatctgaagaatggaataaatgacattaagaaacacaggtggttaaatggttttaattgggagggactgaaagcacggagccttccatcacctttgcaaagagagctcaagggacccatagatcacagctactttgacaaatatcctcctgaaaagggaatgcctccagatgagctatcaggctgggataaagacttctgacagaagaaaagttgattactgcctgtactctacagaagaggacctcaaggatcaataatccaacacattattttcttttcagagtattataatatctttggaagaccattagggaaaagaaattcctgcacaatgggaagaggagaatggtgtggatatggttctgagttatagtgtcttatttagatgctgtgaattattgatgtattacattatttgcttttctcaactgctagaggctaccccattttcctttccacaatcagagccatttttgttaaagtggcagttttttctgcaatctattgttccattccaatcatatccttctcgtttgagtactactaacgtttaaaaagggtcttgcccttgaataactaagtcatacaaatagaaggaaaaacaatggtgaattttggagagctccccagctctcagcaacttcatataagcatggtggtatcttaaaatggtggtttgcagaaaccatggtagccaacagaacctcctgactttcacctgcttttaacctgaaaatatattaatacgcctctgacatgagtccagggagaggcaagattgagcaatagtcagtggcaccatttcctaaagtaactgaatcaatcaatccagtcaggtaattattttctattggggaacttagaaaaaaaagtaaagcaagaaatattttctctcctttatgatcagtgataccttagagacttttcgaaagtccttgttaaagatagttacaatgtgtggttaaatgatgctaaaatattttcacaaccagagtagaaaacgtgctggaacaaaattgcgaaggcttttgcctcccagtaaatagaaaggaaaatatattctagtaggtaagactgctgactctttgaaaatctgaggtattttgaaaaattctgtgatagttgctattaataaaccaaaattgtatagaatcatcgttaatttttaatataaatcccattgacaaatgttgatgcactgtagtcactgctgagttaatagcg

SEQ ID NO: 163290 - DNA, 3431 bp, Artificial Sequence
  derived and/or modified sequence
aggcggctggggagggcggcgtgggagaggacgctgagacgcaggggcggccgcgccgaggtgacaagctgcgcacctggaaagttacccggctgtctggtgaggtccctgagcaaaatgggaaatggttcagtgaaacctaaacattctaagcacccagatggacactctgggaacctcaccactgatgctctgcggaacaaggtgacagagctggagagagagttgaggaggaaggatgctgagatccaggagcgggagtaccatttgaaggagctgcgggagcagctgtcgaagcagactgtggccattgctgaactcacagaggagctccagaacaagtgcatccagctgaacaagctgcaggatgtggtgcatatgcagggaggaagcccgcttcaggcctctccagataaagtgcctcttgaggtccaccggaagacctctggattggtctctctccatagcaggaggggagcaaaggctggcgtgtctgctgagccaacaacccggacctatgacctgaacaaaccccctgaattttcctttgagaaagcaagagtcagaaaagactccagtgagaagaagctcattacagatgcccttaataaaaatcagtttctgaaaagactggatcctcagcagatcaaagacatggtggaatgcatgtatgggagaaactatcagcaagggagttacattattaagcaaggagaaccaggaaaccatatctttgtgctggcagagggtcgactagaggtgttccaaggggagaaattgctgtcctccatccctatgtggaccacatttggggagcttgccattttatacaattgtacaaggactgcctctgtgaaagctattaccaatgttaaaacatgggcactagatcgagaggtattccagaatataatgaggaggacagcccaagctagagatgaacaatacagaaacttcctcagaagtgtatccttgctgaagaatttacctgaagataaattaaccaagatcattgactgcttggaagtggaatactatgacaaaggagattacatcattagagagggcgaggaaggaagtacctttttcattttggcaaaaggaaaggtaaaagtaacacagagcacagaaggccatgatcaaccacagctgataaaaacactgcagaaaggagaatactttggagaaaaagctcttatcagtgatgatgtcaggtcagctaacattattgctgaagaaaatgatgttgcatgcctggttatagatcgagaaacattcaaccaaactgtcggtacatttgaagagctgcaaaaataccttgaaggatatgtggcaaacctgaaccgtgatgatgaaaaaagacatgcgaagcggtccatgtctaactggaagctgtccaaagcactctctctggaaatgattcagctgaaggagaaggtggccagattttcctcatcatccccattccagaaccttgagattattgcaacactgggcgttggtgggttcggaagagttgagcttgttaaagtaaaaaatgagaatgttgcttttgctatgaagtgtataaggaagaagcacatagttgacaccaagcagcaggagcatgtctactcagagaagaggatcctagaggagctgtgctctccattcattgtgaaattatatcgtactttcaaggacaataagtatgtatacatgcttctggaggcctgcttaggtggggagctctggagtatattaagggacagaggcagctttgatgaacccacctccaaattctgcgttgcttgtgtgacagaagcatttgattacctgcatcgactaggtattatctacagagacttgaaaccagaaaacttaattctagatgctgagggttaccttaaattggttgactttggatttgcgaagaaaatagggtctggacagaaaacatggacattctgtgggactccagaatatgtagctcctgaagtcattctcaacaagggacatgacttcagtgtggatttctggtcactgggaattctagtgtatgagctcctaacgggcaacccacccttttctggggttgaccaaatgatgacctacaatttgattctcaaaggaattgaaaaaatggattttcccaggaagataacacgacgacctgaggatttgattcggaggctttgcaggcaaaatccaacagaaaggctgggaaatctgaagaatggaataaatgacattaagaaacacaggtggttaaatggttttaattgggagggactgaaagcacggagccttccatcacctttgcaaagagagctcaagggacccatagatcacagctactttgacaaatatcctcctgaaaagggaatgcctccagatgagctatcaggctgggataaagacttctgacagaagaaaagttgattactgcctgtactctacagaagaggacctcaaggatcaataatccaacacattattttcttttcagagtattataatatctttggaagaccattagggaaaagaaattcctgcacaatgggaagaggagaatggtgtggatatggttctgagttatagtgtcttatttagatgctgtgaattattgatgtattacattatttgcttttctcaactgctagaggctaccccattttcctttccacaatcagagccatttttgttaaagtggcagttttttctgcaatctattgttccattccaatcatatccttctcgtttgagtactactaacgtttaaaaagggtcttgcccttgaataactaagtcatacaaatagaaggaaaaacaatggtgaattttggagagctccccagctctcagcaacttcatataagcatggtggtatcttaaaatggtggtttgcagaaaccatggtagccaacagaacctcctgactttcacctgcttttaacctgaaaatatattaatacgcctctgacatgagtccagggagaggcaagattgagcaatagtcagtggcaccatttcctaaagtaactgaatcaatcaatccagtcaggtaattattttctattggggaacttagaaaaaaaagtaaagcaagaaatattttctctcctttatgatcagtgataccttagagacttttcgaaagtccttgttaaagatagttacaatgtgtggttaaatgatgctaaaatattttcacaaccagagtagaaaacgtgctggaacaaaattgcgaaggcttttgcctcccagtaaatagaaaggaaaatatattctagtaggtaagactgctgactctttgaaaatctgaggtattttgaaaaattctgtgatagttgctattaataaaccaaaattgtatagaatcatcgttaatttttaatataaatcccattgacaaatgttgatgcactgtagtcactgctgagttaatagcg

SEQ ID NO: 163291 - DNA, 1729 bp, Artificial Sequence
  derived and/or modified sequence
catcccaacaggaatactatgacaaaggagattacatcattagagagggcgaggaaggaagtacctttttcattttggcaaaaggaaaggtcctccactttggacagataaaggagcttctaccagtagagtcccatgcaattctgtttgaacactggctttggagtggaggccacaggaccccctaagaaataataacttcttagtgatgttatgtaaaagtaacacagagcacagaaggccatgatcaaccacagctgataaaaacactgcagaaaggagaatactttggagaaaaagctcttatcagtgatgatgtcaggtcagctaacattattgctgaagaaaatgatgttgcatgcctggttatagatcgagaaacattcaaccaaactgtcggtacatttgaagagctgcaaaaataccttgaaggatatgtggcaaacctgaaccgtgatgatgaaaaaagacatgcgaagcggtccatgtctaactggaagctgtccaaagcactctctctggaaatgattcagctgaaggagaaggtggccagattttcctcatcatccccattccagaaccttgagattattgcaacactgggcgttggtgggttcggaagagttgagcttgttaaagtaaaaaatgagaatgttgcttttgctatgaagtgtataaggaagaagcacatagttgacaccaagcagcaggagcatgtctactcagagaagaggatcctagaggagctgtgctctccattcattgtgaaattatatcgtactttcaaggacaataagtatgtatacatgcttctggaggcctgcttaggtggggagctctggagtatattaagggacagaggcagctttgatgaacccacctccaaattctgcgttgcttgtgtgacagaagcatttgattacctgcatcgactaggtattatctacagagacttgaaaccagaaaacttaattctagatgctgagggttaccttaaattggttgactttggatttgcgaagaaaatagggtctggacagaaaacatggacattctgtgggactccagaatatgtagctcctgaagtcattctcaacaagggacatgacttcagtgtggatttctggtcactgggaattctagtgtatgagctcctaacgggcaacccacccttttctggggttgaccaaatgatgacctacaatttgattctcaaaggaattgaaaaaatggattttcccaggaagataacacgacgacctgaggatttgattcggaggctttgcaggcaaaatccaacagaaaggctgggaaatctgaagaatggaataaatgacattaagaaacacaggtggttaaatggttttaattgggagggactgaaagcacggagccttccatcacctttgcaaagagagctcaagggacccatagatcacagctactttgacaaatatcctcctgaaaagggaatgcctccagatgagctatcaggctgggataaagacttctgacagaagaaaagttgattactgcctgtactctacagaagaggacctcaaggatcaataatccaacacattattttcttttcagagtattataatatctttggaagaccattagggaaaagaaattcctgcacaatgggaagaggagaatggtgtggatatggttctgagttatagtgtcttatttagatgctgtgaattattgatgtattacatta

SEQ ID NO: 163292 - DNA, 2289 bp, Artificial Sequence
  derived and/or modified sequence
atgggcaacggcagcgtgaagcccaagcacagcaagcaccccgacggccacagcggcaacctgaccaccgacgccctgagaaacaaggtgaccgagctggagagagagctgagaagaaaggacgccgagatccaggagagagagtaccacctgaaggagctgagagagcagctgagcaagcagaccgtggccatcgccgagctgaccgaggagctgcagaacaagtgcatccagctgaacaagctgcaggacgtggtgcacatgcagggcggcagccccctgcaggccagccccgacaaggtgcccctggaggtgcacagaaagaccagcggcctggtgagcctgcacagcagaagaggcgccaaggccggcgtgagcgccgagcccaccaccagaacctacgacctgaacaagccccccgagttcagcttcgagaaggccagagtgagaaaggacagcagcgagaagaagctgatcaccgacgccctgaacaagaaccagttcctgaagagactggacccccagcagatcaaggacatggtggagtgcatgtacggcagaaactaccagcagggcagctacatcatcaagcagggcgagcccggcaaccacatcttcgtgctggccgagggcagactggaggtgttccagggcgagaagctgctgagcagcatccccatgtggaccaccttcggcgagctggccatcctgtacaactgcaccagaaccgccagcgtgaaggccatcaccaacgtgaagacctgggccctggacagagaggtgttccagaacatcatgagaagaaccgcccaggccagagacgagcagtacagaaacttcctgagaagcgtgagcctgctgaagaacctgcccgaggacaagctgaccaagatcatcgactgcctggaggtggagtactacgacaagggcgactacatcatcagagagggcgaggagggcagcaccttcttcatcctggccaagggcaaggtgaaggtgacccagagcaccgagggccacgaccagccccagctgatcaagaccctgcagaagggcgagtacttcggcgagaaggccctgatcagcgacgacgtgagaagcgccaacatcatcgccgaggagaacgacgtggcctgcctggtgatcgacagagagaccttcaaccagaccgtgggcaccttcgaggagctgcagaagtacctggagggctacgtggccaacctgaacagagacgacgagaagagacacgccaagagaagcatgagcaactggaagctgagcaaggccctgagcctggagatgatccagctgaaggagaaggtggccagattcagcagcagcagccccttccagaacctggagatcatcgccaccctgggcgtgggcggcttcggcagagtggagctggtgaaggtgaagaacgagaacgtggccttcgccatgaagtgcatcagaaagaagcacatcgtggacaccaagcagcaggagcacgtgtacagcgagaagagaatcctggaggagctgtgcagccccttcatcgtgaagctgtacagaaccttcaaggacaacaagtacgtgtacatgctgctggaggcctgcctgggcggcgagctgtggagcatcctgagagacagaggcagcttcgacgagcccaccagcaagttctgcgtggcctgcgtgaccgaggccttcgactacctgcacagactgggcatcatctacagagacctgaagcccgagaacctgatcctggacgccgagggctacctgaagctggtggacttcggcttcgccaagaagatcggcagcggccagaagacctggaccttctgcggcacccccgagtacgtggcccccgaggtgatcctgaacaagggccacgacttcagcgtggacttctggagcctgggcatcctggtgtacgagctgctgaccggcaacccccccttcagcggcgtggaccagatgatgacctacaacctgatcctgaagggcatcgagaagatggacttccccagaaagatcaccagaagacccgaggacctgatcagaagactgtgcagacagaaccccaccgagagactgggcaacctgaagaacggcatcaacgacatcaagaagcacagatggctgaacggcttcaactgggagggcctgaaggccagaagcctgcccagccccctgcagagagagctgaagggccccatcgaccacagctacttcgacaagtacccccccgagaagggcatgccccccgacgagctgagcggctgggacaaggacttctag

SEQ ID NO: 163293 - protein, 504 aa, Artificial Sequence
  derived and/or modified sequence
MVAPGSVTSRLGSVFPFLLVLVDLQYEGAECGVNADVEKHLELGKKLLAAGQLADALSQFHAAVDGDPDNYIAYYRRATVFLAMGKSKAALPDLTKVIQLKMDFTAARLQRGHLLLKQGKLDEAEDDFKKVLKSNPSENEEKEAQSQLIKSDEMQRLRSQALNAFGSGDYTAAIAFLDKILEVCVWDAELRELRAECFIKEGEPRKAISDLKAASKLKNDNTEAFYKISTLYYQLGDHELSLSEVRECLKLDQDHKRCFAHYKQVKKLNKLIESAEELIRDGRYTDATSKYESVMKTEPSIAEYTVRSKERICHCFSKDEKPVEAIRVCSEVLQMEPDNVNALKDRAEAYLIEEMYDEAIQDYETAQEHNENDQQIREGLEKAQRLLKQSQKRDYYKILGVKRNAKKQEIIKAYRKLALQWHPDNFQNEEEKKKAEKKFIDIAAAKEVLSDPEMRKKFDDGEDPLDAESQQGGGGNPFHRSWNSWQGFNPFSSGGPFRFKFHFN

SEQ ID NO: 163294 - DNA, 1515 bp, Artificial Sequence
  derived and/or modified sequence
atggtggccccaggcagcgtcacatctcggcttgggtctgtgttccccttcctgttagtgctggtggacttacagtacgagggcgctgaatgtggcgtaaatgcagacgtcgaaaagcacctagaactggggaagaaactgcttgccgctggacagctcgccgacgcactgagtcagtttcatgccgccgtagatggcgatccagataactacatcgcttactaccgccgcgccaccgtgtttctggctatgggcaaatcaaaagccgcactgcccgaccttacaaaagtcatccagcttaaaatggactttacagccgcccgcctacagcgggggcacctgctacttaagcagggcaaactggacgaagctgaggatgattttaagaaagtactgaagtctaacccatccgaaaacgaagagaaggaggcgcagtctcagttgatcaagagtgatgagatgcaacgcttacgctcacaagccctgaacgcattcgggtccggggattacaccgcggccatcgcatttctggataagattcttgaagtttgcgtctgggacgccgagctgcgcgagttaagagccgagtgcttcatcaaggaaggagaacccaggaaagctatcagcgacctgaaggcagccagcaaattaaagaatgacaatactgaagccttttacaagatctccacactctactatcagcttggggaccacgaattgagcctctctgaggtgcgggagtgcctcaagctggaccaggatcacaagagatgctttgcacactacaaacaggtcaaaaaactgaacaaactcatcgaatcagcggaagagctgatcagagacggcagatatactgatgctacatctaagtatgaaagtgtaatgaaaacagaaccgagcatcgcagaatatacagtgcgctccaaagaaaggatttgccactgcttcagcaaggacgagaagcccgtggaggctattcgggtgtgctcagaggtgttgcaaatggagccagacaatgttaacgccctgaaagatagagccgaggcttatttaatcgaagagatgtatgacgaagcaatacaggattacgagaccgctcaagaacacaacgaaaatgatcagcaaatccgagaggggctggaaaaagcacaacggctgctgaaacagtcccagaagagggactactataaaatcttgggcgtgaagaggaacgccaaaaaacaggaaatcataaaagcatatcgcaagttagccctgcagtggcaccctgacaactttcaaaatgaggaagagaaaaagaaagcagaaaaaaaatttatcgatatcgctgccgccaaagaggtgctttccgatccagagatgcgcaaaaaattcgatgatggggaggacccgctggacgccgagagccaacagggagggggcggtaacccattccatcggtcctggaacagttggcagggattcaacccattcagttccggaggtccattcaggttcaagtttcacttcaactag

SEQ ID NO: 163295 - DNA, 1515 bp, Artificial Sequence
  derived and/or modified sequence
atggtggcccctggctctgtgaccagccggctgggctctgtgttccccttcctgctggtgctggtggacctgcagtatgagggcgcagaatgtggggtgaatgctgatgtggagaagcacctggagctgggcaagaagctgctggccgccggccagctggctgatgccctgagccagttccacgccgctgtggatggagaccctgacaactacatcgcctactaccgccgggccaccgtcttcctggccatgggcaagagcaaggccgccctgcctgacctgaccaaggtgatccagctgaagatggacttcaccgctgcccggctgcagaggggccacctgctgctgaagcagggcaagctggatgaagcagaagatgacttcaagaaggtgctgaagagcaaccccagtgaaaatgaggagaaggaggcccagagccagctgatcaagagtgatgagatgcagaggctgcggagccaggccctgaatgcctttggaagtggggactacacagctgccatcgccttcctggacaagatcctggaggtgtgtgtgtgggatgctgagctgcgggagctgcgggcagagtgcttcatcaaggagggggagcccaggaaggccatcagtgacctgaaggccgccagcaagctgaagaatgacaacacagaggccttctacaagatcagcaccctgtactaccagctgggggaccacgagctgagcctgtctgaggtgagagaatgtctgaagctggaccaggaccacaagcgctgctttgcccactacaagcaggtgaagaagctgaacaagctgattgagagcgctgaggagctgatcagagatggccgctacacagatgccaccagcaaatatgaatctgtgatgaagacagagcccagcattgctgagtacacagtgcgcagcaaggagcgcatctgccactgcttcagcaaggatgagaagcctgtggaggccatccgggtgtgcagcgaggtgctgcagatggagccagacaacgtgaatgccctgaaggacagagctgaggcctacctgattgaggagatgtatgatgaggccatccaggactatgaaacagcccaggagcacaatgaaaatgaccagcagatccgggagggcctggagaaggcccagaggctgctgaagcagagccagaagagggactactacaagatcctgggcgtgaagagaaatgccaagaagcaggagatcatcaaggcctacaggaagctggccctgcagtggcacccagacaacttccagaatgaggaggagaagaagaaggccgagaagaagttcatcgacattgctgctgccaaggaggtgctgagtgaccctgagatgaggaagaagtttgatgatggagaggaccccctggatgctgagagccagcagggcggcggcggcaaccccttccaccgctcctggaacagctggcagggcttcaaccccttcagcagcggcggccccttccgcttcaagttccacttcaactag

SEQ ID NO: 163296 - DNA, 1515 bp, Artificial Sequence
  derived and/or modified sequence
atggtggcccccggcagcgtgaccagccggctgggcagcgtgttcccatttttactggtgctcgtggaccttcagtacgagggggccgaatgcggggtaaatgcagatgtcgagaagcacctcgaactgggcaagaaacttctggccgctggtcagctcgccgatgccctgtctcagttccacgcagccgttgatggcgacccggataactacattgcttactacaggagagccaccgtgttcctggccatggggaagtctaaggctgccctgccagatctgaccaaagtaattcagctcaaaatggattttactgcagcacgcttgcagagaggccacctgttactcaagcagggtaaactcgacgaagccgaggacgactttaagaaggttctgaagagtaacccttctgaaaatgaggagaaggaagctcaatcacaactcatcaagagtgacgaaatgcagcggctccgcagtcaggccctaaacgcctttggcagtggagattacactgctgcaattgcatttctcgataagatcttagaggtgtgtgtttgggacgcagagctccgcgaactgagagccgagtgttttattaaggagggcgaaccacgtaaggctatctctgaccttaaagcagcctctaagctaaagaacgataatacagaagctttctataagatctcaacactatactatcagctgggagatcatgaactctccctgagcgaggtgcgtgagtgcctcaagctggatcaggaccataagcggtgcttcgcccactataaacaagttaagaagctaaacaagttgattgagagcgcagaagagttgattcgagacgggagatacacggatgcaacatccaaatatgagagtgtgatgaaaaccgagccctcgatcgccgaatatacagtccggtctaaagaaagaatctgtcattgcttttctaaggacgagaaacccgtggaagcaattcgcgtctgttcagaggttctgcaaatggaacccgacaatgtcaatgctctgaaagaccgagcagaagcctatctgatagaggaaatgtacgatgaggccattcaggactacgagaccgcccaagagcacaacgaaaatgatcagcaaatcagggagggactagaaaaggcacaacgattgctgaagcagtctcagaagcgtgattattataagatcctgggagtcaaacggaacgccaaaaaacaagagattattaaggcttatcggaagttagcactgcagtggcatccagataacttccaaaacgaagaagagaaaaagaaagcagagaaaaagtttattgatatcgccgccgctaaggaggtgctgagcgatcctgagatgcgcaagaaattcgatgacggagaggaccccctggatgccgaatcccaacaggggggaggcggcaacccgttccatcgcagttggaactcatggcaggggtttaatcccttcagctccgggggaccgttccggttcaaattccattttaattag

SEQ ID NO: 163297 - DNA, 1515 bp, Artificial Sequence
  derived and/or modified sequence
atggtcgcgccaggcagcgttacttcgagattaggcagtgtgtttccttttctgctggttctcgtcgatttgcagtatgaaggagctgagtgcggcgtcaacgccgacgtagagaagcacttggaactcggtaagaagctgttggccgcagggcagctcgccgacgctttgagccagttccacgccgctgtcgatggggatccagataattatatagcatattatcgacgcgctactgtgtttttagcaatgggaaaaagtaaggccgcactccctgacctaacaaaagtcattcagctgaagatggactttactgctgccaggctgcagagggggcacctgctcttaaagcaagggaagcttgacgaggcagaggatgatttcaaaaaggtgctaaaatctaacccaagcgagaacgaggagaaggaggcgcagagtcagctgatcaagtctgatgaaatgcagcgactcaggtcacaagccctgaacgctttcggcagcggcgattatacagcagctatcgcttttttagacaagattctggaagtgtgcgtgtgggacgccgaactgcgtgagttaagggcagagtgtttcatcaaggaaggtgagcctcgtaaagcaatctcagatctaaaggcagcgagtaaactaaagaacgataacaccgaggctttctacaagatctccaccctatattatcagctgggagaccacgaactgagtctgagcgaggtgcgagaatgtctgaaactggaccaggaccataagcgctgctttgcccactataagcaggtgaagaagctgaataagttgatcgaaagcgccgaggaacttatccgggacggcaggtacactgacgcgacatctaagtatgaatctgtcatgaagactgagccaagcatcgccgagtataccgtgcgctctaaggaacgaatctgtcattgtttctccaaggacgagaaacccgtggaagctattagggtgtgtagtgaggtgcttcagatggagcctgacaatgtcaatgccctcaaagaccgagctgaagcctacctgatcgaagaaatgtacgatgaagccattcaagattacgaaactgcgcaggaacataacgagaacgatcagcaaattcgcgaagggctcgagaaggcacagaggctgctgaaacagtcacagaagagagactattataagatcctcggcgtgaaacggaatgccaagaaacaggaaatcatcaaagcttacaggaagctggcactgcaatggcaccccgataattttcagaatgaagaggaaaagaagaaggctgagaaaaagtttatagacatcgcggcagcgaaggaggtcctatctgacccagaaatgcgtaagaagtttgatgacggggaggaccctctggatgcagagtcccaacagggtggcggagggaacccgtttcatcgatcttggaatagctggcagggcttcaatccattttcttctggaggacccttccgcttcaaatttcatttcaactag

SEQ ID NO: 163298 - DNA, 1515 bp, Artificial Sequence
  derived and/or modified sequence
atggtggcccccggcagcgtgaccagcagactgggcagcgtgttccccttcctgctggtgctggtggacctgcagtacgagggcgccgagtgcggcgtgaacgccgacgtggagaagcacctggagctgggcaagaagctgctggccgccggccagctggccgacgccctgagccagttccacgccgccgtggacggcgaccccgacaactacatcgcctactacagaagagccaccgtgttcctggccatgggcaagagcaaggccgccctgcccgacctgaccaaggtgatccagctgaagatggacttcaccgccgccagactgcagagaggccacctgctgctgaagcagggcaagctggacgaggccgaggacgacttcaagaaggtgctgaagagcaaccccagcgagaacgaggagaaggaggcccagagccagctgatcaagagcgacgagatgcagagactgagaagccaggccctgaacgccttcggcagcggcgactacaccgccgccatcgccttcctggacaagatcctggaggtgtgcgtgtgggacgccgagctgagagagctgagagccgagtgcttcatcaaggagggcgagcccagaaaggccatcagcgacctgaaggccgccagcaagctgaagaacgacaacaccgaggccttctacaagatcagcaccctgtactaccagctgggcgaccacgagctgagcctgagcgaggtgagagagtgcctgaagctggaccaggaccacaagagatgcttcgcccactacaagcaggtgaagaagctgaacaagctgatcgagagcgccgaggagctgatcagagacggcagatacaccgacgccaccagcaagtacgagagcgtgatgaagaccgagcccagcatcgccgagtacaccgtgagaagcaaggagagaatctgccactgcttcagcaaggacgagaagcccgtggaggccatcagagtgtgcagcgaggtgctgcagatggagcccgacaacgtgaacgccctgaaggacagagccgaggcctacctgatcgaggagatgtacgacgaggccatccaggactacgagaccgcccaggagcacaacgagaacgaccagcagatcagagagggcctggagaaggcccagagactgctgaagcagagccagaagagagactactacaagatcctgggcgtgaagagaaacgccaagaagcaggagatcatcaaggcctacagaaagctggccctgcagtggcaccccgacaacttccagaacgaggaggagaagaagaaggccgagaagaagttcatcgacatcgccgccgccaaggaggtgctgagcgaccccgagatgagaaagaagttcgacgacggcgaggaccccctggacgccgagagccagcagggcggcggcggcaaccccttccacagaagctggaacagctggcagggcttcaaccccttcagcagcggcggccccttcagattcaagttccacttcaactag

SEQ ID NO: 163299 - DNA, 1631 bp, Artificial Sequence
  derived and/or modified sequence
gcgagagccgacggcgggcgggcgcagctgctgccggagcgccggcgcgtgctggtgggccacacacctttcctcctcttcactcgcgagccctcggacatggtggcccccggctccgtgaccagccggctgggctcggtattccccttcctgctagtcctggtggatctgcagtacgaaggtgctgaatgtggagtaaatgcagatgttgagaaacatcttgaattgggcaagaaattacttgcagctggacagctagctgatgctttatctcagtttcatgctgccgtagatggtgaccctgataactatattgcttattatcggagggctactgtctttttagctatgggcaaatcaaaagctgcacttcctgatttaactaaagtgattcaattgaagatggacttcactgcagcaagattacagagaggtcacttattactcaaacaaggaaaacttgatgaagcagaagatgattttaaaaaagtgctcaaatctaatccaagtgaaaatgaagaaaaggaagcacagtctcaacttataaaatctgatgaaatgcagcgtttgcgttcacaagcacttaacgcttttggaagtggagattatactgctgctatagccttccttgataagattttagaggtttgtgtttgggatgcagaactacgggaacttcgagctgaatgttttataaaagaaggagaacctaggaaagctataagtgacttaaaagctgcgtcaaagttgaagaatgataatactgaagcgttttataaaataagcacactgtactaccaactaggagaccacgaactgtccctcagtgaagttcgggaatgtcttaaacttgaccaggatcataaaaggtgttttgcacactataaacaagtaaagaaacttaataagctgattgagtcagctgaagagctcatcagagatggcagatacacagatgctaccagcaaatatgaatctgtcatgaaaacagagccaagcattgctgaatatacagttcgttcaaaggagaggatttgccactgcttttctaaggacgagaagcctgttgaagctattagggtttgttctgaagttttacagatggaacctgacaatgtgaatgccctgaaagatcgagcagaggcctatttgatagaggaaatgtatgatgaagctattcaggattatgaaactgctcaggaacacaatgaaaatgatcagcagattcgagaaggtctagagaaagcacaaagattattgaaacagtcgcagaaacgagattattataaaatcttgggagtaaaaagaaatgccaaaaagcaagaaattattaaagcataccgaaaattagcactgcagtggcacccagataacttccagaatgaagaagaaaagaaaaaagctgagaaaaagttcattgatatagcagctgctaaagaagtcctctctgatccagaaatgagaaagaagtttgacgacggagaagatcctttggatgcagagagccagcaaggaggcggcggcaaccctttccacagaagctggaactcatggcaagggttcaatcccttcagctcaggcggaccatttagatttaaattccacttcaattaaaccaactgtttttctgc

SEQ ID NO: 163300 - protein, 226 aa, Artificial Sequence
  derived and/or modified sequence
MEAERRRQAEKPKKGRVGSNLLPERHPATGTPTTTVDSSAPPCRRLPGAGGGRSRFSPQGGQRGRPHSRRRHRTTFSPVQLEQLESAFGRNQYPDIWARESLARDTGLSEARIQVWFQNRRAKQRKQERSLLQPLAHLSPAAFSSFLPESTACPYSYAAPPPPVTCFPHPYSHALPSQPSTGGAFALSHQSEDWYPTLHPAPAGHLPCPPPPPMLPLSLEPSKSWN

SEQ ID NO: 163301 - DNA, 681 bp, Artificial Sequence
  derived and/or modified sequence
atggaggctgaacgcagaaggcaggctgagaagcccaagaagggtagggtgggcagcaacctccttccggaacgccatcctgctaccgggactcctactactacagttgactcctcagcgccaccttgccgtaggctgcctggagctggaggcgggcgaagccgtttctccccccagggcgggcagagagggagaccccactcccggaggagacatagaactacgttttctcccgtccagctggaacaactcgaaagcgccttcggcagaaatcagtatccggatatttgggcccgagagagcctggcccgggacactggcctctctgaggcccgtatccaggtgtggttccagaacaggcgagctaagcaacgaaaacaggaaagatctttgttacagcctctagcccacctctcacccgccgccttttctagctttctgccagagagcaccgcctgtccttactcctacgccgccccccctccccccgtcacctgctttccacatccctactcacatgcactgcccagccagccctcaactggcggcgcgttcgccctatctcaccagtctgaggactggtaccccacattacacccggccccggccgggcacctcccatgcccaccccccccccctatgctgccactcagtctcgagcccagcaagagctggaactag

SEQ ID NO: 163302 - DNA, 681 bp, Artificial Sequence
  derived and/or modified sequence
atggaggccgagcggcggcggcaggccgagaagcccaagaagggccgggtgggcagcaacctgctgcctgagcggcacccagccaccggcacccccaccaccaccgtggacagcagcgccccaccctgccggcggctgcctggagctgggggcggccgcagccgcttcagcccccagggcggccagaggggccggccccacagcagaagaagacacaggaccaccttcagccctgtgcagctggagcagctggagagcgccttcggcaggaaccagtacccagacatctgggcccgggagagcctggcccgggacaccggcctgtctgaggcccgcatccaggtgtggttccagaacagaagagccaagcagaggaagcaggagaggagcctgctgcagcccctggcccacctgagccctgctgccttcagcagcttcctgcctgagagcacagcctgcccctacagctatgctgcccctcctcctcctgtgacctgcttcccccacccctacagccacgccctgcccagccagcccagcactggaggagcctttgccctgagccaccagagcgaggactggtaccccaccctgcacccagccccagctggccacctgccctgccccccacctccacccatgctgcccctgagcctggagcccagcaagtcctggaactag

SEQ ID NO: 163303 - DNA, 681 bp, Artificial Sequence
  derived and/or modified sequence
atggaggccgagcggcggcggcaggccgagaagcccaagaagggcagggtgggttccaatctgcttcccgaaagacatccggccaccggaacacctactactaccgttgactctagcgcgcccccctgcagaaggcttcctggagcaggaggcgggcggtctagattcagtccacagggtggccagcgggggaggccgcacagccgcaggcgacatcggacaaccttctctcctgtgcaactcgaacagctggaatcagctttcggccgtaaccagtacccggatatctgggcacgcgagtcattggcacgcgacactgggctgtctgaggctcgcatccaggtctggttccagaacagaagagccaagcagcggaagcaggagcggtcccttcttcagccattggctcatctgtctcccgccgcctttagctcattcctgcctgagagtaccgcttgcccgtacagctacgctgcccctccaccccccgtgacctgtttcccccacccatacagccatgccctcccgtcacagccatcgaccggaggcgcgtttgcattatcccatcaatccgaagattggtacccaacactgcaccctgctcctgccggccatcttccctgccctcccccgcctcccatgctccctttgagcctggagccttctaaatcatggaattag

SEQ ID NO: 163304 - DNA, 681 bp, Artificial Sequence
  derived and/or modified sequence
atggaagctgagaggcgccgtcaggccgagaaacccaaaaagggacgggtggggtccaatttgcttcctgagaggcaccctgccaccggaactccaacaacgactgtagactctagtgccccaccctgcaggcgtctgccaggtgccggtgggggtcggtcccgcttcagcccgcaggggggacagcggggacggccacacagtaggaggcgccaccgaactactttctcccccgtgcagctggaacagctggaatccgccttcgggcgtaaccaataccccgacatctgggccagggagtccctcgccagggacactggactgtccgaagccagaatacaagtatggttccaaaatagacgggctaagcagcgtaaacaggagcgttccttattgcagcccttagctcacctgagcccggctgcattcagttcgtttctgcccgaaagcactgcctgcccttatagttacgcggcaccaccaccccctgtgacttgtttcccacacccctattcacacgccctcccatctcaacccagcaccggcggagccttcgccttgtctcaccagtccgaggattggtatccaacactgcatccggctcccgctgggcacctcccatgcccacctcccccaccgatgctgccgctgtctctcgagccaagtaagagttggaattag

SEQ ID NO: 163305 - DNA, 1464 bp, Artificial Sequence
  derived and/or modified sequence
gcatcccggtggggagaagggccaggcagagaaaagtagtcagaaacagagcaacaggtgaggctgaggcaggagattgagctgacactcaagccaaggaagggggaattaggaaacaattagaaaaaaagtaaagacagtgaaaaagtcagagacagctgcctgcacctacacacacattcagagacagagtcccagagggtggcatacacagagggagaaggggagggaacaggtgtggagaggagctgcggaagcagagaaatctcaagtcagagattcagggacacttggtccccgtggcgagccatggaagcagaaaggaggcgccaggctgagaagccaaagaaggggcgagtcggcagcaacctgttgcctgagagacacccggccactgggaccccgaccaccacggtggactcgagtgctccaccctgcagaaggctccctggtgcaggaggggggagatcaaggttctccccgcaaggaggacagaggggccgcccgcactcccggcgccgccaccgcaccaccttcagcccagtgcagttggaacagctggagtcagcctttgggaggaaccagtaccccgacatctgggcccgagagagtcttgcccgggacactggcctcagtgaggcccgaatccaggtctggttccagaaccgcagagctaagcaacggaagcaagagcgctcactgcttcagcctctggcccatctgtctcctgccgccttttccagcttcttgccagagtccactgcttgcccctattcttacgcagcaccaccaccaccagtgacctgcttccctcacccctacagccatgccctcccttcccagccctccacaggaggcgcctttgctttgtcacaccagtctgaggactggtaccctaccttgcacccagcccctgccggccatctgccctgccccccaccccctcccatgctccccctcagccttgagccatccaagtcctggaactgaggtcaaacaagtaccaccaaggtgatccccagcctgcggccctcgtgaaaagacaagaaaatggggtggcttcctttccatctatgggtgaagcagatgcatggtgagggtcagctcagcgattagaaatttaaaaatgggagatcatggtgaattctcactggggtgattagtggaggaagtctggggaggtgagctactggaagagacagggcaagatgcctcggtggagctgcctgctgaagggtgatattgatgaagacagttgctggtgagtggagatgattgaagggctaggaggtgagggccttcattaattgagatcacgattgaagaagatcccagctctttctggctgatttcagtaaggcttctgacttaagagtctacctatacatcccttccccattgcccaccccgccatctcaatcagtcactgacttttgtttattctgtcctagaaatacctttttt

SEQ ID NO: 163306 - DNA, 681 bp, Artificial Sequence
  derived and/or modified sequence
atggaggccgagagaagaagacaggccgagaagcccaagaagggcagagtgggcagcaacctgctgcccgagagacaccccgccaccggcacccccaccaccaccgtggacagcagcgcccccccctgcagaagactgcccggcgccggcggcggcagaagcagattcagcccccagggcggccagagaggcagaccccacagcagaagaagacacagaaccaccttcagccccgtgcagctggagcagctggagagcgccttcggcagaaaccagtaccccgacatctgggccagagagagcctggccagagacaccggcctgagcgaggccagaatccaggtgtggttccagaacagaagagccaagcagagaaagcaggagagaagcctgctgcagcccctggcccacctgagccccgccgccttcagcagcttcctgcccgagagcaccgcctgcccctacagctacgccgccccccccccccccgtgacctgcttcccccacccctacagccacgccctgcccagccagcccagcaccggcggcgccttcgccctgagccaccagagcgaggactggtaccccaccctgcaccccgcccccgccggccacctgccctgccccccccccccccccatgctgcccctgagcctggagcccagcaagagctggaactag

SEQ ID NO: 163307 - protein, 470 aa, Artificial Sequence
  derived and/or modified sequence
MSHHPSGLRAGFSSTSYRRTFGPPPSLSPGAFSYSSSSRFSSSRLLGSASPSSSVRLGSFRSPRAGAGALLRLPSERLDFSMAEALNQEFLATRSNEKQELQELNDRFANFIEKVRFLEQQNAALRGELSQARGQEPARADQLCQQELRELRRELELLGRERDRVQVERDGLAEDLAALKQRLEEETRKREDAEHNLVLFRKDVDDATLSRLELERKIESLMDEIEFLKKLHEEELRDLQVSVESQQVQQVEVEATVKPELTAALRDIRAQYESIAAKNLQEAEEWYKSKYADLSDAANRNHEALRQAKQEMNESRRQIQSLTCEVDGLRGTNEALLRQLRELEEQFALEAGGYQAGAARLEEELRQLKEEMARHLREYQELLNVKMALDIEIATYRKLLEGEESRISVPVHSFASLNIKTTVPEVEPPQDSHSRKTVLIKTIETRNGEVVTESQKEQRSELDKSSAHSY

SEQ ID NO: 163308 - DNA, 1413 bp, Artificial Sequence
  derived and/or modified sequence
atgagccatcacccctctgggctgagggcgggcttcagttctactagctaccgaagaactttcggtcctcccccatcccttagtccaggggcattcagctattcaagctcttctcgattcagttcaagtcgcctattgggcagcgcttctccctcttcctccgtcagactgggcagttttcgctcgccacgggcaggcgcaggtgccctgctccggctgccatctgagaggctggacttcagtatggctgaggccctgaaccaggagtttctggccacccggtctaacgaaaaacaggaactccaggaactgaacgaccgcttcgcgaatttcatcgaaaaagtgagattcttagaacagcaaaatgcagcccttaggggggaattgtcccaggcacgcggtcaggagcctgccagagctgaccagttgtgccagcaggaactccgggaattgagacgcgaacttgaactacttggacgcgaaagggatagggtccaagtcgaacgcgacggtctagcggaggacctagccgccttaaagcagagactcgaagaagagaccaggaaaagggaggatgccgaacacaatctcgtgctgttccggaaggacgtggacgacgctacgctcagtcgcttggaactggagcggaagattgaatctctcatggacgaaatagagttcctgaagaagctgcatgaggaggaactccgcgatctacaggtgagtgtcgagagtcagcaagtccagcaggtggaagttgaggccacagtgaagccagagctgactgctgcgctgagagacattcgcgcccaatacgagtcaattgcggccaagaatctacaagaagcagaggagtggtacaagtcgaagtatgctgacctgtcagacgccgctaatcgaaaccacgaggcactccgccaggcaaaacaagagatgaatgagtctcgtagacagattcagagtcttacctgtgaggtagatggactgagaggcactaatgaagccctgctgaggcaactccgcgagttggaggaacagtttgctctggaagccggaggctaccaggcaggcgctgctaggctcgaggaagagctgcgccagctaaaggaagaaatggctaggcacctcagagaataccaggagcttttgaacgtgaaaatggccttagacatcgagattgcaacttaccgaaagttacttgagggtgaagagtcacgcataagcgtgcctgtccatagtttcgcgtccctcaacatcaaaaccacagtccctgaggttgaaccacctcaggatagtcatagccggaagactgtcttaatcaagaccatagagacaagaaatggagaagtggtcaccgagtcccagaaagagcaacgctctgaactcgataagagcagcgcgcattcctactag

SEQ ID NO: 163309 - DNA, 1413 bp, Artificial Sequence
  derived and/or modified sequence
atgagccaccaccccagcggcctgcgggccggcttcagcagcaccagctacagaaggacctttggacctccacccagcctgagccctggggccttctcctacagcagcagcagccgcttcagcagcagccggctgctgggcagcgccagccccagcagctctgtgcggctgggcagcttccgcagccccagggctggagctggggccctgctgcggctgcccagcgagcggctggacttctccatggccgaggccctgaaccaggagttcctggccaccaggagcaatgagaagcaggagctgcaggagctgaatgacagatttgccaacttcatcgagaaggtgcgcttcctggagcagcagaatgctgccctgcggggggagctgagccaggcccggggccaggagcccgcccgggctgaccagctgtgccagcaggagctgcgggagctgcggcgggagctggagctgctgggccgggagcgggacagagtgcaggtggagagagatggcctggccgaggacctggccgccctgaagcagaggctggaggaggagaccaggaagagagaagatgctgagcacaacctggtgctcttcaggaaggatgtggatgatgccaccctgagccggctggagctggagaggaagattgagagcctgatggatgaaattgagttcctgaagaagctgcacgaggaggagctgcgggacctgcaggtgtctgtggagagccagcaggtgcagcaggtggaggtggaggccaccgtgaagccagagctgacagctgccctgcgggacatccgggcccagtatgagagcattgctgccaagaacctgcaggaggccgaggagtggtacaagagcaaatatgctgacctgagtgatgctgccaacagaaaccacgaggccctgcggcaggccaagcaggagatgaatgaaagccggcggcagatccagagcctgacctgtgaggtggatggcctgcggggcaccaatgaggccctgctgcggcagctgcgggagctggaggagcagtttgccctggaggccggcggctaccaggccggggccgcccggctggaggaggagctgcggcagctgaaggaggagatggcccggcacctgcgggagtaccaggagctgctgaatgtgaagatggccctggacattgaaattgccacctacaggaagctgctggagggggaggagagccgcatctctgtgcctgtgcacagctttgccagcctgaacatcaagaccaccgtgcctgaggtggagcccccccaggacagccacagcaggaagacagtgctgatcaagaccatcgagaccagaaatggagaggtggtgacagagagccagaaggagcagaggtctgagctggacaagagcagcgcccacagctactag

SEQ ID NO: 163310 - DNA, 1413 bp, Artificial Sequence
  derived and/or modified sequence
atgagccaccaccccagcggcctgcgggccggcttcagcagcaccagttacaggaggactttcggtcctccaccgtctctgtccccaggagcgttcagctactctagttcttccagatttagtagtagtagattgctggggagtgcatctccgagcagcagtgtgagattgggcagttttaggagccccagagctggcgctggtgctctcctgcgtttgcctagcgagagactggacttttccatggccgaagcactgaaccaggagtttctggccactcgcagtaacgagaagcaagaactgcaggaattgaacgaccggttcgctaattttatcgaaaaggtgagattcttagagcaacagaacgctgccctgcggggggaattatcccaggcaaggggtcaggagcctgctcgggccgaccagctctgccagcaggagctgcgcgagctgaggcgtgagctcgagctgctgggcagggagcgcgatagagtacaggtggaaagggatggcctcgcagaagatttagcagcgctgaagcaacggctggaagaggagactcgcaaaagggaagatgctgagcacaacctggtcttattccgcaaggatgtggacgacgcgactctttctcgcttagagttggaaaggaaaatcgaaagcctcatggacgagattgagttcctcaaaaagttacacgaggaagagctccgcgaccttcaagttagtgttgagtcacagcaagtccaacaagtcgaagtggaggcaactgtaaaaccagagctcactgcggcattgcgggatattcgcgctcagtacgagtcaatcgccgcgaaaaacttacaggaggctgaagaatggtacaaaagtaagtacgctgacctatcagatgccgctaataggaatcatgaggcactgcgccaggcaaagcaggagatgaatgagtcccgccggcagattcagtccctgacgtgcgaggtggacggtctccgagggacaaacgaagccctgttgcgacaattgcgagagctggaggaacagtttgccctggaggccggtggttaccaggccggggccgctagactggaagaagagttacgccagctgaaagaagagatggcaaggcatcttagggagtaccaagaacttttgaatgtgaaaatggctttggacatagagattgcaacgtataggaaattactggagggcgaagagtcccggatcagtgtgcccgtgcacagtttcgccagtttgaatatcaagaccaccgttcccgaggttgaaccgccccaggactctcactctagaaaaaccgtgctgataaaaaccattgaaacgcgcaatggagaagtggtaaccgagtctcaaaaggagcagcggtcagaactggataagtcatctgcccacagctactag

SEQ ID NO: 163311 - DNA, 3241 bp, Artificial Sequence
  derived and/or modified sequence
agatgcactctcttgtcctcaggtcccatctgaggcagacctgtctcacaggacagcgctggagtccccagcagcagcagcagccccagccctatggttcctggcaaacccagcagacctcagcaacccggctcctgcagaccatccgagctgcctctgtccactcctgggcaggttgtgcttgcattctggaagctgtttgacatacaaaggccagatatcagccttctcgctaactctggagtaggggagggtgtggtgggatgtgtgattgtgtgtgtatgtgtgtgtatgtagtgtgtgtgcgcatagatatacaaagctgtgtgtatgcatctgtttgcgtgcgcaggtttgtggacctgttctggggccttctctctttcagactgctggggatgggcactttctctttccccatctcttccccatccagccccacccatccctggtacctgcaactcatcaatactggaaaccagctcctgccagtccatccatctctcagccttggcagccgctgttgcccctcagccccctccccttcctacctcaggaatcactctggttcctgtaaagcccatgactgagcagcaattggtgtggggttggggggagggagaatccagtaaaccaagacagaatacaaaaggcccacttagcccagcccgtggcatggggcagaccctcccgagtgggatccagagctgggtccagccaccctcagccccctatgatgtacccacctcattggggcttgttgcggggtaggtctaggtttgggggctgtgtctttaaggctgaaacatcagcagacaacctctgctgggccgtcttcaggggagggggaggggggctggtcagcccattagcagcagagctggcgccaggcaccagcccttcacagggccctggggattagggagagtagctcttccccagcccgatctgcctctgcgcccctgtctcctattcctctctgggtgtggtgaaggaggggtagctgacagcaggtgaaaatagagcctggccttcagggggcaagtcaaggcactagctatggggcctaagccaggtcaactctccctccagctggcctcctccctactcctgtgccagaagcctgccctttaacttcaggtccttctacctcgcaattttcagggactctagttcaagtcaggccttcctaccctaggttctagctttgggtgcttgttgggaggaagtgacccccaccccagcggcaacagggggcaatcaagtgggtagaggcctgcaaccagggaagggaggggaaggcgctcctgctgttccgcaggggtggggcatccccctccccatacaacccccctccagcgggccatcaggccagtgggaggagctgcccgtgccccccctgagaccgcagggctataaagccgcctcgcagcggtctgcggctccttcccagcccccggcctagctctgcgaacggtgactgcccatccttggccgcaatgagccaccacccgtcgggcctccgggccggcttcagctccacctcataccgccgtaccttcggtccaccgccctcactatcccccggggccttctcctactcgtccagctcccgcttctccagcagccgcctgctgggctccgcgtccccgagctcctcggtgcgcctgggcagcttccgtagcccccgagcgggagcgggcgccctcctgcgcctgccctcggagcgcctcgacttctccatggccgaggccctcaaccaggagttcctggccacgcgcagcaacgagaagcaggagctgcaggagctcaacgaccgcttcgccaacttcatcgagaaggtacgctttctggagcagcagaacgcggccctgcgcggggagctgagccaagcccggggccaggagccggcgcgcgccgaccagctgtgccagcaggagctgcgcgagctgcggcgagagctggagctgttgggccgcgagcgtgaccgggtgcaggtggagcgcgacgggctggcggaggacctggcggcgctcaagcagaggttggaggaggagacgcgcaagcgggaggacgcggagcacaacctcgtgctcttccgcaaggacgtggacgatgccactctgtcccgcctggaactagagcgcaagattgagtctctgatggatgagattgagttcctcaagaagctgcacgaggaggagctgcgagacctgcaggtgagtgtggagagccagcaggtgcagcaggtggaggtggaagccacggtgaagcccgagctgacggcagcgctgagggacatccgcgcgcagtacgagagcatcgccgcgaagaacctgcaggaggcggaggagtggtacaagtccaagtacgcggacctgtccgacgctgccaaccggaaccacgaggccctgcgccaggccaagcaggagatgaacgagtcccgacgccagatccagagtctaacgtgcgaggtggacgggctgcgcggcacgaacgaggcgctgctcaggcagttgagagagctggaggagcagttcgccctggaggcggggggctaccaggcgggcgctgcgcggctcgaggaggagctgcgacagctaaaagaggagatggcgcggcacctgagggagtaccaggagctcctcaacgtcaagatggccctggacatcgagatcgccacctaccgcaagctgctggagggcgaggagagccggatctccgtgcccgtccattcttttgcctccttaaatataaagacgactgtgcctgaggtggagcctccccaggacagccacagccggaagacggttctgatcaagaccattgagacccggaatggggaggtggtgacagagtcccagaaggagcagcgcagtgagctggacaagtcttctgcccacagttactgaaccccttggtccggagccttgactctgccctaggcctgctcaaagcccaaaccctaagaccactcctgaattgtctcctctccctctgcatgtgtctaaaaggtggtaccaggcatccctttcctggcttatggccaagccctacccggccagcagtcgctgggcctctccctgccctgacacttgatgtgacctatgtgcttcccttttcatgtcccgataagaagccaatgatcccccctcaggacaaatctactccagccacgatgagaagtgggtgagccagggtctgagtttcacatttgaaccaaataaaatgctgtcaagag

SEQ ID NO: 163312 - DNA, 1413 bp, Artificial Sequence
  derived and/or modified sequence
atgagccatcatccttccggcctccgagcgggattttcctccacctcctatcgaagaactttcggccctcccccttccctgagtcccggagccttctcatacagctccagttcccggtttagtagtagtaggctgctgggtagcgccagtccctcctcctctgtgagattaggcagtttccggagcccacgggctggcgcaggggcattattgcgcctgcctagcgagcgactcgacttctccatggccgaagctctgaatcaggagtttcttgcaacacggtctaacgagaagcaggagttacaagaactcaatgaccgttttgcaaatttcattgagaaggtgcggtttctggagcagcaaaacgcagcccttcgtggcgagctgtcacaggcccgtggccaggagccagcccgtgccgatcagctgtgtcagcaggaactgcgcgaactgcggagagaattagaactgcttggaagggagcgagaccgtgtacaagtcgagagggacggcttagcggaagatctggctgctctcaaacagcgcctcgaagaagagactcggaaaagagaagatgctgaacataatcttgtgctcttcagaaaggacgtggatgacgctacgcttagtcgcctggagctagagaggaaaattgaaagccttatggatgaaattgagtttctgaaaaaacttcacgaggaagagctgcgtgatctgcaggtgtctgtggaaagtcagcaggtgcagcaggttgaagttgaagctaccgtgaagcccgaactgaccgccgctctgagggacattagagcccaatatgagagcatcgcggctaaaaacttacaagaggccgaagaatggtataaatctaaatacgccgatttatctgatgcagcaaaccgcaaccatgaagcactgcggcaggccaaacaggagatgaacgaatctcgcaggcagatccagtctttgacatgcgaggtggatggcctgaggggcaccaacgaggctctcctccgtcagctgagggaacttgaggaacagtttgccctcgaggctggtgggtatcaagccggtgctgctcggctcgaggaggagctgcgccagcttaaagaagaaatggcccgacacctgcgcgagtaccaggagctcctgaacgtcaagatggccttggatattgagatcgccacgtatagaaaattactggaaggagaggagagccgaatcagtgttcccgttcactcctttgcctctcttaatataaagaccactgtacctgaggtggagccccctcaggacagccattcacgcaagaccgttctgataaagaccattgagacacgcaatggggaggtagtgacggagtctcagaaagagcagagaagcgagcttgacaagtccagcgctcattcctactag

SEQ ID NO: 163313 - DNA, 1413 bp, Artificial Sequence
  derived and/or modified sequence
atgagccaccaccccagcggcctgagagccggcttcagcagcaccagctacagaagaaccttcggccccccccccagcctgagccccggcgccttcagctacagcagcagcagcagattcagcagcagcagactgctgggcagcgccagccccagcagcagcgtgagactgggcagcttcagaagccccagagccggcgccggcgccctgctgagactgcccagcgagagactggacttcagcatggccgaggccctgaaccaggagttcctggccaccagaagcaacgagaagcaggagctgcaggagctgaacgacagattcgccaacttcatcgagaaggtgagattcctggagcagcagaacgccgccctgagaggcgagctgagccaggccagaggccaggagcccgccagagccgaccagctgtgccagcaggagctgagagagctgagaagagagctggagctgctgggcagagagagagacagagtgcaggtggagagagacggcctggccgaggacctggccgccctgaagcagagactggaggaggagaccagaaagagagaggacgccgagcacaacctggtgctgttcagaaaggacgtggacgacgccaccctgagcagactggagctggagagaaagatcgagagcctgatggacgagatcgagttcctgaagaagctgcacgaggaggagctgagagacctgcaggtgagcgtggagagccagcaggtgcagcaggtggaggtggaggccaccgtgaagcccgagctgaccgccgccctgagagacatcagagcccagtacgagagcatcgccgccaagaacctgcaggaggccgaggagtggtacaagagcaagtacgccgacctgagcgacgccgccaacagaaaccacgaggccctgagacaggccaagcaggagatgaacgagagcagaagacagatccagagcctgacctgcgaggtggacggcctgagaggcaccaacgaggccctgctgagacagctgagagagctggaggagcagttcgccctggaggccggcggctaccaggccggcgccgccagactggaggaggagctgagacagctgaaggaggagatggccagacacctgagagagtaccaggagctgctgaacgtgaagatggccctggacatcgagatcgccacctacagaaagctgctggagggcgaggagagcagaatcagcgtgcccgtgcacagcttcgccagcctgaacatcaagaccaccgtgcccgaggtggagcccccccaggacagccacagcagaaagaccgtgctgatcaagaccatcgagaccagaaacggcgaggtggtgaccgagagccagaaggagcagagaagcgagctggacaagagcagcgcccacagctactag

SEQ ID NO: 163314 - protein, 249 aa, Artificial Sequence
  derived and/or modified sequence
MAMLRVQPEAQAKVDVFREDLCTKTENLLGSYFPKKISELDAFLKEPALNEANLSNLKAPLDIPVPDPVKEKEKEERKKQQEKEDKDEKKKGEDEDKGPPCGPVNCNEKIVVLLQRLKPEIKDVIEQLNLVTTWLQLQIPRIEDGNNFGVAVQEKVFELMTSLHTKLEGFHTQISKYFSERGDAVTKAAKQPHVGDYRQLVHELDEAEYRDIRLMVMEIRNAYAVLYDIILKNFEKLKKPRGETKGMIY

SEQ ID NO: 163315 - DNA, 750 bp, Artificial Sequence
  derived and/or modified sequence
atggccatgctgagagtgcagcccgaggcccaggccaaggtggacgtgttcagagaggacctgtgcaccaagaccgagaacctgctgggcagctacttccccaagaagatcagcgagctggacgccttcctgaaggagcccgccctgaacgaggccaacctgagcaacctgaaggcccccctggacatccccgtgcccgaccccgtgaaggagaaggagaaggaggagagaaagaagcagcaggagaaggaggacaaggacgagaagaagaagggcgaggacgaggacaagggccccccctgcggccccgtgaactgcaacgagaagatcgtggtgctgctgcagagactgaagcccgagatcaaggacgtgatcgagcagctgaacctggtgaccacctggctgcagctgcagatccccagaatcgaggacggcaacaacttcggcgtggccgtgcaggagaaggtgttcgagctgatgaccagcctgcacaccaagctggagggcttccacacccagatcagcaagtacttcagcgagagaggcgacgccgtgaccaaggccgccaagcagccccacgtgggcgactacagacagctggtgcacgagctggacgaggccgagtacagagacatcagactgatggtgatggagatcagaaacgcctacgccgtgctgtacgacatcatcctgaagaacttcgagaagctgaagaagcccagaggcgagaccaagggcatgatctactag

SEQ ID NO: 163316 - DNA, 750 bp, Artificial Sequence
  derived and/or modified sequence
atggcaatgctgagagtccagcctgaggcccaggccaaggtggacgttttcagagaagacctttgtactaagaccgagaatctcctgggatcttatttcccgaagaagatatccgagcttgacgcctttctgaaagagccagcactgaatgaggccaatttgagcaacctcaaggctccacttgacatacccgtccctgaccccgtcaaagaaaaggaaaaggaggaaagaaaaaaacagcaggagaaagaagacaaagacgagaagaaaaaaggagaagacgaggacaaaggacctccatgtggaccagtgaattgtaatgaaaaaattgtggtccttctccagcgtctaaagccagagatcaaagacgtcatcgaacaattgaacctggtgaccacatggctgcagctgcagattccccgcattgaggacgggaacaacttcggtgtcgcggtccaagagaaggtcttcgagctgatgacctctctgcacacaaagctggaggggtttcatacgcagatttccaagtacttttccgagcgcggcgatgcagtgaccaaagcggctaagcaaccacacgtgggagactaccgacagttggtccacgaactcgacgaggccgaataccgtgacatcaggctaatggtgatggagatacgcaatgcatatgccgtgctctatgacatcattctaaaaaatttcgaaaaactgaagaaacctcgtggcgagaccaaggggatgatatactag

SEQ ID NO: 163317 - DNA, 750 bp, Artificial Sequence
  derived and/or modified sequence
atggccatgctgcgggtgcagcctgaggcccaggccaaggtggatgtgttccgggaggacctgtgcaccaagacagagaacctgctgggcagctacttccccaagaagatcagcgagctggatgccttcctgaaggagcccgccctgaatgaggccaacctgagcaacctgaaggcccccctggacatccctgtgcctgaccctgtgaaggagaaggagaaggaggagaggaagaagcagcaggagaaggaggacaaggatgagaagaagaagggagaagatgaagataaaggaccaccctgtggccctgtgaactgcaatgagaagatcgtggtgctgctgcagaggctgaagccagagatcaaggatgtgattgagcagctgaacctggtgaccacctggctgcagctgcagatccccagaattgaagatggcaacaactttggagtggccgtgcaggagaaggtgtttgagctgatgaccagcctgcacaccaagctggagggcttccacacccagatcagcaagtacttcagcgagagaggagatgctgtgaccaaggccgccaagcagccccacgtgggggactaccggcagctggtgcatgagctggatgaagctgagtacagagacatccggctgatggtgatggagatcagaaatgcctatgctgtgctgtatgacatcatcctgaagaactttgagaagctgaagaagcccagaggagagaccaagggcatgatctactag

SEQ ID NO: 163318 - DNA, 750 bp, Artificial Sequence
  derived and/or modified sequence
atggccatgctgcgggtgcagcccgaggcccaggccaaggtggacgtgttccgggaggatctctgcaccaaaacagaaaaccttctaggctcctactttcctaagaaaatttccgagcttgacgcgtttttgaaggagcccgctcttaatgaagcaaatctttccaatctaaaggcgcctttggacatacccgtcccagacccggtcaaggagaaagagaaagaagagcgtaaaaagcagcaggaaaaagaggacaaagatgaaaagaaaaaaggggaggacgaagacaaaggtcccccctgtggccctgtcaactgcaacgagaagattgtcgtgctgctccagagactgaaaccagagataaaggacgtaatcgagcaactgaatttagtgacaacatggctacagctgcaaatccccaggatcgaggatggaaataattttggcgtggctgtccaagaaaaagtctttgagctgatgacaagtcttcatactaagctcgaaggctttcacacccaaatcagtaagtatttttccgaacggggcgacgctgtaacgaaagccgcaaagcagccacacgtgggtgactacaggcagcttgtccacgagctggatgaagctgaatatcgggatatcaggctgatggttatggagatacgcaatgcttacgcagttctatatgatatcattctgaaaaactttgagaagttaaagaagccacgcggcgaaacaaaagggatgatctactag

SEQ ID NO: 163319 - DNA, 750 bp, Artificial Sequence
  derived and/or modified sequence
atggcaatgctgagagttcagccagaagcacaggccaaggttgatgtcttcagggaggatctttgcacgaaaacagagaatctgcttggcagttacttcccgaaaaagatttccgagcttgacgcttttcttaaagagccggcactgaacgaggccaatctctccaatctaaaggcacccctcgacattcccgttcccgaccctgtgaaggaaaaggaaaaagaggagagaaagaagcagcaagagaaagaagataaggatgagaagaaaaaaggagaagacgaggacaaggggccaccgtgtggaccagtcaattgtaacgagaagatcgtggtactgctgcagcgacttaagccagagattaaggacgttattgaacagctgaatttagtcaccacatggctccagttacaaattccgcgaatcgaggatggaaacaactttggcgtggcggtgcaggagaaagtgttcgagctgatgacctccctgcacactaagctggagggattccatactcagatctctaagtattttagcgaaaggggagatgcggtcaccaaggcggctaaacagccccacgttggggattatagacaacttgtccacgagctagacgaggccgagtacagagacataagattgatggttatggaaatccggaatgcctacgctgtgctttacgacataatactgaagaatttcgagaagcttaaaaaaccaaggggggagacgaagggaatgatatattag

SEQ ID NO: 163320 - DNA, 1006 bp, Artificial Sequence
  derived and/or modified sequence
actacccaggaaggcggagctgggtgcgagcgccctaccgctttcgctttcccttcgcggtgcccactccactccttgtgcggcgctaggccccccgtcccggtcatggccatgctcagggtccagcccgaggcccaagccaaggtggatgtgtttcgtgaagacctctgtaccaagacagagaacctgctcgggagctatttccccaagaagatttctgagctggatgcatttttaaaggagccagctctcaatgaagccaacttgagcaatctgaaggccccattggacatcccagtgcctgatccagtcaaggagaaagagaaagaggagcggaagaaacagcaggagaaggaagacaaggatgaaaagaagaagggggaggatgaagacaaaggtcctccctgtggcccagtgaactgcaatgaaaagatcgtggtccttctgcagcgcttgaagcctgagatcaaggatgtcattgagcagctcaacctggtcaccacctggttgcagctgcagatacctcggattgaggatggtaacaattttggagtggctgtccaggagaaggtgtttgagctgatgaccagcctccacaccaagctagaaggcttccacactcaaatctctaagtatttctctgagcgtggtgatgcagtgactaaagcagccaagcagccccatgtgggtgattatcggcagctggtgcacgagctggatgaggcagagtaccgggacatccggctgatggtcatggagatccgcaatgcttatgctgtgttatatgacatcatcctgaagaacttcgagaagctcaagaagcccaggggagaaacaaagggaatgatctattgagagccctctctcccattctgtgatgagtacagcagagaccttcctgctttttactggggactccagattttccccaaacttgcttctgttgagatttttccctcaccttgcctctcaggcacaataaatatagttataccactgcccatca

SEQ ID NO: 163321 - protein, 2434 aa, Artificial Sequence
  derived and/or modified sequence
QFLFTKVSLADPAALGFIISPWSLLLLPSGSVSFTDENISNQDLRAFTAPEVLQNQSLTSLSDVEKIHIYSLGMTLYWGADYEVPQSQPIKLGDHLNSILLGMCEDVIYARVSVRTVLDACSAHIRNSNCAPSFSYVKHLVKLVLGNLSGTDQLSCNSEQKPDRSQAIRDRLRGKGLPTGRSSTSDVLDIQKPPLSHQTFLNKGLSKSMGFLSIKDTQDENYFKDILSDNSGREDSENTFSPYQFKTSGPEKKPIPGIDVLSKKKIWASSMDLLCTADRDFSSGETATYRRCHPEAVTVRTSTTPRKKEARYSDGSIALDIFGPQKMDPIYHTRELPTSSAISSALDRIRERQKKLQVLREAMNVEEPVRRYKTYHGDVFSTSSESPSIISSESDFRQVRRSEASKRFESSSGLPGVDETLSQGQSQRPSRQYETPFEGNLINQEIMLKRQEEELMQLQAKMALRQSRLSLYPGDTIKASMLDITRDPLREIALETAMTQRKLRNFFGPEFVKMTIEPFISLDLPRSILTKKGKNEDNRRKVNIMLLNGQRLELTCDTKTICKDVFDMVVAHIGLVEHHLFALATLKDNEYFFVDPDLKLTKVAPEGWKEEPKKKTKATVNFTLFFRIKFFMDDVSLIQHTLTCHQYYLQLRKDILEERMHCDDETSLLLASLALQAEYGDYQPEVHGVSYFRMEHYLPARVMEKLDLSYIKEELPKLHNTYVGASEKETELEFLKVCQRLTEYGVHFHRVHPEKKSQTGILLGVCSKGVLVFEVHNGVRTLVLRFPWRETKKISFSKKKITLQNTSDGIKHGFQTDNSKICQYLLHLCSYQHKFQLQMRARQSNQDAQDIERASFRSLNLQAESVRGFNMGRAISTGSLASSTLNKLAVRPLSVQAEILKRLSCSELSLYQPLQNSSKEKNDKASWEEKPREMSKSYHDLSQASLYPHRKNVIVNMEPPPQTVAELVGKPSHQMSRSDAESLAGVTKLNNSKSVASLNRSPERRKHESDSSSIEDPGQAYVLDVLHKRWSIVSSPEREITLVNLKKDAKYGLGFQIIGGEKMGRLDLGIFISSVAPGGPADLDGCLKPGDRLISVNSVSLEGVSHHAAIEILQNAPEDVTLVISQPKEKISKVPSTPVHLTNEMKNYMKKSSYMQDSAIDSSSKDHHWSRGTLRHISENSFGPSGGLREGSLSSQDSRTESASLSQSQVNGFFASHLGDQTWQESQHGSPSPSVISKATEKETFTDSNQSKTKKPGISDVTDYSDRGDSDMDEATYSSSQDHQTPKQESSSSVNTSNKMNFKTFSSSPPKPGDIFEVELAKNDNSLGISVTGGVNTSVRHGGIYVKAVIPQGAAESDGRIHKGDRVLAVNGVSLEGATHKQAVETLRNTGQVVHLLLEKGQSPTSKEHVPVTPQCTLSDQNAQGQGPEKVKKTTQVKDYSFVTEENTFEVKLFKNSSGLGFSFSREDNLIPEQINASIVRVKKLFPGQPAAESGKIDVGDVILKVNGASLKGLSQQEVISALRGTAPEVFLLLCRPPPGVLPEIDTALLTPLQSPAQVLPNSSKDSSQPSCVEQSTSSDENEMSDKSKKQCKSPSRRDSYSDSSGSGEDDLVTAPANISNSTWSSALHQTLSNMVSQAQSHHEAPKSQEDTICTMFYYPQKIPNKPEFEDSNPSPLPPDMAPGQSYQPQSESASSSSMDKYHIHHISEPTRQENWTPLKNDLENHLEDFELEVELLITLIKSEKGSLGFTVTKGNQRIGCYVHDVIQDPAKSDGRLKPGDRLIKVNDTDVTNMTHTDAVNLLRAASKTVRLVIGRVLELPRIPMLPHLLPDITLTCNKEELGFSLCGGHDSLYQVVYISDINPRSVAAIEGNLQLLDVIHYVNGVSTQGMTLEEVNRALDMSLPSLVLKATRNDLPVVPSSKRSAVSAPKSTKGNGSYSVGSCSQPALTPNDSFSTVAGEEINEISYPKGKCSTYQIKGSPNLTLPKESYIQEDDIYDDSQEAEVIQSLLDVVDEEAQNLLNENNAAGYSCGPGTLKMNGKLSEERTEDTDCDGSPLPEYFTEATKMNGCEEYCEEKVKSESLIQKPQEKKTDDDEITWGNDELPIERTNHEDSDKDHSFLTNDELAVLPVVKVLPSGKYTGANLKSVIRVLRGLLDQGIPSKELENLQELKPLDQCLIGQTKENRRKNRYKNILPYDATRVPLGDEGGYINASFIKIPVGKEEFVYIACQGPLPTTVGDFWQMIWEQKSTVIAMMTQEVEGEKIKCQRYWPNILGKTTMVSNRLRLALVRMQQLKGFVVRAMTLEDIQTREVRHISHLNFTAWPDHDTPSQPDDLLTFISYMRHIHRSGPIITHCSAGIGRSGTLICIDVVLGLISQDLDFDISDLVRCMRLQRHGMVQTEDQYIFCYQVILYVLTRLQAEEEQKQQPQLLK

SEQ ID NO: 163322 - protein, 2466 aa, Artificial Sequence
  derived and/or modified sequence
MHVSLAEALEVRGGPLQEEEIWAVLNQSAESLQELFRKVSLADPAALGFIISPWSLLLLPSGSVSFTDENISNQDLRAFTAPEVLQNQSLTSLSDVEKIHIYSLGMTLYWGADYEVPQSQPIKLGDHLNSILLGMCEDVIYARVSVRTVLDACSAHIRNSNCAPSFSYVKHLVKLVLGNLSGTDQLSCNSEQKPDRSQAIRDRLRGKGLPTGRSSTSDVLDIQKPPLSHQTFLNKGLSKSMGFLSIKDTQDENYFKDILSDNSGREDSENTFSPYQFKTSGPEKKPIPGIDVLSKKKIWASSMDLLCTADRDFSSGETATYRRCHPEAVTVRTSTTPRKKEARYSDGSIALDIFGPQKMDPIYHTRELPTSSAISSALDRIRERQKKLQVLREAMNVEEPVRRYKTYHGDVFSTSSESPSIISSESDFRQVRRSEASKRFESSSGLPGVDETLSQGQSQRPSRQYETPFEGNLINQEIMLKRQEEELMQLQAKMALRQSRLSLYPGDTIKASMLDITRDPLREIALETAMTQRKLRNFFGPEFVKMTIEPFISLDLPRSILTKKGKNEDNRRKVNIMLLNGQRLELTCDTKTICKDVFDMVVAHIGLVEHHLFALATLKDNEYFFVDPDLKLTKVAPEGWKEEPKKKTKATVNFTLFFRIKFFMDDVSLIQHTLTCHQYYLQLRKDILEERMHCDDETSLLLASLALQAEYGDYQPEVHGVSYFRMEHYLPARVMEKLDLSYIKEELPKLHNTYVGASEKETELEFLKVCQRLTEYGVHFHRVHPEKKSQTGILLGVCSKGVLVFEVHNGVRTLVLRFPWRETKKISFSKKKITLQNTSDGIKHGFQTDNSKICQYLLHLCSYQHKFQLQMRARQSNQDAQDIERASFRSLNLQAESVRGFNMGRAISTGSLASSTLNKLAVRPLSVQAEILKRLSCSELSLYQPLQNSSKEKNDKASWEEKPREMSKSYHDLSQASLYPHRKNVIVNMEPPPQTVAELVGKPSHQMSRSDAESLAGVTKLNNSKSVASLNRSPERRKHESDSSSIEDPGQAYVLDVLHKRWSIVSSPEREITLVNLKKDAKYGLGFQIIGGEKMGRLDLGIFISSVAPGGPADLDGCLKPGDRLISVNSVSLEGVSHHAAIEILQNAPEDVTLVISQPKEKISKVPSTPVHLTNEMKNYMKKSSYMQDSAIDSSSKDHHWSRGTLRHISENSFGPSGGLREGSLSSQDSRTESASLSQSQVNGFFASHLGDQTWQESQHGSPSPSVISKATEKETFTDSNQSKTKKPGISDVTDYSDRGDSDMDEATYSSSQDHQTPKQESSSSVNTSNKMNFKTFSSSPPKPGDIFEVELAKNDNSLGISVTGGVNTSVRHGGIYVKAVIPQGAAESDGRIHKGDRVLAVNGVSLEGATHKQAVETLRNTGQVVHLLLEKGQSPTSKEHVPVTPQCTLSDQNAQGQGPEKVKKTTQVKDYSFVTEENTFEVKLFKNSSGLGFSFSREDNLIPEQINASIVRVKKLFPGQPAAESGKIDVGDVILKVNGASLKGLSQQEVISALRGTAPEVFLLLCRPPPGVLPEIDTALLTPLQSPAQVLPNSSKDSSQPSCVEQSTSSDENEMSDKSKKQCKSPSRRDSYSDSSGSGEDDLVTAPANISNSTWSSALHQTLSNMVSQAQSHHEAPKSQEDTICTMFYYPQKIPNKPEFEDSNPSPLPPDMAPGQSYQPQSESASSSSMDKYHIHHISEPTRQENWTPLKNDLENHLEDFELEVELLITLIKSEKGSLGFTVTKGNQRIGCYVHDVIQDPAKSDGRLKPGDRLIKVNDTDVTNMTHTDAVNLLRAASKTVRLVIGRVLELPRIPMLPHLLPDITLTCNKEELGFSLCGGHDSLYQVVYISDINPRSVAAIEGNLQLLDVIHYVNGVSTQGMTLEEVNRALDMSLPSLVLKATRNDLPVVPSSKRSAVSAPKSTKGNGSYSVGSCSQPALTPNDSFSTVAGEEINEISYPKGKCSTYQIKGSPNLTLPKESYIQEDDIYDDSQEAEVIQSLLDVVDEEAQNLLNENNAAGYSCGPGTLKMNGKLSEERTEDTDCDGSPLPEYFTEATKMNGCEEYCEEKVKSESLIQKPQEKKTDDDEITWGNDELPIERTNHEDSDKDHSFLTNDELAVLPVVKVLPSGKYTGANLKSVIRVLRGLLDQGIPSKELENLQELKPLDQCLIGQTKENRRKNRYKNILPYDATRVPLGDEGGYINASFIKIPVGKEEFVYIACQGPLPTTVGDFWQMIWEQKSTVIAMMTQEVEGEKIKCQRYWPNILGKTTMVSNRLRLALVRMQQLKGFVVRAMTLEDIQTREVRHISHLNFTAWPDHDTPSQPDDLLTFISYMRHIHRSGPIITHCSAGIGRSGTLICIDVVLGLISQDLDFDISDLVRCMRLQRHGMVQTEDQYIFCYQVILYVLTRLQAEEEQKQQPQLLK

SEQ ID NO: 163323 - protein, 631 aa, Artificial Sequence
  derived and/or modified sequence
MFYAHFVLSKRGPLAKIWLAAHWDKKLTKAHVFECNLESSVESIISPKVKMALRTSGHLLLGVVRIYHRKAKYLLADCNEAFIKIKMAFRPGVVDLPEENREAAYNAITLPEEFHDFDQPLPDLDDIDVAQQFSLNQSRVEEITMREEVGNISILQENDFGDFGMDDREIMREGSAFEDDDMLVSTTTSNLLLESEQSTSNLNEKINHLEYEDQYKDDNFGEGNDGGILDDKLISNNDGGIFDDPPALSEAGVMLPEQPAHDDMDEDDNVSMGGPDSPDSVDPVEPMPTMTDQTTLVPNEEEAFALEPIDITVKETKAKRKRKLIVDSVKELDSKTIRAQLSDYSDIVTTLDLAPPTKKLMMWKETGGVEKLFSLPAQPLWNNRLLKLFTRCLTPLVPEDLRKRRKGGEADNLDEFLKEFENPEVPREDQQQQHQQRDVIDEPIIEEPSRLQESVMEASRTNIDESAMPPPPPQGVKRKAGQIDPEPVMPPQQVEQMEIPPVELPPEEPPNICQLIPELELLPEKEKEKEKEKEDDEEEEDEDASGGDQDQEERRWNKRTQQMLHGLQRALAKTGAESISLLELCRNTNRKQAAAKFYSFLVLKKQQAIELTQEEPYSDIIATPGPRFHII

SEQ ID NO: 163324 - DNA, 1896 bp, Artificial Sequence
  derived and/or modified sequence
atgttctatgcccactttgtcctgagtaagagaggcccgctggccaagatctggctggccgctcactgggataagaaactcactaaagcacacgtgttcgagtgcaacctggaatcttctgttgagtcaattatctctcccaaggttaagatggccctcagaactagtggccatctgctcctcggggtggtgaggatttaccaccgcaaggcaaagtacctgctagcggactgtaatgaagcctttattaaaatcaaaatggcatttcggcccggggtcgtagacctccctgaggagaaccgggaagcagcctacaatgccatcactttgccagaggaatttcacgactttgaccagcccctgcccgaccttgacgacatagacgtcgcacagcagttttcacttaatcagtcacgcgtggaggagataaccatgcgtgaggaagtgggaaatatttccatactgcaggagaatgacttcggtgattttggcatggacgatcgcgaaataatgcgggagggatcagcttttgaggatgacgatatgttagtgagtacaacgacctccaatcttctactggagtccgagcagtctacttcgaatctgaacgagaaaatcaaccacctggagtacgaagaccaatacaaagacgataacttcggcgagggcaatgacggcggcatacttgatgataaattgatcagcaataacgatggggggattttcgacgacccccccgccctgtctgaggctggtgtcatgcttccagagcaacccgcccatgacgacatggatgaagatgataacgtgagcatgggtggtccagactctcccgacagtgttgaccccgtcgagcccatgcctacaatgaccgaccagaccacgctggtgccaaacgaagaggaggcattcgccctggagccaattgacatcacagttaaggagacaaaagccaaaaggaaacggaagctaattgtggacagcgtcaaagagttggactccaagaccattcgtgcgcagcttagtgattacagtgacattgtaaccacattggatctcgctccacctacaaagaaactcatgatgtggaaagagactggaggggtcgagaaactcttctctctgcccgcacagcccctctggaataataggcttttaaagctgttcacgcgctgtctaacacccttggtgcctgaggacctcagaaagcggagaaaaggcggggaagccgacaatctcgacgagtttctgaaggaattcgagaacccagaggtccccagagaggaccagcagcagcagcaccagcagagagatgtaatcgacgaaccaatcatcgaagagccttcccgcctccaagagtcagtgatggaagccagccgtacaaacattgatgagagcgccatgcctccgcccccaccgcagggagtcaagaggaaggcagggcagatagatcctgaacccgttatgccacctcagcaggtagagcagatggagattccgccagtagagttacctcccgaagaaccacctaacatttgtcagctgattcccgagttggaactacttcccgaaaaggagaaggagaaggaaaaagaaaaagaagatgacgaggaggaggaggatgaggatgcatccggaggggatcaggaccaggaagaacgccgttggaacaaacggacacagcagatgctccacggcctgcagcgggctctggccaagacaggcgcagagtctatttccctactggagctctgtcgaaataccaacaggaagcaggctgctgcgaagttctatagttttctagtcctgaagaagcagcaggcaatcgagctcacacaggaagaaccttactccgacataattgccacacctgggccccgcttccacattatctag

SEQ ID NO: 163325 - DNA, 1896 bp, Artificial Sequence
  derived and/or modified sequence
atgttttatgcccactttgtgctgagcaagaggggccccctggccaagatctggctggccgcccactgggacaagaagctgaccaaggcccacgtgtttgagtgcaacctggagagctctgtggagagcatcatcagccccaaggtgaagatggccctgcggaccagcggccacctgctgctgggcgtggtgcgcatctaccacaggaaggccaagtacctgctggccgactgcaatgaggccttcatcaagatcaagatggccttccggcctggggtggtggacctgcctgaagaaaatcgggaggccgcctacaatgccatcaccctgcctgaggagttccatgactttgaccagcccctgcctgacctggatgacattgatgtggcccagcagttcagcctgaaccagagccgggtggaggagatcaccatgagggaggaggtgggcaacatcagcatcctgcaggagaatgactttggagactttggcatggatgaccgggagatcatgagggagggcagcgcctttgaagatgatgacatgctggtgtccaccaccaccagcaacctgctgctggagagcgagcagagcaccagcaacctgaatgagaagatcaaccacctggagtatgaggaccagtacaaggatgacaactttggagagggcaatgatggcggcatcctggatgacaagctgatcagcaacaatgatggcggcatctttgatgatcctccagccctgtctgaggccggcgtgatgctgcctgagcagcctgcccatgatgacatggatgaagatgacaacgtgtccatgggcggccctgacagcccagacagcgtggaccctgtggagcccatgcccaccatgacagaccagaccaccctggtgcccaatgaggaggaggcctttgccctggagcccatcgacatcaccgtgaaggagaccaaggccaagaggaagaggaagctgattgtggacagcgtgaaggagctggacagcaagaccatccgggcccagctgagtgactacagcgacatcgtgaccaccctggacctggccccacccaccaagaagctgatgatgtggaaggagaccggcggcgtggagaagctgttcagcctgcctgcccagcccctgtggaacaaccggctgctgaagctgttcacccgctgcctgacccccctggtgcctgaggacctgaggaagaggaggaagggcggggaggccgacaacctggatgagttcctgaaggagtttgaaaatcctgaggtgccccgggaggaccagcagcagcagcaccagcagagagatgtgattgatgagcccatcatcgaggagcccagccggctgcaggagagcgtgatggaggccagcaggaccaacattgatgagagcgccatgcctcctcctccaccccagggcgtgaagaggaaggccggccagattgatcctgagcctgtgatgccaccccagcaggtggagcagatggagatcccccctgtggagctgcccccagaggagccccccaacatctgccagctgatccctgagctggagctgctgcctgagaaggagaaggagaaggagaaggagaaggaggatgatgaggaggaggaggatgaagatgccagcggcggggaccaggaccaggaggagcggcgctggaacaagaggacccagcagatgctgcacggcctgcagagggccctggccaagacaggagctgagagcatcagcctgctggagctgtgcaggaacaccaacaggaagcaggccgccgccaagttctacagcttcctggtgctgaagaagcagcaggccatcgagctgacccaggaggagccctacagcgacatcatcgccaccccaggcccccgcttccacatcatctag

SEQ ID NO: 163326 - DNA, 1896 bp, Artificial Sequence
  derived and/or modified sequence
atgttctacgcccacttcgtgctgagcaagcggggccccctggccaaaatttggctcgcagctcactgggataagaagctgacgaaggcacatgtgtttgagtgtaacctcgaatcctcagttgaatccattattagtccaaaggtaaagatggccctacggacaagcggacatctgctgctgggcgtcgtgcggatctaccatcgcaaggcaaaatacttgctggctgactgtaatgaggccttcataaagattaagatggctttccgtccaggagttgtggatctcccggaggaaaaccgagaggcagcgtacaatgccattacactgccagaggagttccacgatttcgaccagcctctcccagacctggacgacattgacgtggcgcaacagttctcactgaaccaatcccgcgtagaagaaatcactatgagagaagaagtcgggaatataagtattcttcaggagaacgacttcggagattttggcatggatgatcgcgagatcatgagagaaggatcagccttcgaagacgatgacatgctcgtgagcacgacaacctcaaacctgctgttggaatcagagcagtccacctctaatctgaacgagaaaatcaaccacctggagtacgaagaccaatataaagacgataacttcggagaaggcaatgatggaggaatcctggatgataagctcatctctaataacgacgggggaatcttcgacgatccccccgctttaagcgaagccggcgttatgctacccgagcagcccgcacacgacgatatggacgaggatgataacgtcagcatgggtggcccggattcgccagattcagtggatccagttgagcccatgcccacgatgacggatcaaacaacgttagtgcctaacgaagaagaggcattcgccttggaaccaatcgatatcaccgtgaaagaaacgaaggcgaaacggaaaagaaagctgattgtagacagcgtgaaagaactagatagcaaaacaatccgcgcacaattatcagattactctgacattgtcactaccctggacctggcgccaccaaccaagaagctaatgatgtggaaagagactggcggtgtggagaagctcttctcgctccccgcacagcctctgtggaacaacagactcctgaagttatttacaaggtgcctgacgcccctggtgcctgaagacttacgcaaaagaagaaagggcggtgaggccgacaacctggacgagtttctcaaggaattcgaaaatccggaagtgccgcgcgaggatcagcagcagcagcaccagcagcgcgatgttatagacgaaccaattatcgaggaaccaagccgcctgcaggagagcgtgatggaggcaagcaggacgaatatcgacgagagcgctatgccaccaccaccgccacagggcgtcaagaggaaagccgggcaaattgaccctgaaccagtgatgccacctcagcaggttgaacaaatggagatccctcccgtggaactcccaccggaggagcctcctaatatatgccagctgatccccgaactggaactcttgcccgagaaggagaaagagaaggagaaagagaaggaggacgacgaagaggaggaagacgaagatgcatcaggcggcgaccaggaccaggaagaacggaggtggaacaagcggacacaacagatgttgcacgggctccagcgagctcttgccaagaccggggctgaatccattagcctgttagagctctgtaggaatacaaatcgtaaacaggcagcagccaaattttacagtttccttgtgttgaagaagcagcaggctatcgagctcactcaggaagaaccctattccgacatcattgccactccaggtccccgattccacattatttag

SEQ ID NO: 163327 - DNA, 1896 bp, Artificial Sequence
  derived and/or modified sequence
atgttttacgctcactttgtactctcgaagaggggcccactagcaaaaatttggctggccgctcactgggacaaaaagttaacaaaggcacatgtttttgaatgcaaccttgaatcttctgtggagagcattatctctccaaaggtgaaaatggctttgcggacctcaggtcacctcctgctgggggtggtcaggatttaccatcgcaaagcaaagtatctcctcgcggattgcaacgaagctttcattaagatcaaaatggccttcaggccaggggtggtggatcttcctgaagagaaccgcgaggccgcatacaacgctatcacactgcctgaggaattccacgacttcgaccagccgctccctgatcttgatgatattgacgtggcgcagcaattcagtcttaaccagtcacgggtggaagagatcacgatgcgcgaggaggtcgggaacatcagcatcctgcaggagaacgatttcggtgactttgggatggatgaccgagagattatgagagaggggagcgctttcgaggacgacgatatgctcgtgagtactacaactagcaacttactactggagagcgaacaatcaacctccaatctaaatgagaaaattaatcatcttgagtacgaggatcaatataaagacgataacttcggcgagggtaacgacggcggtattctggatgacaagctgatctccaacaacgatggtggcattttcgatgaccccccagcactcagcgaggctggggttatgcttcctgagcagccagcccacgacgacatggatgaggacgataatgtgtccatggggggtcctgacagtcctgacagcgtcgacccagtagagcccatgcccaccatgactgatcaaaccactctagtgccaaacgaggaggaagcatttgccctcgagccaattgacattactgttaaagagactaaagcaaaacggaaacgcaagctgatcgtggattcagtgaaggaattagattccaagacaattcgggcacaactgtctgactacagtgatatcgtcacaacccttgacctggcccctcccaccaaaaagcttatgatgtggaaagagacaggcggagttgaaaagctgttctctcttcctgcacagcctctgtggaacaatcggctactcaagctcttcactagatgtttgacacctctggtacccgaggatctgaggaagcgacggaaggggggagaagctgataatctggacgagttccttaaagaattcgagaaccctgaggtaccgagggaggatcagcagcagcagcaccagcagcgtgatgtgatcgacgaaccgataattgaagagccttctcgtcttcaagagtctgtaatggaggcttcccggaccaacatagatgaatcagctatgcctccaccacccccacaaggcgtgaaacgcaaggccggacagatcgatcctgagcctgtgatgcctccgcaacaggtcgagcagatggaaatcccccctgtcgagctgcccccagaggagccaccaaatatttgccagcttattcccgaactggaactcctgcccgagaaagaaaaagagaaagagaaagagaaggaggacgacgaggaagaagaagacgaggatgcatctggtggagaccaggatcaggaggaacgccgatggaataagcggactcagcagatgctccatggcctgcagcgggctctggccaaaaccggagccgagtccattagcctattggaactctgccgcaatacaaataggaagcaggctgccgcaaagttctatagttttctcgtgctcaagaagcagcaggccattgaactgacgcaggaagaaccctatagtgatataattgcaactcctggccctcggttccatataatttag

SEQ ID NO: 163328 - DNA, 3749 bp, Artificial Sequence
  derived and/or modified sequence
aggcgcacaggtaccattttgaccgtaaacatcctgccgatttgaaccgaggatttgggcggcaggaagagccgcggcgtaacggcagccatcttgtttgtttgagtgaatcggaaaggaggcgccggctgtggcggcggcgggagctgctcggaagctacacctcgcaagggctcccccctttccccaccccctcccccgacccttttcccctccccgggccacccagcccgcccaactcccagcggagagcaaggttttcttctgttttcatagccagccagaacaatgttctacgcacattttgttctcagtaaaagagggcctctggccaaaatttggctagcggcccattgggataagaagctaaccaaagcccatgtgttcgagtgtaatttagagagcagcgtggagagtatcatctcaccaaaggtgaaaatggcattacggacatcaggacatctcttactgggagtagttcgaatctatcacaggaaagccaaataccttcttgcagactgtaatgaagcattcattaagataaagatggcttttcggccaggtgtggttgacctgcctgaggaaaatcgggaagcagcttataatgccattactttacctgaagaatttcatgactttgatcagccactgcctgacttagatgacatcgatgtggcccagcagttcagcttgaatcagagtagagtggaagagataaccatgagagaagaagttgggaacatcagtattttacaagaaaatgattttggtgattttggaatggatgatcgtgagataatgagagaaggcagtgcttttgaggatgacgacatgttagtaagcactactacttctaacctcctattagagtctgaacagagcaccagcaatctgaatgagaaaattaaccatttagaatatgaagatcaatataaggatgataattttggagaaggaaatgatggtggaatattagatgacaaacttattagtaataatgatggcggtatctttgatgatccccctgccctctctgaggcaggggtgatgttgccagagcagcctgcacatgacgatatggatgaggatgataatgtatcaatgggtgggcctgatagtcctgattcagtggatcccgttgaaccaatgccaaccatgactgatcaaacaacacttgttccaaatgaggaagaagcatttgcattggagcctattgatataactgttaaagaaacaaaagccaagaggaagaggaagctaattgttgacagtgtcaaagagttggatagcaagacaattagagcccaacttagtgattattcagatattgttactactttggatctggcaccgcccaccaagaaattgatgatgtggaaagagacaggaggagtagaaaaactgttttctttacctgctcagcctttgtggaataacagactactgaagctctttacacgctgtcttacaccgcttgtaccagaagaccttagaaaaaggaggaaaggaggagaggcagataatttggatgaattcctcaaagaatttgaaaatccagaggttcctagagaggaccagcaacagcagcatcagcagcgtgatgttatcgatgagcccattattgaagagccaagccgcctccaggagtcagtgatggaggccagcagaacaaacatagatgagtcagctatgcctccaccaccacctcagggagttaagcgaaaagctggacaaattgacccagagcctgtgatgcctcctcagcaggtagagcagatggaaataccacctgtagagcttcccccagaagaacctccaaatatctgtcagctaataccagagttagaacttctgccagaaaaagagaaggagaaagagaaggaaaaagaagatgatgaagaggaagaggatgaagatgcatcagggggcgatcaagatcaggaagaaagaagatggaacaaaaggactcagcagatgcttcatggtcttcagcgtgctcttgctaaaactggagctgaatctatcagtttgcttgagttatgtcgaaatacgaacagaaaacaagctgccgcaaagttctacagcttcttggttcttaaaaagcagcaagctattgagctgacacaggaagaaccgtacagtgacatcatcgcaacacctggaccaaggttccatattatataaggagctagaagcattatagctagtgtttgattcactagtgcttacaaattgcccccatgtgtaggggacacagaaccctttgagaaaacttagatttttgtctgtacaaagtctttgcctttttccttcttcatttttttccagtacattaaatttgtcaatttcatctttgagggaaactgattagatgggttgtgtttgtgttctgatggagaaaacagcaccccaaggactcagaagatgattttaacagttcagaacagatgtgtgcaatattggtgcatgtaataatgttgagtggcagtcaaaagtcatgatttttatcttagttcttcattactgcattgaaaaggaaaacctgtctgagaaaatgcctgacagtttaatttaaaactatggtgtaagtctttgacaagaaaaaaaaacaaacaaacacttctttccatcagtaacactggcaatcttcctgttaaccactctccttagggatggtatctgaaacaacaatggtcaccctcttgagattcgttttaagtgtaattccataatgagcagaggtgtacgcgaaattgtgttatgactgatagccttcagctacaaaaagataggactgacctggtttaaagtgttctattttgtaaatcattccatttgagtctttctgatgaacttggctatactgaaatctgttattttagtgaggctccaaaatgagcaaagctaggcctgattagagtagagtgactattaaaaaacataactttctaggagctataaatcaaagttttaaaaagatgtttggatatatttgagtattccgatcatgaaaacagaaattgccctgcctactacaaggacagactgatgggaaattatgcacctggtcaacttagcttttaagcagacgatgctgtaaaaactaacggcttctctgatatttattgtaagttttagtactgatctccttttccagtgctgcacactcctggtttggaactttaatagcgttgcaacgaaatcctatatccagtttcctgtaatttaattgaagaaaaatacatccaaataaagactttattattaacagaccagatagcatcagaaatcatgtgactgttatgattatcagaatgtcttaactttttagggcaaagttaacactgaaagttctagcttaagtgttgaaacttttgtgggaaaaaaaaatcacttttgaaactcagacttcagtgtatacccaataatttaaaattatgtgaaatgttttaaatttgtgaactcgtaattactgttttaatgattcagtttcttcagagtggtaattgtataaaattgctattgcagctttacattcaatatgatgtgcctgtaaaccaaggagttttccccgtttgtaaaaagacattgtagataattgaatgtttgattttagaaaggtcattagtttcttgttacacattttgttagtctggtttttgttgcttatcgggtttaatattgttcttgaaaatagttgatgctatgttatgtataacttttctaataaaagttgtgttataagctgt

SEQ ID NO: 163329 - DNA, 1896 bp, Artificial Sequence
  derived and/or modified sequence
atgttctacgcccacttcgtgctgagcaagagaggccccctggccaagatctggctggccgcccactgggacaagaagctgaccaaggcccacgtgttcgagtgcaacctggagagcagcgtggagagcatcatcagccccaaggtgaagatggccctgagaaccagcggccacctgctgctgggcgtggtgagaatctaccacagaaaggccaagtacctgctggccgactgcaacgaggccttcatcaagatcaagatggccttcagacccggcgtggtggacctgcccgaggagaacagagaggccgcctacaacgccatcaccctgcccgaggagttccacgacttcgaccagcccctgcccgacctggacgacatcgacgtggcccagcagttcagcctgaaccagagcagagtggaggagatcaccatgagagaggaggtgggcaacatcagcatcctgcaggagaacgacttcggcgacttcggcatggacgacagagagatcatgagagagggcagcgccttcgaggacgacgacatgctggtgagcaccaccaccagcaacctgctgctggagagcgagcagagcaccagcaacctgaacgagaagatcaaccacctggagtacgaggaccagtacaaggacgacaacttcggcgagggcaacgacggcggcatcctggacgacaagctgatcagcaacaacgacggcggcatcttcgacgacccccccgccctgagcgaggccggcgtgatgctgcccgagcagcccgcccacgacgacatggacgaggacgacaacgtgagcatgggcggccccgacagccccgacagcgtggaccccgtggagcccatgcccaccatgaccgaccagaccaccctggtgcccaacgaggaggaggccttcgccctggagcccatcgacatcaccgtgaaggagaccaaggccaagagaaagagaaagctgatcgtggacagcgtgaaggagctggacagcaagaccatcagagcccagctgagcgactacagcgacatcgtgaccaccctggacctggccccccccaccaagaagctgatgatgtggaaggagaccggcggcgtggagaagctgttcagcctgcccgcccagcccctgtggaacaacagactgctgaagctgttcaccagatgcctgacccccctggtgcccgaggacctgagaaagagaagaaagggcggcgaggccgacaacctggacgagttcctgaaggagttcgagaaccccgaggtgcccagagaggaccagcagcagcagcaccagcagagagacgtgatcgacgagcccatcatcgaggagcccagcagactgcaggagagcgtgatggaggccagcagaaccaacatcgacgagagcgccatgccccccccccccccccagggcgtgaagagaaaggccggccagatcgaccccgagcccgtgatgcccccccagcaggtggagcagatggagatcccccccgtggagctgccccccgaggagccccccaacatctgccagctgatccccgagctggagctgctgcccgagaaggagaaggagaaggagaaggagaaggaggacgacgaggaggaggaggacgaggacgccagcggcggcgaccaggaccaggaggagagaagatggaacaagagaacccagcagatgctgcacggcctgcagagagccctggccaagaccggcgccgagagcatcagcctgctggagctgtgcagaaacaccaacagaaagcaggccgccgccaagttctacagcttcctggtgctgaagaagcagcaggccatcgagctgacccaggaggagccctacagcgacatcatcgccacccccggccccagattccacatcatctag

SEQ ID NO: 163330 - protein, 914 aa, Artificial Sequence
  derived and/or modified sequence
MVQRMWAEAAGPAGGAEPLFPGSRRSRSVWDAVRLEVGVPDSCPVVLHSFTQLDPDLPRPESSTQEIGEELINGVIYSISLRKVQLHHGGNKGQRWLGYENESALNLYETCKVRTVKAGTLEKLVEHLVPAFQGSDLSYVTIFLCTYRAFTTTQQVLDLLFKRYGRCDALTASSRYGCILPYSDEDGGPQDQLKNAISSILGTWLDQYSEDFCQPPDFPCLKQLVAYVQLNMPGSDLERRAHLLLAQLEHSEPIEAEPEALSPVPALKPTPELELALTPARAPSPVPAPAPEPEPAPTPAPGSELEVAPAPAPELQQAPEPAVGLESAPAPALELEPAPEQDPAPSQTLELEPAPAPVPSLQPSWPSPVVAENGLSEEKPHLLVFPPDLVAEQFTLMDAELFKKVVPYHCLGSIWSQRDKKGKEHLAPTIRATVTQFNSVANCVITTCLGNRSTKAPDRARVVEHWIEVARECRILKNFSSLYAILSALQSNSIHRLKKTWEDVSRDSFRIFQKLSEIFSDENNYSLSRELLIKEGTSKFATLEMNPKRAQKRPKETGIIQGTVPYLGTFLTDLVMLDTAMKDYLYGRLINFEKRRKEFEVIAQIKLLQSACNNYSIAPDEQFGAWFRAVERLSETESYNLSCELEPPSESASNTLRTKKNTAIVKRWSDRQAPSTELSTSGSSHSKSCDQLRCGPYLSSGDIADALSVHSAGSSSSDVEEINISFVPESPDGQEKKFWESASQSSPETSGISSASSSTSSSSASTTPVAATRTHKRSVSGLCNSSSALPLYNQQVGDCCIIRVSLDVDNGNMYKSILVTSQDKAPAVIRKAMDKHNLEEEEPEDYELLQILSDDRKLKIPENANVFYAMNSTANYDFVLKKRTFTKGVKVKHGASSTLPRMKQKGLKIAKGIF

SEQ ID NO: 163331 - DNA, 2745 bp, Artificial Sequence
  derived and/or modified sequence
atggttcagagaatgtgggcagaggcagcaggtccagccggaggcgccgagcctctgtttcctgggagcaggcggtccagatccgtctgggatgcagtccggttagaggttggcgtacccgatagttgcccagtggtgctgcatagtttcactcagctggatcccgaccttccgcggccagagtcttccactcaggagatcggtgaagagctcatcaatggggtcatctatagcatatcattaagaaaagtgcagcttcaccacggagggaacaaggggcagcgctggttagggtacgaaaacgagagtgcactgaatttatatgaaacctgcaaggttcgcacagtgaaagcaggcaccctggaaaaactggtggaacatcttgttccagccttccagggttctgacctaagttatgtaactatcttcttatgcacctacagggccttcacaaccacgcagcaggtgttggacctccttttcaagagatacggccgctgtgacgccttgacagccagcagcagatacggctgcatcctgccttattctgatgaagacggcggcccccaagatcaactgaaaaatgctataagctcaattctgggtacctggctggatcagtatagtgaggacttttgccagcctcccgatttcccttgtttgaagcaactggtggcatatgtgcagctcaacatgcctggtagcgacctagagcgccgggctcacttattgctcgcccagctggagcactctgagccaatcgaggccgagcccgaagcgctatcccctgtgcccgcactcaaacctactccagagcttgaactggccctcacacctgcccgcgctccatcaccggtgcccgcgcccgctcccgaacccgagcctgccccaactcctgctccagggagcgaactggaggtcgcccccgcgccagctccagaacttcaacaggcccccgagccagccgtgggactggagtccgctcctgcgcccgccctcgaactagagcccgcccccgaacaggaccctgccccatcccaaaccttagagctggagcctgcccccgcaccggtgccatctctccagcccagttggccttcccccgtggtggccgagaatggtctgagtgaagagaaaccacatttgctagtttttccacccgatctcgtggccgagcagttcaccctgatggacgcggaactgttcaagaaggtggtcccctaccattgtctgggctcaatatggagccagcgagataagaaaggcaaagaacacctcgcgccaaccattagagccactgtgacacagtttaactctgtggccaattgtgtgatcaccacatgtctggggaacaggagcacgaaggctccagaccgggctcgggtcgtcgagcattggatagaggtcgcccgtgagtgcagaatcctcaagaacttttcttccctgtatgctatcttgagtgccttgcagtccaattcaatccacaggctgaagaagacctgggaagacgtgagccgagattccttcagaattttccagaaactgtccgaaattttcagcgacgaaaataattacagcttatcccgtgagttgctgatcaaagagggcacgtcaaaattcgcgacgctcgagatgaaccctaagcgggcacagaagagacccaaggaaacagggattattcaggggacagtgccctacctggggacatttctgactgatctggtgatgctcgatacagccatgaaagactacttatacgggcggttaataaactttgagaagaggcgcaaggaattcgaggttatcgcacagatcaaacttctacagtcagcgtgcaacaattactcaatcgcccccgatgagcagttcggagcctggtttcgtgccgttgagcgcctatctgaaacagagagctacaatttatcttgcgagctagaacccccatcagagagtgcttcaaataccctcagaaccaaaaagaatacagcgatagtaaaacggtggtccgaccggcaagccccctccaccgagctctctacgtccgggtccagtcactctaaatcctgcgaccagctgaggtgtgggccttatctgtcctccggcgatattgcggacgcgttgtcagtgcactctgccggcagttcgagctccgacgtggaagagattaatatcagcttcgtgccagagagccccgatggacaggaaaaaaaattctgggaaagtgctagtcagtcctctcctgagacttcagggatttcctcagcctcctctagtacttcatcgtcatctgccagcactaccccggttgcagccaccagaactcataagaggtcagtgtccggcctttgcaattcttcaagcgctctccctctttataatcaacaggtcggcgactgctgcataataagagtgtctctggacgttgacaatgggaacatgtacaagagtattttggtcactagccaggacaaagccccggcagtgatacggaaggcaatggataaacacaatctggaggaggaagagcccgaagattatgagctcctgcaaatcttatccgatgataggaagctgaaaattcctgagaacgcaaacgtgttttacgccatgaattcgacagccaactatgactttgtcctgaagaagcgaacgttcacaaaaggcgtcaaagtgaagcacggcgcctcttccactctgcctagaatgaaacagaagggactgaaaattgccaaggggatattctag

SEQ ID NO: 163332 - DNA, 2958 bp, Artificial Sequence
  derived and/or modified sequence
atgcaccgacgcagactggccctcggcctgggattttgtctcctcgccggcacttctcttagtgtgttgtgggtgtacttagaaaactggctgccagtttcttacgttccctactatttgccttgccccgaaatactgccaatgatgatggctctgtcatgcttatgccatcagcaacatgaagccgccctacaggagggagaggccacaccggcgagaggaatggtgacagttccatcagcacaggctgctggggctcaggcccatacggccgcagatactcacactcttgtgggagctcaccgtctgagggggaatttgcagcccagagcatctgccgcacacttaccagcgactgagcctgatcactgggggcacggcgtatgtcgaggtgagtcatcgacacaggagattggagaggagctgatcaatggtgtgatttacagcatctcactaaggaaggtccagctgcaccacggcgggaacaaaggtcaacgctggctgggttatgagaacgaaagtgcactcaatctgtatgagacctgcaaggtccggactgtgaaagccggcactctggaaaagctagttgaacatcttgtgccagcctttcagggctccgacttgtcctacgttacgattttcttatgcacatacagggccttcacaaccacccagcaggtgttagatctcttatttaagcggtacggccgatgcgacgcactcactgctagttcaaggtacggttgtatccttccttattcagacgaggacggtggaccccaggatcagctcaagaatgcaatttcttcgattctgggaacatggctcgatcaatatagcgaggatttctgccaaccaccggactttccatgtctcaagcagctggtggcctatgtccagcttaatatgcctggcagcgacctagagaggagggcccacttgctgctggcacagctcgagcattctgagccaattgaagcagaaccagaggccttgagccctgtacctgctttgaaacccacccccgaactggaactggctctgactccagctcgggctcccagccctgtgcctgcaccagccccagagccggagccagccccaactcccgccccaggctctgaactggaggttgcacctgctcctgccccagaactgcagcaagcgcccgagcctgcagtcggcctggagtctgctccagccccggccctggaactcgagcctgcacccgaacaggatccagccccctctcagaccctcgaactggaacccgccccggctccggtcccctcactacaaccatcttggcctagcccagtggtagctgagaatggactatccgaagaaaagccccatctgctggtttttcccccggatcttgtggcagagcagtttacattgatggacgccgagttattcaaaaaagtggtcccctaccattgcctagggagcatatggtcccaacgggacaagaaaggcaaggagcatttggcccccactatccgcgcaacagtgacccagtttaacagcgtggcaaattgcgtcattaccacttgtctcggaaatagatccacaaaggcaccggatcgggcacgggttgtggagcactggattgaagtggcccgagagtgtcgaattttgaaaaacttttcctcactctatgcaattctgagtgctttgcagtctaactctattcacaggctgaagaagacttgggaggacgtgagcagggatagcttccggatctttcagaagcttagcgaaatattctcagatgaaaataattacagtctctctcgggaactgctcatcaaggagggaaccagcaaatttgccacccttgaaatgaaccctaagagagcccaaaagcgacccaaggagaccgggattatacagggaactgtgccatacctgggtaccttcctcacagacctggtcatgttggacaccgctatgaaggactatttgtatgggaggctaatcaactttgagaagaggcgcaaagagtttgaggtgatcgctcaaatcaagctcttgcagtccgcctgtaacaattactctatcgcccctgacgagcagtttggggcctggtttcgggctgtcgagcgactgtctgaaacagagtcgtataacctgtcctgcgagcttgagccaccttccgagagcgctagtaatacgttaagaactaagaagaacacggccattgttaaacgctggtcagacagacaggcaccatctacggagctgtccacttcaggttcgagtcattcaaagagctgcgaccagctgcggtgtggcccatacctgagctcaggtgatatcgcagacgccctgtcagtgcacagcgcagggtcttcatctagtgacgtggaggagatcaacatctctttcgtgcccgagtcacccgatgggcaggagaagaagttctgggagagcgctagtcagtccagcccagagaccagtggaatctcatccgcctcaagctcgaccagctccagctcagcctcaactactcctgtcgccgccacccggactcataagcggtctgtaagcggcctctgtaactcgagctcagcactgccactgtacaaccagcaagtaggcgattgctgtatcatccgagtgagcctggacgtggacaatgggaatatgtataagagcatcttggtgacctctcaggacaaggctccagctgtgatccggaaggcaatggacaaacacaacctggaggaagaggaacctgaggattatgaacttttgcagatcctcagcgacgatcgaaagttgaagattcccgagaatgccaacgttttttatgcgatgaatagtacggctaactatgacttcgttctcaaaaagcgaacatttaccaaaggcgtgaaagtgaagcatggggcctctagtactctcccccgcatgaaacagaaagggctcaagattgcaaagggaatcttctag

SEQ ID NO: 163333 - DNA, 2745 bp, Artificial Sequence
  derived and/or modified sequence
atggtgcagaggatgtgggccgaggccgccggccctgctggaggagctgagcccctcttccctggcagccgccgcagccgctctgtgtgggatgctgtgcggctggaggtgggcgtgcctgacagctgccctgtggtgctgcacagcttcacccagctggaccctgacctgcccaggcctgagagcagcacccaggagattggagaggagctgatcaatggagtcatctacagcatcagcctgaggaaggtgcagctgcaccacggcggcaacaagggccagcgctggctgggctatgaaaatgaaagtgccctgaacctgtatgagacctgcaaggtgaggacagtgaaggccggcaccctggagaagctggtggagcacctggtgcctgccttccagggcagtgacctgtcctatgtgaccatcttcctgtgcacctaccgggccttcaccaccacccagcaggtgctggacctgctcttcaagagatatggccgctgtgatgccctgacagccagcagccgctatggctgcatcctgccctacagtgatgaagatggcggcccccaggaccagctgaagaatgccatcagcagcatcctgggcacctggctggaccagtacagcgaggacttctgccagcccccagacttcccctgcctgaagcagctggtggcctacgtgcagctgaacatgcctggcagtgacctggagcggcgggcccacctgctgctggcccagctggagcacagcgagcccatcgaggccgagcctgaggccctgagccctgtgcctgccctgaagcccaccccagagctggagctggccctgaccccagcccgggcccccagccctgtgcctgccccagcccctgagcctgagcccgcccccaccccagcccctggcagcgagctggaggtggccccagccccagcccctgagctgcagcaggcccctgagcctgctgtgggcctggagagcgccccagccccagccctggagctggagcccgcccctgagcaggaccctgcccccagccagaccctggagctggagcccgccccagcccctgtgcccagcctgcagcccagctggcccagccctgtggtggccgagaatggcctgtctgaggagaagccccacctgctggtgttccccccagacctggtggccgagcagttcaccctgatggatgctgagctgttcaagaaggtggtgccctaccactgcctgggcagcatctggagccagagggacaagaagggcaaggagcacctggcccccaccatccgggccaccgtgacccagttcaacagcgtggccaactgtgtgatcaccacctgcctgggcaacagaagcaccaaggccccagaccgggcccgggtggtggagcactggattgaggtggcccgggagtgccgcatcctgaagaacttcagcagcctgtatgccatcctgagcgccctgcagagcaacagcatccaccggctgaagaagacctgggaggatgtgtcccgggacagcttccgcatcttccagaagctgtctgagatcttcagtgatgagaacaactacagcctgagccgggagctgctgatcaaggagggcaccagcaagtttgccaccctggagatgaaccccaagagggcccagaagaggcccaaggagaccggcatcatccagggcaccgtgccctacctgggcaccttcctgacagacctggtgatgctggacacagccatgaaggactacctgtatggccgcctcatcaactttgagaagaggaggaaggagtttgaagtcatcgcccagatcaagctgctgcagagcgcctgcaacaactacagcatcgccccagatgagcagtttggagcctggttccgggctgtggagcggctgtctgaaacagagagctacaacctgagctgtgagctggagcccccatctgagagcgccagcaacaccctgcggaccaagaagaacacagccatcgtgaagcgctggagcgaccggcaggcccccagcacagagctgagcaccagcggcagcagccacagcaagagctgtgaccagctgcgctgtggcccctacctgagcagcggggacattgctgatgccctgtctgtgcacagcgctggcagcagcagcagtgatgtggaggagatcaacatcagctttgtgcctgagagcccagatggccaggagaagaagttctgggagagcgccagccagagcagccctgagaccagcggcatcagcagcgccagcagcagcaccagcagcagcagcgccagcaccacccctgtggccgccaccaggacccacaagaggtctgtgtctggcctgtgcaacagcagcagcgccctgcccctgtacaaccagcaggtgggggactgctgcatcatccgggtgtccctggatgtggacaatggaaacatgtacaagagcatcctggtgaccagccaggacaaggccccagctgtgatcaggaaggccatggacaagcacaacctggaggaggaggagcctgaggactatgagctgctgcagatcctgagtgatgacaggaagctgaagatcccagaaaatgccaacgtgttctacgccatgaacagcacagccaactatgactttgtgctgaagaagaggaccttcaccaagggcgtgaaggtgaagcatggagccagcagcaccctgcccaggatgaagcagaagggcctgaagatcgccaagggcatcttctag

SEQ ID NO: 163334 - DNA, 2958 bp, Artificial Sequence
  derived and/or modified sequence
atgcacagaagaaggctggccctgggcctgggcttctgcctgctggccggcaccagcctgtctgtgctgtgggtgtacctggagaactggctgcctgtgtcctatgtgccctactacctgccctgcccagagatcctgcccatgatgatggccctgagctgcctgtgccaccagcagcacgaggccgccctgcaggagggggaggccaccccagcccggggcatggtgacagtgcccagcgcccaggccgccggggcccaggcccacacagctgctgacacccacaccctggtgggcgcccaccggctgcggggcaacctgcagccccgggccagcgctgcccacctgcctgccacagagccagaccactggggccacggcgtgtgccgcggggagagcagcacccaggagatcggggaggagctgatcaacggggtcatctacagcatcagcctgaggaaggtgcagctgcaccacggcggcaacaagggccagcgctggctgggctatgaaaatgaaagtgccctgaacctgtatgagacctgcaaggtgaggacagtgaaggccggcaccctggagaagctggtggagcacctggtgcctgccttccagggcagtgacctgtcctatgtgaccatcttcctgtgcacctaccgggccttcaccaccacccagcaggtgctggacctgctcttcaagagatatggccgctgtgatgccctgacagccagcagccgctatggctgcatcctgccctacagtgatgaagatggcggcccccaggaccagctgaagaatgccatcagcagcatcctgggcacctggctggaccagtacagcgaggacttctgccagcccccagacttcccctgcctgaagcagctggtggcctacgtgcagctgaacatgcctggcagtgacctggagcggcgggcccacctgctgctggcccagctggagcacagcgagcccattgaagctgagcctgaggccctgagccctgtgcctgccctgaagcccaccccagagctggagctggccctgaccccagcccgggcccccagccctgtgcctgccccagcccctgagcctgagcccgcccccaccccagcccctggcagcgagctggaggtggccccagccccagcccctgagctgcagcaggcccctgagcctgctgtgggcctggagagcgccccagccccagccctggagctggagcccgcccctgagcaggaccctgcccccagccagaccctggagctggagcccgccccagcccctgtgcccagcctgcagcccagctggcccagccctgtggtggctgaaaatggcctgtctgaggagaagccccacctgctggtgtttcctccagacctggtggccgagcagttcaccctgatggatgctgagctgttcaagaaggtggtgccctaccactgcctgggcagcatctggagccagagggacaagaagggcaaggagcacctggcccccaccatccgggccaccgtgacccagttcaacagcgtggccaactgtgtgatcaccacctgcctgggcaacagaagcaccaaggccccagaccgggcccgggtggtggagcactggattgaggtggccagagaatgtcgcatcctgaagaacttcagcagcctgtatgccatcctgagcgccctgcagagcaacagcatccaccggctgaagaagacctgggaggatgtgtcccgggacagcttccgcatcttccagaagctgtctgagatcttcagtgatgagaacaactacagcctgagccgggagctgctgatcaaggagggcaccagcaagtttgccaccctggagatgaaccccaagagggcccagaagaggcccaaggagaccggcatcatccagggcaccgtgccctacctgggcaccttcctgacagacctggtgatgctggacacagccatgaaggactacctgtatggccgcctcatcaactttgagaagaggaggaaggagtttgaggtgattgcccagatcaagctgctgcagagcgcctgcaacaactacagcatcgccccagatgagcagtttggagcctggttccgggctgtggagcggctgtctgaaacagagagctacaacctgagctgtgagctggagccccccagcgagagcgccagcaacaccctgcggaccaagaagaacacagccatcgtgaagcgctggagcgaccggcaggcccccagcacagagctgagcaccagcggcagcagccacagcaagagctgtgaccagctgcgctgtggcccctacctgagcagcggggacattgctgatgccctgtctgtgcacagcgctggcagcagcagcagtgatgtggaggagatcaacatcagctttgtgcctgagagcccagatggccaggagaagaagttctgggagagcgccagccagagcagccctgagaccagcggcatcagcagcgccagcagcagcaccagcagcagcagcgccagcaccacccctgtggccgccaccaggacccacaagaggtctgtgtctggcctgtgcaacagcagcagcgccctgcccctgtacaaccagcaggtgggggactgctgcatcatccgggtgtccctggatgtggacaatggaaacatgtacaagagcatcctggtgaccagccaggacaaggccccagctgtgatcaggaaggccatggacaagcacaacctggaggaggaggagccagaagattatgagctgctgcagatcctgagtgatgacaggaagctgaagatcccagaaaatgccaacgtgttctacgccatgaacagcacagccaactatgactttgtgctgaagaagaggaccttcaccaagggcgtgaaggtgaagcacggggccagcagcaccctgcccaggatgaagcagaagggcctgaagatcgccaagggcatcttctag

SEQ ID NO: 163335 - DNA, 2745 bp, Artificial Sequence
  derived and/or modified sequence
atggtgcagcggatgtgggccgaggccgccggccccgccggcggcgcagaacctctgtttcctggaagtcgacggtcacgatctgtgtgggatgccgtccgcctggaggtgggcgtgcctgattcctgcccagtggtgttacactccttcacacagctggaccctgatctgccgaggcctgaaagcagcactcaggagattggagaagaactaataaacggcgtgatatacagtatctcactgcgaaaggtgcagctccaccacggcggaaataaaggtcagcgctggctcgggtatgagaacgagagtgccctgaacctttacgagacgtgtaaggtgcggactgtcaaagcaggtacactcgagaagttggtggaacatcttgtcccggccttccagggttccgatctgagctacgttacgatatttttgtgtacgtatagagcctttacgacgacgcagcaggtcctagacttgctgttcaaacggtatggaaggtgcgatgcacttaccgcctcctccagatatggctgtattctgccctatagcgacgaagacggcgggcctcaagatcagttaaaaaacgcgatatcaagcatactggggacctggcttgaccaatattccgaggatttttgtcagccccccgatttcccttgccttaaacaactagtcgcttacgttcagttgaacatgccagggtctgacctggaaaggcgcgcgcatctcctgttggcacaactggagcatagcgaaccaattgaagccgaacctgaggccctgtctcccgtgcccgccctaaaacctacccctgaactcgagttagctcttacacctgctagagcgccaagtcctgtcccagcccccgcccccgaacccgaacctgcgcccactcctgcgcctggtagcgaactggaagtcgccccagcaccagcccccgagctccagcaggcacctgaaccggccgttggcttagagtccgccccagcccccgcgctggagttagaacccgcgcccgagcaggacccggcacccagccagactttggagctggagcccgctccggcgcccgtccctagtctgcaaccttcctggccctctcctgtggtcgccgagaatgggttgtccgaagaaaagccacatctgttagtgttcccccccgatctcgttgccgagcaattcaccctaatggacgcggagctgtttaagaaggtagtcccgtaccactgtctgggctcaatctggtcccagagggataagaagggtaaagagcatctagcccctacgatcagagccacagttacccaattcaattctgtcgccaactgcgtcattactacttgcttagggaaccgcagtaccaaagctccagatcgggctcgcgtagttgaacattggatcgaagtcgccagagaatgccggatcctcaaaaattttagttccctatatgccatcctgtccgctctccagtccaacagcatccataggttgaagaagacatgggaggatgtctcccgtgattcattcagaatttttcagaaactttctgagattttcagcgacgagaacaattactcactctctcgggagctgctgattaaggaagggaccagtaaatttgctacgctggagatgaatcccaaacgcgcacagaagagaccgaaagaaacagggattatacagggcaccgttccttatctggggactttcctgaccgatctggtcatgctggacaccgccatgaaggattatctctatggacgcctgatcaatttcgaaaaacggcgtaaggagtttgaagtcattgcacaaattaagctgctgcaatctgcctgcaacaattactccatagcgccggatgagcaattcggtgcctggttccgcgctgtcgaacggctttcagaaaccgaatcttacaacctcagctgtgagttggagcccccgtccgagagtgcatcgaatactctccgtacaaaaaagaatactgccattgtgaagcgatggtccgaccgccaggcaccctccacagaacttagcaccagcgggtccagtcatagcaaaagctgtgaccaactgcgctgcggaccctaccttagcagcggcgatatcgccgatgccctatctgtccattccgccggatcctcgtcaagcgacgtggaggagatcaacatctcattcgtgccggaaagccctgacggccaggaaaaaaagttttgggaatcggcctctcaatctagccccgaaactagcggtatctctagcgcatcctcttcaacttcctcttcctctgcttcaactacacccgtcgccgccacacgaacccacaaacgatccgtgtcaggattatgtaactcttctagtgcattacccttatacaatcagcaggtgggcgactgttgtatcatccgtgtcagcctggacgtggataacgggaatatgtataagagcattctcgtgacgtctcaggataaggcgcctgcagtcatacgcaaggctatggacaagcataatctcgaagaagaggagcctgaagattatgagctcctgcagatcctgtcagatgacaggaaactgaaaatccctgagaacgctaatgtgttctacgcgatgaatagcacagccaattatgattttgtgttgaagaaacgtaccttcactaaaggagtcaaagtgaaacacggagcctctagtaccctgccccggatgaagcagaaaggactcaagatcgcaaagggcattttctag

SEQ ID NO: 163336 - DNA, 2958 bp, Artificial Sequence
  derived and/or modified sequence
atgcaccggcggcggctggccctgggcctgggcttctgcctgctggctggaacatccctgtctgtgttgtgggtctatcttgaaaactggctccctgtgagctatgtcccttattatctgccatgcccagagattctgccaatgatgatggcattgtcgtgcctgtgtcaccagcagcatgaagcagccctgcaagagggggaggccacccctgcacgggggatggtgacagtgcccagcgcacaggcagccggtgctcaagcacatactgctgccgatacccacacgctggtaggcgcacaccgcctgaggggtaacttacagcctagggcatcagccgcacacctgcctgcaaccgaacccgatcattggggacatggggtatgtcgaggcgagagcagtacacaggaaattggtgaggagctaattaacggcgtcatatattcaatcagtctcaggaaggtacagctgcatcacggcggcaacaaggggcagcgatggctgggatatgaaaatgaaagcgccttaaacctctacgagacctgtaaggtaagaactgtgaaagcaggcacactggagaagctggtagagcacttggttcctgctttccagggaagcgacttaagttatgtcactatctttctgtgcacttacagggccttcacgactactcagcaggttctagatcttctgttcaagcgctacggacggtgtgacgctctgaccgccagcagtcggtatggctgcatcctgccctacagcgatgaagatggtggacctcaggaccagctgaaaaatgcaatctcatcaatcctgggcacctggttagatcaatacagcgaggatttttgtcagcccccggactttccatgtttgaaacagttagttgcttacgtgcagctgaatatgcctggtagtgaccttgaaaggagggcacatctactgttggcccaactcgaacacagcgagccaatagaagccgaacccgaagccctgtcgcccgtgccggctcttaaacctacgcctgagctcgagttagcattgacgcctgcaagggccccaagcccagtgcccgcccccgctcccgaacccgagcctgcacctacaccagcccccgggtccgaacttgaagtcgccccagccccagcccccgaactgcagcaggccccagagccagcagtggggttggagtccgctcctgcaccagctctcgagcttgagcctgccccagaacaggacccagccccttcccaaacacttgagctggagcccgcacccgcccccgtcccgtcccttcagccttcttggcctagcccagttgtcgccgaaaacggtttgtccgaagaaaagccgcatttgttagtgtttcctccggacttggtggctgagcagttcaccttgatggacgccgagcttttcaaaaaggtggtgccatatcattgcctaggaagcatttggtcacagagagacaagaaaggcaaagaacacctagctcctacaatccgcgctaccgtaacccagtttaacagtgtggcaaactgtgtcatcaccacctgtctcggtaatcgcagcacaaaagccccagatcgcgctcgggtcgtagaacattggatcgaagtggcgcgagagtgccggatactaaaaaacttttccagcctctacgcaattctgtcggctctacaaagtaacagtattcataggctgaaaaagacgtgggaagacgtgagtagagatagcttccgaatcttccagaagctttctgagatttttagcgacgaaaataactatagcctcagccgggagcttctgataaaagaaggcacaagcaagtttgccaccctcgagatgaaccctaaacgcgcccagaagaggcccaaagagaccggcattatccagggaaccgtgccttatctcggcacgttcctaaccgacctggttatgctcgacaccgccatgaaagattacctgtatggaagactgatcaatttcgagaagagaagaaaagagttcgaagtgattgcacagataaaactgttacagtccgcatgcaacaactattctatcgcaccagacgaacagtttggcgcgtggtttcgggccgtcgagcggctatccgaaacagaatcctacaatctctcatgcgagttagagccaccatccgaatcggcttctaataccctgcgtaccaaaaagaatacagcaattgtcaagcgatggagcgatcgtcaggccccctccactgagctgtctacatccggttcatctcattccaaatcatgtgaccagctgagatgtgggccctacttgtcttctggagacattgcagacgcactcagcgtgcactctgccgggagctcatcaagtgacgtcgaggagatcaacatttcgttcgttcccgaaagccctgatgggcaagagaagaaattctgggagtcggcatcacagagctcaccagagacatctggcatctcttctgctagttccagcacatctagcagttccgcctctacaaccccggtggcagctacaaggacacacaagaggtctgtgagtggtctgtgtaattcctcatccgctcttcctctttataaccaacaggttggtgattgctgcatcatacgggtctccctcgatgtggacaacggcaatatgtacaagtccatccttgtaaccagccaggataaagctcccgctgtgatcaggaaggcaatggataagcataatcttgaagaagaggaaccggaagattacgaattgttacagatcctctctgatgaccgaaagctcaaaatcccagagaacgctaatgtcttctacgctatgaacagcaccgctaactatgacttcgtgcttaaaaaaagaacttttactaagggagtcaaggtcaaacacggagcctccagtacactgcctagaatgaagcagaagggcttgaagatcgccaaaggtattttttag

SEQ ID NO: 163337 - DNA, 2745 bp, Artificial Sequence
  derived and/or modified sequence
atggtccagaggatgtgggcggaggcggctggccctgctggtggggctgaacccttgttccccggaagcagaagatcacgctctgtgtgggatgccgtgcggctcgaggtaggggtgcccgactcatgtcctgtggtcctccacagctttacacaacttgatccggatctgccgagacccgagtcttctacccaggaaatcggggaagagctgattaacggcgtgatctacagcatatccctgcggaaagtgcagctccatcatggtggaaacaaagggcaaaggtggttaggatatgagaatgaaagcgccctcaacctctatgagacctgcaaagtccgtactgtcaaagcgggaacgctggagaagctggtcgagcacctggtcccagcattccaaggtagtgacctctcctatgtgacaatctttctttgcacttacagggctttcaccacaactcagcaggtgcttgatttactgttcaaaagatacggaaggtgcgatgccttgacggccagtagccggtacgggtgtatactgccttactctgatgaggacggcggaccccaggaccaacttaagaatgccattagttccattcttggtacatggctcgaccaatactctgaggatttttgccagccgcctgattttccatgcttaaagcagctggttgcctacgtgcagctgaacatgcctggttctgacttggaaagaagggcacacttactcttagcacaattagagcattccgaacctatcgaggcggagccagaagcactcagtccagtgccagccctgaagccaacaccagaactggagctggcccttacccctgctcgagcaccctctcctgtgccagccccagcaccagaacctgagcctgctcccacacctgcgcctgggtctgagttagaggttgcaccagctcccgctccagagttgcagcaggctcctgagccagccgtcggattggagtccgcccctgctcctgcgttggagctcgagccggcacctgagcaagacccagctccctcccaaaccctggaattggagcccgcacccgctcctgttccctctcttcagccttcttggccttctccagtggtggccgagaacggcctgagtgaagagaagcctcatttgctggtttttcctcctgaccttgtggcagaacagtttacactgatggacgctgaattgtttaaaaaagtcgttccatatcactgtttaggctcgatctggagccagagagacaagaaaggcaaggaacatctagctcccactattcgtgccacggtgacacaatttaatagcgtcgccaactgcgtcataaccacgtgtctgggaaatagaagtacaaaggctccagaccgggctagagttgtggaacattggatcgaagtcgctagagagtgccgcatccttaaaaattttagcagtctgtacgcgatattatcagcattgcaaagcaactccatccaccgcttaaagaagacatgggaagatgtctccagggacagttttaggatcttccagaagctctcggagatcttcagcgacgagaacaactacagtctctcccgggaacttttgatcaaggaaggtaccagcaagttcgccaccctggagatgaatcctaaacgggctcagaagcgtccaaaagagacagggattatacagggcactgtgccttacctgggcacttttttgaccgatctcgttatgctagatacagccatgaaagactacctttacggcagactcattaattttgaaaagcggaggaaggagttcgaagttattgcacagattaaactgctgcagtccgcatgtaacaactattcgatagcaccagatgaacaatttggggcttggtttagagcagttgaaaggctgagcgagaccgaaagttataacctgagctgcgaattggagccaccatcagagagtgcctcaaacactttacgcacaaagaagaacacggcaatcgtcaagcggtggtcagacagacaggccccaagcactgagctgtcaacttccggatcatctcattcaaagtcatgcgatcagctcagatgtggcccatacctgagctcaggagacatcgccgacgctttgtcagtgcatagcgcgggatcaagcagcagtgatgtcgaagagataaacatcagctttgtacccgaatcacccgacgggcaagagaagaaattttgggaaagtgcatcacaatctagccccgaaacttcggggatctcatcagcatcgtcctccacaagttcatcatccgcctctacaactcctgtcgcagccacaaggacacataaacggagtgtctctggcctgtgcaactctagttccgcactcccactctacaaccagcaggtcggcgattgttgtattatcagggtgtccctagatgtcgataatggtaatatgtacaagtcgatcctcgtcacgtcacaggacaaagcaccagccgtgattagaaaggcgatggataaacataacctggaagaggaagaacctgaggactatgagctgctccaaattttgagtgatgacagaaagttgaaaataccagaaaacgcgaatgtcttttatgccatgaattctactgcgaattatgactttgtgctcaaaaagagaacctttactaagggagtcaaagtgaagcacggggctagcagtaccttaccacgaatgaagcaaaagggcctcaaaatcgcgaaaggcattttttag

SEQ ID NO: 163338 - DNA, 2958 bp, Artificial Sequence
  derived and/or modified sequence
atgcaccgtcgcaggctggcactcgggcttggcttctgtctgctcgctggcacatccctgtcagtgttgtgggtgtacctggaaaactggcttcctgtgtcctatgtgccgtattatctcccctgtcctgagatcctcccaatgatgatggccttgtcttgtttatgtcatcagcaacacgaggccgctctgcaggaaggagaggccacccccgcaagaggaatggtgactgtgccaagtgcacaggcagcaggcgcacaagctcatactgctgcagacacacacactctcgtgggagctcacaggctcaggggtaatctacagccgagggccagtgccgctcacctgcccgctaccgagcccgatcattggggacatggcgtgtgccggggagagagctctactcaagaaatcggcgaggagctcattaacggtgtgatctatagcattagcctgaggaaagtccagctccaccacggaggaaacaagggccagagatggttaggctatgagaatgaatccgccttaaatctgtacgaaacatgcaaggtccgaacggtgaaagccggtacactcgaaaagctcgtcgagcacctagtgcccgcattccaggggagcgacctaagctatgttaccatctttttgtgcacttatcgggctttcacaaccacccagcaggtgctggatcttctttttaaaaggtatggtcgatgcgatgccttgacagcatctagtagatatggctgtattttgccatatagtgatgaagatggcggtccacaggaccagctgaaaaatgctatatcttcaattcttggcacttggctggaccaatatagcgaggacttttgccaaccgcctgactttccttgtctgaagcaactggtggcctatgttcagctcaacatgcctggcagcgatctagaaaggcgggcacatcttctgttagcacagcttgaacactccgagccaattgaggccgaaccagaagcattaagtcccgtccccgctcttaaacccactccagagctggagttagctctgacacccgctagggctccatctcctgtgcctgcgcctgctcccgagcccgagccggctccgacacccgcacccggatctgaactcgaagtcgcaccagctcctgcgcctgagttacagcaggccccagagcccgcagttggcctggaaagtgcccctgcgccagccctagagctcgagccagcccctgagcaggatccagccccatctcagaccctcgagttggaaccagctccagcaccagttccttccctgcagccaagctggccctcaccagtagtggctgagaacggactcagcgaggaaaaaccgcacctgctggttttccctcctgatctggtggccgaacagttcactctgatggatgccgaactgttcaagaaggttgtcccttatcattgtctcggctctatctggtcgcagagggacaaaaaaggcaaggagcacctcgccccaactatcagggcaacagtgacccagtttaattccgtggcaaactgtgtgattacaacgtgtctaggaaatcgcagcactaaggcacccgaccgggctagggtggtcgagcactggatcgaggttgcacgcgagtgccgaatattgaaaaacttctcatcgttgtacgccatcctcagtgcccttcagagcaattccatacacagattaaagaaaacatgggaggacgtaagccgcgacagctttcgaatattccagaaattgtctgagatcttctcagatgaaaataattacagcctgtctcgggagctcttgatcaaggaagggacaagtaagtttgcgactctggaaatgaatcctaagcgtgcgcagaaacgccctaaagagacgggcattatacagggtactgtaccctatctgggaacgtttcttaccgatttggtaatgctggatacagcaatgaaggattacctctacgggaggctgataaatttcgagaaaagacgcaaagaattcgaagtaatagcgcagataaagctgcttcagagtgcctgtaacaactattcaattgctcccgatgagcagtttggggcttggttcagggccgttgaacggttatccgaaactgaaagctacaatctttcgtgcgagcttgagccaccctccgagtcagcgtccaatacccttaggacgaaaaaaaacaccgccattgtgaaaaggtggtctgacagacaagcgccatccacagagttatccacttcaggatcgagccactccaagagctgtgaccaattgagatgcggcccatacctgtcttcgggtgacattgccgacgctctgagcgtgcactctgcaggctcatcgagcagtgacgtcgaggagatcaacatatccttcgtacctgagagcccagacggacaggagaagaagttttgggaatccgcttcgcaaagcagccctgaaacatctggaatttcatccgcaagttccagcactagtagttcctctgcctccaccacacccgtggctgccactagaactcataagagatctgtgtccggactgtgtaacagcagctcagctctgcctctctataaccaacaagttggagattgctgtatcatccgcgtgtctttagacgtagataacggaaacatgtacaaatccatccttgttacttcccaggataaggcccctgctgtgatccgaaaagccatggacaaacacaatttagaggaggaagagccggaggattacgagctactgcagatcctctcagacgacaggaagcttaaaatacctgagaacgccaacgtgttttatgcgatgaactcaaccgcaaactatgatttcgtgctgaaaaaaagaaccttcacgaagggagtaaaagtaaagcatggcgcttctagcaccctccctcgaatgaagcaaaaaggactgaagatcgctaaaggcatattctag

SEQ ID NO: 163339 - DNA, 3634 bp, Artificial Sequence
  derived and/or modified sequence
gcgcccgcgctgcgagccttccatggtgcagcgcatgtgggccgaggcggccgggcctgctggcggcgccgagccgctgtttccgggctcccggcggagccgcagcgtgtgggacgccgtgcgcctggaggtgggcgtccccgacagctgcccggtggtgctgcacagcttcacgcagctagaccccgacctgccgcgcccggagagctccacgcaggagatcggtgaggagctgatcaacggagtcatctactccatctccctgcgcaaggtgcagctgcaccacggaggcaacaaggggcagcgctggctcgggtatgagaatgagtcggccctgaacctttatgagacttgcaaggtgcggaccgtgaaggctggcacgctggagaagctggtggagcacctggtgccagccttccagggcagcgacctctcctacgtcaccatcttcctgtgtacctatagagccttcaccaccacccaacaggtcctggacctgctgttcaaaaggtacggtagatgtgacgccctcacggcctcctctagatacggctgcatcctcccctattccgacgaggatggtggaccccaggaccaacttaaaaatgccatctcctccatcctgggcacctggctggaccagtactcggaggatttctgtcaacctccggactttccctgcctcaagcagctggtggcctacgtgcagctcaacatgccaggctcagacctggagcgccgtgcccaccttctcctggcccagctggagcactcggaacccattgaggcagagcctgaggctctgtcaccagtgccagctctaaaaccaactccagagctcgagctagctctaacaccagctcgagcacccagcccagtgccggctccagccccggagccagagccagctccaacaccagctccaggttcagagctagaagtagctccagcaccagctccggagctccagcaggctccagagccagctgtgggactagaatcggctccagcgccagctctggaactagagccagctccagaacaggatccagctccctcacaaactctagagctggagccagctccagcaccagttccatcattacagccttcctggccttcacctgtggttgcagagaacgggctgagtgaggagaagcctcacctcttggtgttccctccagatctggtggcagagcagtttacactgatggatgcggaactgttcaagaaggtggtgccctaccactgcctgggctccatctggtcccagcgggacaagaagggcaaggagcacctggcgcccaccatccgcgccactgtcacccagttcaacagtgtggccaactgtgtcatcaccacctgcctcgggaaccgaagcacgaaagccccagacagggccagggtggtggagcactggatcgaggtggccagggagtgccggatcctcaagaacttctcgtcactgtatgccatcctctctgccctgcagagcaactccatccaccgtctgaagaagacgtgggaagacgtttccagggacagtttccggatctttcagaagctgtcagagatcttctcagatgagaacaactactcattgagccgggagctgctcatcaaggagggcacctccaagtttgccaccctggagatgaaccccaagagagcccagaaacggccgaaggagacgggcatcatccagggcaccgttccctacctgggcacgttcctcaccgacctggtgatgctggacactgccatgaaggactatctgtatggcagactcatcaactttgagaagaggaggaaggagttcgaggtgatcgcccagatcaagctgctgcagtcggcctgcaacaactacagcatcgcgccagatgagcaatttggggcctggttccgggccgtggagcggctcagcgagactgagagctacaacctgtcgtgcgagctggagcccccatccgagtcagccagcaacaccctcaggaccaagaagaacacagccattgtcaagcgctggagcgaccgccaggcccccagcactgagctcagtaccagtggcagctcccactccaagtcctgtgaccagctcaggtgtggcccctacctcagcagcggggacatcgctgacgcgctcagcgtgcactcggccggctcctctagctccgacgtggaggagatcaacatcagcttcgtcccggagtctcctgatggccaggaaaagaagttctgggaatcagcctcacagtcatccccggagacctccggcatcagctcagcctccagcagcacctcgtcctcctcagcctccaccacgcccgtggctgccacacgcacccacaagcgctctgtctcagggctctgcaactccagctccgcgctgccgctctacaaccagcaggtgggcgactgctgtatcatccgcgtcagcctggacgtggacaatggcaacatgtacaagagcatcctggtgaccagccaagataaggctccggctgtaatccgcaaggccatggacaaacacaacctggaggaggaggagccggaggactatgagctgctgcagattctctcagatgaccggaagctgaagatccctgaaaacgccaacgtcttctatgccatgaactctaccgccaactatgactttgtcctcaagaagcggaccttcaccaagggagtgaaggtcaagcacggagccagctccaccctccctcgcatgaagcagaaaggactcaagattgccaagggcatcttctgagggcatcctcccagggtctggctggctggtagccaagcacttatggaccagagtggcccaggccagctgggcgccttcctcccacctgccagcccagggtaccccagactccagtttcatcctgaacctctcccgctgctgggattgacgcctgccattggtcaggctgacctggcctcccgtggaccactcgctgccttaggtgccttctgctctctggaaccagaggactagctgacttttgccaaggagcagtgccaacgggcatggcatggtgccctgcctgcccccgggcgccacctctgtacacttccctgacaccttcccaggtgtgggtcactgccacctgtgcccatgggcaccccagagcacccactgtgaccactgcagttctctcatgcccacaggcactggcctgtgaccttcgcaggggtcccggcccctcccaccactctagcctttctcaggctgcaccaaagattccatcatcagggccaactgagagtgagggagtctcacccaccgcttaccccagccctcccctgggagcagagagagaaaccctcttcatggaccagactctgcacccggtgagtgaggacagtcccagctgagtcccatcgatgttgaatctcatgccactgcaagtgccattcaccactgcgtcctgggctttacgagaccatgcaagacgggggttagtgaggaaggaggatttggggtgggggtggggtgattgaatatttgtataaaaagcaaaaagaaaaaaaaaatgtttgtttactgattggggaggggcaatatttatttgttgtaaatagcaaatgctagacttgaatattatattaaaatcctgtttctactata

SEQ ID NO: 163340 - DNA, 3705 bp, Artificial Sequence
  derived and/or modified sequence
ctcttttctgtctggcccgcggccccgctgcctgccctgctccaggctccacctgcgccgccgatcgcccgggtatcgcgggggcccaggccagctgagtccgttttccgcgccggggtggcgcccctccaaccgtcctaacgccgggccggcagcaaggagtgttcctgggacctcagagaccaggctcagagcctgacatccctgcgaggggacagcctcatccgcccaggccagtgggggtctctacaagtgcccaggctcaggtgcagcccccagcaatgcatcgccggagactggccctgggtctggggttctgcctgttggcgggcacaagcctcagtgtcctgtgggtgtatcttgagaactggctgccagtctcctatgtcccctattatctcccctgcccagagatcttacccatgatgatggctctttcttgcctctgccaccagcaacatgaagctgcactacaagagggagaagccactccagcccgtggtatggtcacagtaccctcagcccaagctgctggagcacaggcccacacagctgctgacactcacaccctggttggcgcccatcgtctccgagggaaccttcaacccagagcttctgcagcacatctaccagccactgaacctgaccattggggtcacggtgtttgccgtggggaaagctccacgcaggagatcggtgaggagctgatcaacggagtcatctactccatctccctgcgcaaggtgcagctgcaccacggaggcaacaaggggcagcgctggctcgggtatgagaatgagtcggccctgaacctttatgagacttgcaaggtgcggaccgtgaaggctggcacgctggagaagctggtggagcacctggtgccagccttccagggcagcgacctctcctacgtcaccatcttcctgtgtacctatagagccttcaccaccacccaacaggtcctggacctgctgttcaaaaggtacggtagatgtgacgccctcacggcctcctctagatacggctgcatcctcccctattccgacgaggatggtggaccccaggaccaacttaaaaatgccatctcctccatcctgggcacctggctggaccagtactcggaggatttctgtcaacctccggactttccctgcctcaagcagctggtggcctacgtgcagctcaacatgccaggctcagacctggagcgccgtgcccaccttctcctggcccagctggagcactcggaacccattgaggcagagcctgaggctctgtcaccagtgccagctctaaaaccaactccagagctcgagctagctctaacaccagctcgagcacccagcccagtgccggctccagccccggagccagagccagctccaacaccagctccaggttcagagctagaagtagctccagcaccagctccggagctccagcaggctccagagccagctgtgggactagaatcggctccagcgccagctctggaactagagccagctccagaacaggatccagctccctcacaaactctagagctggagccagctccagcaccagttccatcattacagccttcctggccttcacctgtggttgcagagaacgggctgagtgaggagaagcctcacctcttggtgttccctccagatctggtggcagagcagtttacactgatggatgcggaactgttcaagaaggtggtgccctaccactgcctgggctccatctggtcccagcgggacaagaagggcaaggagcacctggcgcccaccatccgcgccactgtcacccagttcaacagtgtggccaactgtgtcatcaccacctgcctcgggaaccgaagcacgaaagccccagacagggccagggtggtggagcactggatcgaggtggccagggagtgccggatcctcaagaacttctcgtcactgtatgccatcctctctgccctgcagagcaactccatccaccgtctgaagaagacgtgggaagacgtttccagggacagtttccggatctttcagaagctgtcagagatcttctcagatgagaacaactactcattgagccgggagctgctcatcaaggagggcacctccaagtttgccaccctggagatgaaccccaagagagcccagaaacggccgaaggagacgggcatcatccagggcaccgttccctacctgggcacgttcctcaccgacctggtgatgctggacactgccatgaaggactatctgtatggcagactcatcaactttgagaagaggaggaaggagttcgaggtgatcgcccagatcaagctgctgcagtcggcctgcaacaactacagcatcgcgccagatgagcaatttggggcctggttccgggccgtggagcggctcagcgagactgagagctacaacctgtcgtgcgagctggagcccccatccgagtcagccagcaacaccctcaggaccaagaagaacacagccattgtcaagcgctggagcgaccgccaggcccccagcactgagctcagtaccagtggcagctcccactccaagtcctgtgaccagctcaggtgtggcccctacctcagcagcggggacatcgctgacgcgctcagcgtgcactcggccggctcctctagctccgacgtggaggagatcaacatcagcttcgtcccggagtctcctgatggccaggaaaagaagttctgggaatcagcctcacagtcatccccggagacctccggcatcagctcagcctccagcagcacctcgtcctcctcagcctccaccacgcccgtggctgccacacgcacccacaagcgctctgtctcagggctctgcaactccagctccgcgctgccgctctacaaccagcaggtgggcgactgctgtatcatccgcgtcagcctggacgtggacaatggcaacatgtacaagagcatcctggtgaccagccaagataaggctccggctgtaatccgcaaggccatggacaaacacaacctggaggaggaggagccggaggactatgagctgctgcagattctctcagatgaccggaagctgaagatccctgaaaacgccaacgtcttctatgccatgaactctaccgccaactatgactttgtcctcaagaagcggaccttcaccaagggagtgaaggtcaagcacggagccagctccaccctccctcgcatgaagcagaaaggactcaagattgccaagggcatcttctgagggcatcctcccagggtctggctggctggtagccaagcacttatggaccagagtggcccaggccagctgggcgccttcctcccacctgccagcccagggtaccccagactccagtttcatcctgaacctctcccgctgctgggattgacgcctgccattggtcaggctgacctggcctcccgtggaccactcgctgccttaggtgccttctgctctctggaaccagaggactagctgacttttgccaaggagcagtgccaacgggcatggcatggtgccctgcctgcccccgggcgccacctctgtacacttccctgacaccttcccaggtgtgggtcactgccacctgtgcccatgggcaccccagagcacccactgtgaccactgcagttctctcatgcccacaggcactggcctgtgaccttcgcaggggtcccggcccctcccaccactctagcctttctca

SEQ ID NO: 163341 - DNA, 2745 bp, Artificial Sequence
  derived and/or modified sequence
atggtgcagagaatgtgggccgaggccgccggccccgccggcggcgccgagcccctgttccccggcagcagaagaagcagaagcgtgtgggacgccgtgagactggaggtgggcgtgcccgacagctgccccgtggtgctgcacagcttcacccagctggaccccgacctgcccagacccgagagcagcacccaggagatcggcgaggagctgatcaacggcgtgatctacagcatcagcctgagaaaggtgcagctgcaccacggcggcaacaagggccagagatggctgggctacgagaacgagagcgccctgaacctgtacgagacctgcaaggtgagaaccgtgaaggccggcaccctggagaagctggtggagcacctggtgcccgccttccagggcagcgacctgagctacgtgaccatcttcctgtgcacctacagagccttcaccaccacccagcaggtgctggacctgctgttcaagagatacggcagatgcgacgccctgaccgccagcagcagatacggctgcatcctgccctacagcgacgaggacggcggcccccaggaccagctgaagaacgccatcagcagcatcctgggcacctggctggaccagtacagcgaggacttctgccagccccccgacttcccctgcctgaagcagctggtggcctacgtgcagctgaacatgcccggcagcgacctggagagaagagcccacctgctgctggcccagctggagcacagcgagcccatcgaggccgagcccgaggccctgagccccgtgcccgccctgaagcccacccccgagctggagctggccctgacccccgccagagcccccagccccgtgcccgcccccgcccccgagcccgagcccgcccccacccccgcccccggcagcgagctggaggtggcccccgcccccgcccccgagctgcagcaggcccccgagcccgccgtgggcctggagagcgcccccgcccccgccctggagctggagcccgcccccgagcaggaccccgcccccagccagaccctggagctggagcccgcccccgcccccgtgcccagcctgcagcccagctggcccagccccgtggtggccgagaacggcctgagcgaggagaagccccacctgctggtgttcccccccgacctggtggccgagcagttcaccctgatggacgccgagctgttcaagaaggtggtgccctaccactgcctgggcagcatctggagccagagagacaagaagggcaaggagcacctggcccccaccatcagagccaccgtgacccagttcaacagcgtggccaactgcgtgatcaccacctgcctgggcaacagaagcaccaaggcccccgacagagccagagtggtggagcactggatcgaggtggccagagagtgcagaatcctgaagaacttcagcagcctgtacgccatcctgagcgccctgcagagcaacagcatccacagactgaagaagacctgggaggacgtgagcagagacagcttcagaatcttccagaagctgagcgagatcttcagcgacgagaacaactacagcctgagcagagagctgctgatcaaggagggcaccagcaagttcgccaccctggagatgaaccccaagagagcccagaagagacccaaggagaccggcatcatccagggcaccgtgccctacctgggcaccttcctgaccgacctggtgatgctggacaccgccatgaaggactacctgtacggcagactgatcaacttcgagaagagaagaaaggagttcgaggtgatcgcccagatcaagctgctgcagagcgcctgcaacaactacagcatcgcccccgacgagcagttcggcgcctggttcagagccgtggagagactgagcgagaccgagagctacaacctgagctgcgagctggagccccccagcgagagcgccagcaacaccctgagaaccaagaagaacaccgccatcgtgaagagatggagcgacagacaggcccccagcaccgagctgagcaccagcggcagcagccacagcaagagctgcgaccagctgagatgcggcccctacctgagcagcggcgacatcgccgacgccctgagcgtgcacagcgccggcagcagcagcagcgacgtggaggagatcaacatcagcttcgtgcccgagagccccgacggccaggagaagaagttctgggagagcgccagccagagcagccccgagaccagcggcatcagcagcgccagcagcagcaccagcagcagcagcgccagcaccacccccgtggccgccaccagaacccacaagagaagcgtgagcggcctgtgcaacagcagcagcgccctgcccctgtacaaccagcaggtgggcgactgctgcatcatcagagtgagcctggacgtggacaacggcaacatgtacaagagcatcctggtgaccagccaggacaaggcccccgccgtgatcagaaaggccatggacaagcacaacctggaggaggaggagcccgaggactacgagctgctgcagatcctgagcgacgacagaaagctgaagatccccgagaacgccaacgtgttctacgccatgaacagcaccgccaactacgacttcgtgctgaagaagagaaccttcaccaagggcgtgaaggtgaagcacggcgccagcagcaccctgcccagaatgaagcagaagggcctgaagatcgccaagggcatcttctag
